United States Patent Application Publication US 2013/0096032 A1 - sequence listing, part 2

SEQ ID NO: 33 - DNA, 97146 bp, Arabidopsis thaliana
aagcttttgaaccattcttgaaactttatctccttattttgaccaggcatggaaactctggaacaccggggaagatattgctcttgtggatccggtcatctttgaagagtgttttgaaaatgaaatacgcagatgtgtgcacgtaggactattgtgtgtacaagatcacgcaaatgataggccgagcgttgcaacggtgatttggatgctaagtagcgagaactcaaaccttccagagccaaagcaacctgcatttatacctagaaggggcacttcagaagttgaatcctcgggacaaagcgacccaagagcatcgatcaacaatgtgagcctcacaaaaataacaggacgttagctctgtaagtgagataaacctactgctaaagaattttgatgaaaaaatgtttaagttgtatatctgtatgtaagagtaatctataggttacgaactaaaattcagaatctggtcatgttcttgtatgaagtcacataaatatagaacatgttttattgtagacagagcatctgagcgtacttctttggaatacagtttctgctctttagtccaatcattgcacatacaaatacacagaatgtagatatgtaatcataggagtttctcgataccaacaaaactctccatttttggtacgtaattaatgattattgttggtgttcttttagttagtttcacacttttaagtcacatgaatcagttcttacatctttttgaaagtccaacctttgagatatatccggaactggggcgtgactcacagttaatgactgatccacttggttttcaatacttacacagcatttatacattttcactaaatccttgctctgaaacaaacacaaatatgaaggttgtcttcgttatcttctttttcttcctcttccaattttgtatctctgtggatacaattatgagaagacagtccttgagagatggtgaggttatactctccgcagggaagagattcgcgtttggattcttcagtcttggggattcagagctccggtatgttgggatttggtatgctcaaatctctcaacagactattgtttgggttgcaaacagagaccatcctattaatgacacctctgggatggtaaagttcagcaacagaggcaatctctctgtctatgcatctgacaatgaaacagagcttatctggtcaacaaatgtttcagatagtatgttggaaccaactttagttgctacactctctgatttaggcaaccttgttctgtttgatccagtcacagggagaagtttctgggagagctttgatcaccctacagacacgtttcttccgtttatgagattgggattcacacgaaaagacggtttggatcgctctctaacatcatggaagtctcatggtgaccctggttctggagacttaatactgcggatggaacgtagagggtttccacagttgattctgtacaaaggtgtaaccccatggtggcgtatggggtcatggaccgggcataggtggagcggggtgcctgaaatgccaatagggtacatcttcaataactcatttgtgaataatgaggacgaagtatccttcacttacggtgtgacagatgcttcggtcataacaagaaccatggtgaacgagactggaaccatgcaccggtttacatggattgcgagggacaagagatggaatgatttctggtcagttcctaaagagcagtgcgataactacgctcattgtggccctaacggttactgtgattcccctagctcaaaaacgtttgagtgcacatgcctacctggttttgagcccaagtttccccggcattggttcttgagggactcttctggcgggtgtacaaagaaaaagagagcttcaatatgcagtgagaaagacgggtttgtgaagttaaagcgcatgaagattcccgacacatcagatgcaagtgtggatatgaacataacattgaaggagtgcaaacagaggtgcttgaagaactgctcttgtgtcgcttacgcaagtgcttaccacgagagtaaaagaggagcaataggatgcttgaaatggcatggtggtatgttggatgcaaggacatacttgaactcgggacaagatttctacatacgtgtagacaaggaagagttaggtacacatctataaatgagaatccctattttctacgttcttgctcttcataaaacaaccactctgtttcattaaaacaaagagaataaagaaacatgtcaatgtttagtatcgaagtacttcaaatactgagtttcttgcttgtttcagcgcggtggaacagaaatggcttatcagggaagaggagagtccttctgattcttatcagtttgattgcagccgtaatgttactaactgtcattttgttctgtgttgtaagggagcgacgaagtaagtgaatatctgatgatgaatctcttaagatgatatgctgctatcttagctcacaactaactacttgaaacatgttcaagtgcagagtcaaacaggcatagaagctcttcggcaaacttcgccccggtcccttttgattttgacgaatcatttagatttgaacaagacaaggcgagaaaccgggagttacctttatttgatcttaacacgatcgttgcagcaacaaataacttctcttcccaaaacaagcttggagcaggtggtttcggacctgtttataaggtaatgaagaggcaatatccatttttcatcaatactcctccaagagagaacactattaagttcaataagtagtaaggaatattgtttcctttgtttctacttagggcgtgttacaaaaccgtatggagatagcggtgaagaggttgtcgagaaactcgggacaaggaatggaagagttcaagaacgaggtcaagctgatatcaaagttgcagcatcgaaatctcgtgaggatcttaggatgttgcgttgaattggaagagaagatgttggtatacgagtatttaccaaacaagagcctagactatttcatattccgtacgttcaacatttttaactcaggttcaaattctccctttcaggaagatcaatgactctgaattttcttgtttctttcttcttatcatcatgctagatgaagagcagagagcagagttggattggccaaaaagaatggagatagtccgagggattgctcgtggaatcttatatcttcatcaagattcaagactgagaatcatccacagagatctcaaggccagcaatatacttcttgacagtgaaatgatcccaaagatttcagatttcggcatggctagaatctttgggggcaaccaaatggaaggatgcacaagtagggtcgtcggaacattgtgagttactcttttctgaaacaccacaaaactgtccaaaatcttacaaccttaaactgtttcaatcttgttgcacagcggatatatggcaccggagtatgcaatggagggacagttctccattaaatccgacgtctatagctttggagtattgatgttagagatcataaccggaaagaaaaacagtgctttccacgaggaatcatctaacttagtcggacatgtaagtacataactgaaaattttacacaaaaacagaggaaaaaaaacagaacataagtaaatgtatgtttctccgtcttgtagatttgggatctatgggaaaacggtgaagcaacagagatcatagacaatttaatggaccaagagacttatgatgagagagaagtgatgaagtgcatacaaattgggttgctctgtgtgcaagaaaacgcttcggacagagtagacatgtcctctgttgtcatcatgttgggtcataacgccactaatcttccgaatccaaagcatcctgcgtttacttccgcgagaaggagaggcggtgaaaatggtgcttgtcttaagggacaaaccggtatttctgttaatgacgttaccttcagcgacattcaaggtcgttaaaacaacttccaaatgttttactttttttcgtataagaagagaagaagactagaggatcagttacaggaatcaggaatcttattaactctgtaagtttgtgtaatgagactggttttttgacaaaacttatttattgaagtactgataacaaaagaaagaaaatgactaataataaaaccattgctaaaaacaaaacacaaaaaggaaatttcttcgctgctataaaataattttgtgcagaaaattcaaggttgttatgtagttaatgtatcttcgaaaaagtcaaaactgatgttattttcttatcccctatccaagtttgttccaatatacatatacttatagcaaagcaaccaatacacaaaaccaataattgtgttttaattctttcttctcaagacaaaacctatgtgctgtggctttttctcaagaacaacggatttttgttcttgtcctgttttcttcaggttcagtttcttcatccaggttagttaattccaaaaatctgattatatgtaagaataggtcaagtttcaacaaagttcataaacctgaaaataacttctctgttcttatttcagtaatctaaccattgcacagacgcagataacaaaatttgtaaacataggagtttctcaaaacgtgtatattacatactattatgtatataaacagactgagattggcgtggtggtgaggttaacgtcctgttacagctgtgaggctcacatcattgatagataccttttgactactctggtcagaagattcagcctcagaagctcctcttcttactataaacgctggctgcttcggatcggcgaggctcatgttctcggtagttagcatccatatcacgtttgaaacatttggtctatcgtttgcaacttcttgcacacataacagtccaatatgaacacatttctctatctctttctcgaaacacttatcaaagacggctggatctgctagagaagcagcctcaccgtcgttccacagcttccaagcctgtaaaaaccaagtctttaaggtaagtttcgaatcttgattaaccataagttactaaaaacactgctttgtaacacttacataagccaaaaggttgagattattctcttccttgtgagaactagagtttcttctcccacttatgatctcgagaaatataacccccaagctgaaaacatctgatttttctgaaaagaaaccttccattgcatactccggtgacatatagccgctgcaataacaatatttgaataaaaccgaatttcgtaatgtttgttgtgtattttggaatggatacttactatgttccaacaacccttcttgtgttagcttcatcttcattcgctcggaaaattcttgcaagtccaaaatcagatatcttggggtttagattctcatctaacaaaatgttgctggcttttaaatctctgtgtatgatctttagtcttgaatctctgtgaaggtacaaaagacctctgcaaattccttccattatgttgaaccgagtcttccaatcaagaatcttttgcttcattgggtctgagaaaagttagcaaaaacattagccttctcaataatcatcccgagccaaacggtataaacagagttaaaaagagagttagaggtgataagtttaccaaaaagatatgcatccaagcttttctttggcatatattcatatactaacattctttcttcaccttcaatacaacatccaagtaacttcactagattccgatgttgcaacttagatatcacaaccacttcgttcataagttcctctagtccttgacctgatttccgtgagagcctcttcactgcaatttcttgtccttcaggtaattttccctaaaaaaaaagattaccaatcacttagtctgagataatttgtacacatatctccctccagaaaacttcttttgttatgattttaccttgtaaacaggaccaaacccgccttgcccgagcttgtttcttagagagaagctatcagttgatgtagctaacacttgaaactcaaagagtggaagctccttgagcttgatttggttagaagcagactcattatcacttgtaagtgcttccattctcttaaacattagctctgcacttctatctttcgctggagctgctaaggtaatgatcaatgaagcaaaacaattatgataaaagaaacaatcagaatctaacattcatgaataaacaaaactctaacctggacgctttttgtatttccggcatgctaaaagaacgcagaccgcagcaattaacataacgcctatcacaggtgctgcgatcataactgctagattgctatgtgtttctacaaaaagttggtaagtaaaaacttaagtcagtgaagaaaacaaaaatggagaaggaaacaaagtgagaactactagatatatttcactcactgagttctgaatgagcaacacgaataaaaagatcaatgccacttcccaaaaatgattgcatatcaactaaatcaccactccaaagcatgcatccaattcctctatcatatgcataagctgtgcaagaacagttatctaagcatactttaggacaaacttgttcactagcttcagaccgttccgcagagattggtactttcatcttctgcagtttcaaaaaaccatctgcttttcctccaccaccaccattacttacatttctctgtctttcacactgcaatggagcttttctcatacatccattactccaattaccaccattccactctgtgttattctttggaacaaaccctttaacacatttacaaggcgggttttccccggcatggcagctcccgaatcgaccacatctaccgtatgcatcacagtctgtgtatggaaactttacacctatcctccaagttctcatagaagtactccaatctttctgataaataattccttcaggatccaagttaaagtgatacatgaacgaatcattagcataagacattgagatcgttccttgattatcactgttaagattaaacccatcaagaaacagaagtgaatccatattcggtaaaccgatgaaaacctgaccgttccacggtccgctacgccacgttgggacattgttcttccagataagaagctcaggaaacgtgaaaggagcaataccagctgtgtagtttcctgttgaaggatcatcgtggcttgtccaagaagtaagctttaggttacctccagttctaccgtcggtgccaagagtcattcttggcatgaaagaatcataaggatgcttgaaactctcccaaagaatctcaccattgtttctgttgtcttgtaacataagattcccagaatccataagctgaacccaagtagcatttggagctactggtactgagacattcgtcgaccatacaaggcgatttcgaccatcggtaaccgcgagatttccatcttgatagatcgagataacaccggaagtgtcgttgatgggagagtctttgttagcaacccaaaccacagtttggattggaatcttttcgtaccaaatcccaacataacgtaaccgagtagtggaattaacaggagtgaagaaaccaaacctgaaaataccacttttgcatagaagggtctctgactctgagtctttgataggacttgagaaagtgattctgtcctcaccaaaacagagtctccgagacaacaaacaagtgcatgcaagtagaagaagaacaaaacgacgacgtatggtcactgaaaccaccataactctttgaaacagagaatgactccagttttgctttgttttcctacacgagaggtaaattagtagtctttttctgtctctatgagaagacttgacttagaaaatgatgtaaaagttttatgtttcaacgaagatttgtttttggtgtgagtaataatgttattaggtggattcattgaatagcccaccaattagcagtgagagtggaataaaccaccaatcttgacttttctttaaatgcagaggaaacgattgaaagcgagaggactacttgccttagtgcgatttcaatggggtcattgtttatacatttcgagtacacttgttttatttgcagattatagcatttgaaaacaaatattacttttttctgttctcattcttggtgatacaaacgaacgcgtgtttcacagcccacttggtgttttgccgtcgttaaagtttgaggaatttgagttgaatttgtttatgtcatgccgttctagattggattaggtcgcaaatctttttgtgggtagctaatttggaatttgttgaggcaagcacacaatgtatcacatgaaatgcctaaacgaagtgtacaaaagattcgatttctgttcagttgaaacggaatagaaagtttttttttaaactatgagaaaggtttttaccaaacaaatttatcttgtattaaaaaaggatgtggtctctatcgaacaacacatacttttgactttgcatgcaaatacgagacaatgtgccacgaggccaaaatttgcaatttttaaagaattattagatggtgacaaaaaattgaatagagaaattaggtggggatattgcccttgatacaattgttatgtgaagcctaatttgttttatattggtaacatgttatttttttgtatggacgttctaagttttttacttaccaatgaaagccacacaattcacaaatcacaatgatgactgatgagtaatgacatctaaaacgacagaagccgaaactagtattattagaaagtctaattgactcaaaacgccaaatctttgagcaaaaataaaagggaaatggagaacaaaattacctctctttttttttttttcatattgccattgcgttctgcataggactttgttgtatcaaatgagacctgagaaaaaggtcattgacttcgacagatgaaaagtctagagaatttgtatgttcatgagacagagggtcacaacgtagctctcaacatgacaacatcaatcaaactgttgtacagtcacatcttgtttaagaagaattctttcaaataatctttaaaatgccacaacctatgttacgttgcaatcaagacatactaatcatagatcaatcttcagttattctacttctccctaagcataaataagcattacgacatttgttaccattacaataaaaaaaaaagcaaattagtgtactattccaacacagatggaaacaattactaacaagacaacaaagatttttctaagcgatgatagacaataaacttttatcttcaaggcacaaaaatggcagctacattaaatattttcagacaaataaattgcattagacacaaaaatctcaaaactgcagtcagtggtaattcgaaccatcaatgtacaagtaatgagtaaacttgagatcacagcgaccagtgagactttagcataagacctatggttcttccgtcactgtttgtgtgataaacaagacatggacttaatctaaacctatcgcctatgttgaatttcagatatgattccacctgaaactgatcatgatttcttgaaccatcaacaactcccccaacgctcatgccccagcccacttcatcctctgggttgtctgtaatagacactgaccatttcacttgcttttctcttgagttctgaatttcaatccatcccccaagttttgtagactcgtccattagagagtctaacttcaaagcaatggaactggacgacacatgattcatgtttctactcatctccagaggcggtgctgatggttcaggctccgtagcagtatggcgccttaggaaacttactggaactgtaatggctccaacagaatggagattgctagatgatgttaaaacttggtgacagcccaatagagatagctttaaacttctgagaatgtggcaggttacttgcccaaatgttctgaaacaacgattcggtgcagtcaaaccctgttcaacttcaacgtttgacatagactgagccagtgaagctgtgatatttgactttctgaatgttaaccctatggcgctcccattatgttggcttaaaagaggtggtccaagttcagaaacttctgtgagactcattccctgcaagacgaaggtagttgtatttgtagttttatcaataacgattatttatgagaaacacaacaaatatagaaacagaaatctgcaacgattggtggatacctggtaagaagacacagtagaagcctcaatgtctctgaaatgcgcgccaacaggaatagcaatagcagagaaccaatcattaatatctgccttgtagaagactttggctaaagacaactctcctcctaaaaaatccctgtgacttcctgccccattgtatccagcaacaagctcagccacaagcctatctgtctccctaagactcgtttcaaacacaaaccttgaaagcaatcccggtctcactccttctttgttgagtccattgaaactttcctcgtcagtgtttcccatcagcaatatagctccaagcacatcaacttcacctctcacatgagtgctagtctcttgaaagggacctcctttcgataatttctgcgaggaaatgatccgctctactttctcttgtctttctctaagtttcatcaaatccgagaatgtttctctttgtaatcgcttcaagatatcaatctgcaacataattcccaaaaccaacaatgcagaaactcaaattcaacatcacatttcaaacaaaaagttgattttaagaacaaaatgagtaaaggggatggataacgataccggattcaggcgagaaggattctcatggaagccgaaatggcgggagactaaatcctggctcgatttcgtaaagctcttcactttctccaacaccgaagcaattgggtccatcttttaatcagaaactggtaaggaaagcttgaagattctagaaaatttcgaacccagtgatgatcatttctatcgatgataagaggatttgaatagagaagatgcgaaaatgttttagggtttatgtgtttggattttggtttcaaaatctggaattggacgatccggtttcttacgtcggttcgtttcggttattttcgaatttctgattatttcggttaaagagtttggtcaacctaaaaccagaacaattgattatttctgattatttcttcttttcttttggtatcattgtatcaaaggcgaaggataccaaaggtaaggatatagttgacgaatgtacgacgaagtaacaaaggggttctaatgtccggtttcgatcttaagttgtggtaacgattgaatcgcattgcagaatcttgaactggacgatgcatatggttagttgcttcagtgaaggttgacttcaatgatattttggaaagtcgtcgtgagaaagttgattatattgatcgggtcttcttaaaaaaagaaagaataaacctcataaggtcctttaggtagttagctgaaatgtgattttctttatttaatatagcgaaaatgatagttttaggtcataactttgaaaatataatatagaaatcttgactaaaaaatattataagtacgtgtaaaactcgtaaaagactcacacaattagagtaaactattaggacaagttaagaaacaaagtctaaaacaatctgaaacgtaacatgctacaaaacgatagaaaatatgatgtctttcttgtgacaatagaaaagatgacgtcaaattttcctttcgtttttttattgttagcccgttccgttataaagagtggaggatatatttgtctctagcccattggacaaaacgttcattgagaaaaataccatataagatacattttttatggattatatggaaattaagatgcatgaaaaggaaattaagatgcctcacattatttccaccatctagtcatttatgtcgtcttagattcttttataaatcatattcatatgtgactaacacgtcttcacattctcatttgatcatgttgcttaaaacaaatatctcatcaaccacataagcaataaatgtttttagtttttgtttgattcagttcattaatatataattacatgtccatcttaagcgttccgttaattatcacatttttaaactctatgtgattagttgcagtttgcaacttggtttgtcaattaacaataatgtataatttacatatctgttttttttgcgattttttttttttttacatatatgtatgcctcagcatgcattgttatttgttgactctttgaacttaagttgtgtccaattgtgtcagtcataaatatgaacacgtgttaaatattatagagaaagatttgagtttttacaatcttataatccactctccatagtttatatatgtacatgcacgatcagttttaactaataatcataaacatatatgtacatgtacaatcaatctcatatgcaatcaaagtaaatataaattaaaaaaaatgtatatatggatctcgtttagtttaaattctaaacgtatattgtcgaaggagaaaaactataattttgtttgtgtatattgattgattcttcagtaatttcttcaactattctgatatatatatatatatatatatatatatatatctacttgcaatcatagtttaaagatgttatttctgttagatgtttaatcttgtttttttctgtcagtagtctttaatcacgtgccaagtaagcaaaacactctcattattttaaagaatgttgattaaataaacattcgatgggcgatgtctattggaaactggaaagtcagctaaatacaacaattttccacttaacattctaattatctaactattaattattaatcattgctgcatgcctctgttcaactgtacaggctgttttcgaatattttgtagagtacaacttatcaaaaaatcccaaactcttttatctgacaataatattttaagatataagaaatagtcatagtatcatatttttcaaactatacaatttttataatttcattaaaaggcaaaataaaaaccaggttacgtaattaatttaatagtcaaatgtttgctacaataatatatttacaattctagttacatctaagtgtaataaaattacaattccattatagatagtataatggatgataaaacttttgtacagttgatagtaagaaaatttaataaaatataggatatttaccagaaaaaaaaaaccaaaaaaaaaaaacacgttaatgggtaaacttcgaaactgaaatttttgtagaaaaaaacaatcacatcatcaatgtatctttcaaaataatgttttgacaacttatcagtcacttttaattgggtgtgttagaaatagaggtacagtttaaagtttttattaggttttgggtggtaaggtgtgttagaaatcagtttattttttaatcagtcattggtggtggtggaaaatatcattttcaaatttcaagtagcaattatgggtgaaatttcttgtataaatttcaagtagcaattaatatatctttttttatatatagaaaatttacattttggtaaaaatttaaattaaaaaaaggagcatggttatatcttgaatcttggtatctacgagcatattatttagatataacaaacaagttgggaatagacaaaacaaaatgacgaactttccaacgaaagatcccattatagtaatgttattcttatttatacttatacaatctctagtggcttccaaagtacacaaaatgggagtattataccaacaaaaataaacgactaatgaatcaaaaaattcaaaatttgctttattttattctgaaaatctaacgagctgaaaccaaaatgttatagatttaaaatagaaacaaaacaccgatgattgacccaataaaaagcaaaataaagtagaccaaaaagaataatggttatgctgataattgaggagtcgtcgtcactcgtcacatgagaggaacaacaagaaaagtcaaaacgttgaagctttctcgaataacgccttctttagtttacagtctctcgttgcgggtcttatcttcttcttcttcttccctctttcgtctgctctatattatgaccagattcaaaattgcgtagcgtactaattcaatatagagagaagttagatcaaaagaagaacacgaaactctgactgtgtctctctttctcttcgtgtgtttctatatttatatataaaaagacaagatctctggtctggaattagaagaatcttatttggggttttttcttaggattaagctctaatggcagatcaagtaaaagagcggactttagaggagacctctacgtgggcagttgctgttgtttgctttgtcttactctttatttcgattgtcctcgaacattctattcacaaaattggaaccgtaagtctctttatatttctccttatttcaagattcccctgtttcttgctctgctttctgctctgtttctttaattactgctctgtttttttggatttgtttagttcttctcctatcactatcaacactactaaatctgtgagaataacgaaaatatctgatcattcctttttttgtgccttaaacagtggtttaaaaagaagcacaagcaggctctttttgaagctcttgaaaaggtcaaagcaggtaactatctttttctacttaacttgatccattatcaacaagcttcttatctttttctacttaacttcatccattaacaagctcctgattttgttttctacgtaacttcattcagagcttatgctgttgggattcatatcactactactcacaattggacaaacaccaatctcaaatatctgcatctcccagaaagttgcgtcaacaatgcacccttgcagtgctgctgaagaagctaaaaaatacggcaagaaagacgccggaaagaaagatgatggagatggagataaacccggtcgaagacttcttcttgagttagctgaatcttatatccatagaagaagtttagccaccaaaggctatgacaaatgtgcagagaaggtaactaataatctcccttctctctctatataaaaatcattctctgcttgttaaaccgatggaattttgatttctattgatggatttactcaggggaaagtggcttttgtatctgcttatggaatccaccagctgcatatattcatcttcgtgctcgcggttgttcatgttgtttactgcattgttacttatgctttcggaaagatcaaggtaactaacatttcttgtgacttacgcagttgttaaggcgagaaaaagagtgtatgcaaaagatttttatacttgttttcttgagtattgcagatgaggacgtggaagtcgtgggaggaagagacaaagacaatagagtatcagtattccaacggtatgtaaatatgtgagtattcgacgaaacttaaagacctgaatgggaatgaattagtcttgttatgcagatcctgagaggttcaggtttgcgagggacacatcttttgggagaagacatctcaatttctggagcaagacgagagtcacactatggattgtttgtttttttagacagttctttggatctgtcaccaaagttgattacttagcactaagacatggtttcatcatggtatggaatttattctttttatctattgttcattataacatgtatctctcaaagacaatgatctaacattctacatatttcaggcgcattttgctcccggtaacgaatcaagattcgatttccgcaagtatattcagagatcattagagaaagacttcaaaaccgttgttgaaatcaggtttggatctaataatgattgctttataaagtctgagcaaagccaatttggatattttatcttaaatctctgccaactttatgcagtccggttatctggtttgtcgctgtgctattcctcttgaccaattcatatggtaacgttcattgcttactcgcaaaaactacattttagctgcatcaatagtcgcacaaaagtgacatcggttttcttttgaaacaggattacgttcttacctctggttaccattcattccactagtcgtaagtacaaacaaactcttgaaccgattttgtctttttgccgccagttttgtaacagagtgaaaatatataactgcaggtaattctaatagttggaacaaagcttgaagtcataataacaaaattgggtctaagaatccaagagaaaggtgatgtggtgagaggcgccccagtggttcagcctggtgatgacctcttctggtttggcaagccacgcttcattcttttccttattcacttggtcctttttacggtacaatacttgtatccttcaccgctcgttttttcgatctttttcgggttttttctcctaacggtagaataaattttcttatctttgcagaatgcatttcaacttgcattctttgcctggagtacggtaagcgagccatttcattttctttgaaaacatcgctgttacgggctatactaattgttatgtcataaattttctgtatttgcagtatgaattcaatctcaataattgtttccatgaaagcactgcagatgtggtcattagacttgtagttgggtaagctaacattatcttgactattgattcttctgagaatttgtcctttaactgaaaaagtataatccccctttttataaatcttgcagagctgttgtgcagatactttgcagctatgtgactcttccactctatgcacttgttactcaggtactagaaaacattagtgttacatggatgccagattttggttatatgatctttagttttttttacattgtgttgaatgaaaattgtgtgcagatgggtagtaaaatgaagccaacagtattcaacgatagagtagccacggcattaaagaagtggcatcacactgcaaagaacgagacgaaacacggaagacactcgggatccaacacacctttctctagccgtccaaccacaccaacacatggctcatctccaatccatctccttcacaatttcaataaccggagcgttgaaaattacccaagttctccttctcctagatactctggtcatggtcatcatgaacaccaattttgggatcctgagtctcaacaccaagaagctgaaacttccacacatcattctcttgcgcatgaaagctcagaacctgttcttgcatctgtggaacttcctcctataaggactagcaaaagcttaagagatttttcttttaagaaatgatgattcttgtttgctatatttgatttcgtacagtgggaaatttgtcatatgaaaataatttcttgtacattactagttggataagaaataaccatatctatatggatacatgatatgttattctctggcaatgcttaagagtttcacgaattacacatacatttgtatttctgcaggttttaacgtcctgagacatcagtgatggtgacattgttgatagaggctttaagagcaatgctctcagagaactcagcttctaaaccaacgtttctaggcataaaagcaggctgtttcggttctggaatgtctgcaacctcactgctaagcatcatacacactgtagaaacacttggcctatcattagcagcgtcttgcacacacaaaagcgcaatgtgaacgcattttcgtatttctttctcaaaaagttggtcaaaaatctcaggatctaccataccattaatctccccttcgttccagattgaccacacctatgaaacatagaagctttgatggcttgatgacaatctcaagagagttaagaaactttacgagttaaagtagactcacatgagccaaaagagttgaatgtgagtttcttcttccactgataatctctaagagtatcactcctaagctgaaaacatcagatttctctgaaaacagtcctcccattgcatattcaggtgccatatagccactgcacgatacatttattttctcggttttaggactcttaatggaaaaaaaagatgtaaacatatggttgaatggagttacatactatgttccaacgacccttctggtgtttgcttcatcttcattccccgggaatatcctggccaacccaaaatcagatattttcggaatcagattctcatctagcaagatgttgcttgctttcagatctctgtgaatgattctcagcctagaatctctgtgaaggtacaggagacctctacatattccattgattatttcaaaccgcgtgttccagtcaagaagttttgcttcccttggatctgaacaacaaattagcttctgttaattgacctgatgataacactgcaccagagtttgaaaacaaaaaagagtgataagttaccaaatatataaaagtctaagcttttcttgggcatgaactcatagactaacatcctttcttcccctgcaatgcagcaaccaaataatttcaccagatttcgatgttgcaacttagaaatcacaaccacttcagtgacaagttcctcaagcccttgtcctgatgcttgtgacagtctcttcacagcaatctcttgaccttctagcaacatcccctgcaacaaaaatatgtcaaacataaattcttgttggcttgttgccataaccctttaccagtcatacttaccttgtaaaccggaccaaaaccgccttgtccgagcttattgctaagagagaagttatcggttgcagtagctaacacttgaaactcaaacaaaggtagctctttcaacttttctctactaccaccagctaaagcttctactctcttaaaaatttgctctgcatctgttcctttctttttagctgagaccgaatccaaggtattattaaaactaaaaactccaatggttagaagaagcaaagataatttagtataactctgacctcttttcttcatgacaatacgtcgtgccagaaggacacaagtcgccacaacaaaaatgcctcctgccaatgatgtaccgatcaaaataggtcgcctgtcctgtgtttctaatagagagttggcaagaaatagcataattagtgaaactgcaatcacttaagtatgattatgagaaaaggtttggaataatacttaactgaattctgaatgtgcaagacggatagaaagatccattccactagcagacaacacttgtgaatcaactaagcttctattccaaatcatgcagccatatcctaatccatgagcaaaagctatacaagaacatgactgcaaacaagtcataaagcattctggttcgctggcttcggatcttcttgcaaagtcaggcattttcattcgctgcagcttcaaaaacctatcagcactccccttattgttctgtctttcacactgcaaagggagctttcttatgcatccaccactccagtttccattgttccactctataaggttccttggcctaaaccctttaatgcaagaacaatgcgggtttttccgaggattgcaggtagtgtattgaccacatcggctgtaaatgtcacactcggttgccggaacttgtgaccctaacgtccagtttctcctagcctcactccaatctctccggatagcaaatcctctataatccaagtagaggtgtctcaaagttgaatcattagcatatgacatggtggctgaaccattggtgtcatcattaactttaaatctataaagaaagagccccggatatacatctggtaaaccgttaaacatcagtccgttccaagggccactgcgccacaccgtagcattgttgtcattattgttgaaaataaaaagctctggatatggagcaagaacgagtgcagcagtgtagctccccggcgaaggatccgaagggtttgtccaagaagttattgtgatgtttcctcctccggttcttgcgtttgtcccaaccaacatatttggcaaccaagaatcagtaggatacttgaagctctcccaaagatatgcatcggtattggcatcttttagcacgaggttcccggactccaaaagctcagcgacagtagaattggcactggctcgagtagaaacgttagttgaccacaaaacacgcctctgaccatcagtaactaccagatttccatcttcagatattgaaatcactccagaggagtcattgatcggcgtatctttgttagcaacccatatcacagtttgtacaggaatgctgttataccatataccagcatatcggttggtggaattaacagggctgaagaaaccgaacctgaacgttcggaagctggagactatcgtctcggaatcattgagcgtgccagaaaataaagctctttcatgagctagagagacgcttaaaaagaagcaagacagtgaaagaacatgaacaataggactcaagctctcatgaagtctcatatcttttagtcccagcctctcaagacgaaaaactactcaattttagatatagcttttgctttgtaatatcctttcctaaaaagaccaaactcaacaagaactaagtagcaagatctcagaattgaatgtagcattaaacattggtagctgatggtgtggtgagaattaaattctcaaaagaaaagtcaaatattgatatagtgaaaagtcaagtcaagtggaaatgttcagaaaagaagctggttcttgcatctacaaggattagcaaaagcataagagtttcttgatttgttatataaacataatttcttttacattactagatgtatgagacattactatctatatagatagatgatataatctcttgtaatgcttaaagagttttgcgaattacacatacattttggtttctgcaggttctaacgtcctgtaacatcggtgatggtgacattgttgatagagtctttaaggtcactgttctcagaggactcagcttctggaacattgttccttgatataaaagcaggctgttttggttctggaatatctgcaatctcgctgctgagcatcgaacacactgtagaaacacttggcctatcgttagcagcttcttgcacacacaaaagcccaatgtgaatgcatttgtgtatttctttctcaaagagtaggtcaaagatctcaggatctaccagactattaatctccccttcgttccagattgaccatacctataaaacagaggagctcttagggcttgagaaaaattcaagagagttaagaaacttagtagagttaaggtagactcacataagctaaaagagtcgaatttgagtttcttcttccactgataatctctaagagtatcactcctaagctgaaaacgtcagatttctctgaaaacagtcctcccattgcatattcaggtgccatatagccactgcacgatacattttctctgttttaggactatcttaatggaaaaaaagatgtaacatatggttgaatggagttacttactatgttccaacgacccttctggtatttgcttcatcttcattccctggaaaaattctggccaacccgaaatcagatattttcggaatcagattctcatctaacaagatgttactagctttcaggtctctgtgaatgattctcagcctagaatctctgtgaaggtacagaagacctctacatattccattgattatgttaaaccgggtcttccaatcaagaagttttgccctccttgagtctgaacaacacattagcttctgttagttgacatggtgataacattgaaacagagtttaagaacaaagatagtaataaattaccaaagagataatagtctaagcttttcttgggcatgaactcatagactaacatcctctcttctcctgcaatgcaacaaccaagtaatttcaccagattccgatgctgcaacttagaaattacaaccacttcgttaacaagctcctcaagcccttgtcctgatgctcgtgacagcctcttcacagcaatctcttgcccctcttgcaacttcccctgcaacaaaaaaaagtcaatatgatacacacctgattcccaatagaaagacttattgctataacctttaaaagtcatacttactttgtaaacaggaccaaagccaccttgtccaagcttatttctcagcgagaaattattagttgctgctgctagcacttgaaactcaaacaatggtagctctttcaactttcctttattaccaccagctaaggcttccactctctcaaaaatctgctctgcatctcttcctttctttttcgctgagaccggatgcaaggttttactaaaattaaaaattccaacggttataagaagtaaacataattttattaaagtctgacctcttttcttcatgacaattcgtcgtgccagaagaacacaagctgccacaacaaaaataccgcctgccaatattgtaccgatcaaaattggtcgcttatcctttgtttctatttgagatttggcaagaaatagcagaattaatataactgcaatcattaaagtaagaatgtgagagatgttgtggaataatacttactgatttctgaatgtgcaagacggatataaagatccaatccactagcagacaactcctgcgaatcaactaagcttccattccaaatcatgcagccatatcctaagccatgagcagcagctatacaagaacatgtctgcaaacaagtccttaagcattctggttcgcttgcttcggatcttcttgcaaagtcaggcagtttcattcgccgcagcctcaaaaacccatcagcactcccattattgttctgtctttcacactgcaaaggaacccttcttgtgcatccaccactccagtttccattgttccactctattaggttccttggcctaaaccctctaatgcaagaacaaagcgggtttttccgtggattgcaagtagcgaattcgccacatcgcctgtagttgtcacactcggttgctggaacttgtaacccgaccgtccagtttctcctagtctcactccaatctcttcggatcacagatcctctataatccatgtagaagtatctcaaggttgaatcattagcatatgacatggtgacagatccattggtgtcatcattaactatgaatctataaagaaaaacacccgcataaacatctggtaaaccattaaacatctggccattccacgggccacttcgccacaccgtactgttattattattattgttcataatgaagagctctggatatgcagcaagaacgagtgcagcagtgtagctcccaggcgaaggatccgaaggggatttccaagaagttatcgtgacgtttcctcctccaattcttgcgtttgtcccaaccaacatatttggcaaccaagaatcagtaggatacttgaagctctcccaaagatacgcgtcactactcgcctcttttagcaccagattcccggaatcaagaagctcagcgacagtagaattggcactggcttgagtagagacgttagttgaccatagaacacgcctctgtccatccgtaactacaagatttccatcttgagaaaccgaaataactccagaggaatcattgatcggcttatctttgttagcaacccatatcacagtttgtacagaaacactgttataccatataccagcatatcgacttgtggaattaacagggctgaagaaaccgaacctgaatgtccgaaagctagagacaatcgtctcggaatcattgagcttgccagaaaagaaagctctttcctgagccagagacacgctcaagaagaagcaagacagtacaagaatacaaacaaaaggactcgagctctcatgaagtctcatagcttcagtaccagcttctcaagaacagtcccaatttggtgtagctagcttttgtgttcttaatatgtcctgaaacaacacaaacacaaccgatctattaatagcaaagatctcagcattgaatgtaacaattaacaatggtagggtcttgagttacgttaagtgattctgtaatgttgtggtgatgattaaattctcaagagaaaagtccaaatattgttagaaatgtcaaagtcaagtggcactgttacctctaagatgatgatgcaagctaaaagattcatcatttttctattaatggcggtctttctacggtttgattgaccaaagttggcccgtctattacgacttggtcttaattcacctgagaagagtgactcacttcaccttcttctccggaataagctcacgtcactgtcaattcaatcaagtccagacattgtggataaagtatatacttcgaagaaggaattgtctaaaggattgatttttgcagaacaaaagcatgagctcacaattggtgcagttctctaccgttcctcaaatccctaatcccccgtctcgccatcgtcactttctctccgagagaaattacattccggctaatgtctatgagcatccagcggctcttcttcttgagagatgttcttctctgaaagaacttcgtcaaattcttcctctcgtcttcaaaaatgggctttatcaggagcattttttccagacaaagcttgtcagcttgttctgtcgctatggcagtgtcgacgaggctgctcgtgttttcgaacccattgatagtaaactcaatgttctttatcacaccatgcttaaagggtttgctaaagtttcagacttggataaagctttgcaattttttgttcggatgaggtatgatgatgtagagcctgttgtgtataacttcacttatctcctcaaagtttgtggagacgaagcagagcttagggttggaaaggaaattcatgggttgttggtgaagagtgggttctcgttggatttgtttgccatgactgggcttgagaatatgtatgccaagtgtaggcaggtaaatgaggcccgcaaggtgtttgatagaatgcctgagagagatttggtttcttggaatacaattgtggctgggtattcacagaatgggatggcgagaatggctttggaaatggttaagtcaatgtgtgaggagaatctgaagcctagttttatcactattgtttctgttttgcctgctgtctctgctttgaggttgattagtgttggcaaggagattcatgggtatgctatgcggtcgggatttgattctcttgtcaatatctccactgctttggttgatatgtatgcgaaatgtggatctctggaaactgctcggcagctctttgatgggatgttagaaaggaatgttgtttcatggaattcaatgattgatgcctatgtgcagaatgagaatcctaaagaggcaatgttaatttttcaaaagatgttggacgaaggagtcaaacccactgatgtatctgtcatgggtgctttgcatgcttgtgctgacctgggtgaccttgagagaggaagattcattcataagttatctgttgaattgggtcttgatagaaatgtttctgtagtgaactctttgatctccatgtattgcaagtgcaaggaagttgatactgctgcttctatgtttgggaaattgcagagcagaacccttgtctcttggaatgcaatgatattaggatttgcacagaatggacgtcccatcgatgctttgaattacttcagccagatgcggtctcggacagtgaaaccagacacatttacttatgtgagtgtgataactgctatcgcagagctgtcaattacacatcatgcgaagtggattcatggggtggttatgcgaagttgtctggataagaacgtgtttgtcacaacggctctagtcgacatgtatgcgaaatgtggtgctattatgattgcaagattgatttttgacatgatgagtgagcgtcatgtgacaacatggaatgctatgattgatggatacgggacacatggatttgggaaagctgctctggagttgtttgaagaaatgcaaaaaggcaccatcaaaccaaatggtgtcacatttctttctgtcatctctgcttgcagccactcgggtttggtggaggcaggactcaagtgcttctatatgatgaaggaaaactacagcatagaactgtcaatggaccactatggagccatggtcgatcttttaggtcgagctggacggttgaatgaagcatgggactttattatgcagatgcccgttaagccggctgtaaatgtatatggtgccatgttaggtgcttgccagattcataaaaatgtgaatttcgctgagaaagcagcagagagattgtttgagttgaacccggatgatggtgggtatcatgtgcttcttgcaaacatatatcgtgcagcttcaatgtgggaaaaagtgggacaagtgagagtttcaatgttgagacagggtctgcgcaaaactcctggctgcagtatggtggagataaagaacgaggtgcatagcttcttctctggaagcacagcccatcccgattccaagaagatttatgcgtttcttgagaagctgatatgccacatcaaagaagctggttatgttcctgacacgaatttagtcctcggtgtggaaaatgatgttaaggagcaactgctgagtacccacagtgagaagctggctatatcttttggattgctgaatacaactgcaggtacaactattcacgtaagaaagaacctgcgggtttgtgctgactgtcacaatgctacaaagtacatttcccttgtgaccggacgggaaattgtagtacgagacatgcaacggtttcaccatttcaaaaacggtgcctgttcgtgcggagattactggtgacatgaccctccaccgaaaacattgatgagcattatatatccgggagagaaaactaatttgaggaataacaagacctggtctgaagtagaagcctttgtagagagctacaatttgctgtatcataaacaaggtttaagctgatcactacgaatagagagctacaatatgtgagcgaagtctcgtttgcaagcgtccaagtaaaaatttattcatttttgcagctctgtttttcctttctttcccagtacatatgaaagctgaaaagtgttgttgtggaattggtagcggaaaaaaaattatttcttgctacagagagtacaaaaatagaaaaattcaaatcattaagatatgttatgtagtgtgagacaaaggcttattttggacagggttgatgtaagatggagtttttaaattagaataaagtattacaaattttttatatggtaacacacctaaggacaagattgcatcttcttcatcatttcggtttattataatgcctattcaaagaacgaggtgtcaaatataaaacaatgctatatcttatgtgtgaaacagacagaacctctactacaaccagaagctctgctttctgcgtttggatctttaaaaccctaaagagagagacctaggttaaacacacatcacgacaggggaacaaagcgaatcaaatctgttgtgcagctgtaattgatgacctgcagtggttctgtctgtttcacattatgggtaataacattatacgatacatctagaggagtcattgttttcagtttttcaaaacaaaattttattcatacattcagatctgaaggagaactcttttgaacacatgggaatacacttgggagagattggtattgttctctttccttggtttctgtggttaagtttattcctaagttgtggctatgcagctataactatttcaagtcctttgacattgggacaaactctgagttcccctggtggattttatgagttaggattcttcagtcctaacaactctcagaatcagtatgtagggatctggttcaagaaaattacaccacgggtggttgtgtgggtggctaacagagaaaagccgatcacaacccctgtggcaaatcttactatcagcagaaatggtagtcttattttgctagacagtagtaaaaatgttgtttggtcaaccagaagaccttccatatctaataagtgtcatgcaaagctcttagatacaggaaatcttgtcatagtagatgatgtttcagaaaatcttttgtggcaaagttttgagaatcctggtgatactatgctgccttactcatcgctgatgtacaaccttgccactggggagaagcgagtattatcttcgtggaaaagccacactgatccatcccctggtgatttcgtagttcgactaacaccacaagtgccagcacagatcgttactatgagaggctcatcggtttataagagaagcggtccatgggctaagaccggtttcactggcgtaccactaatggatgaatcatacacaagtcctttcagcctttcccaagatgtaggaaatggaacagggctcttctcttatttacagagaagttctgaacttacacgagttatcataacatcagagggatatctaaagacttttcggtacaatgggacaggctgggttctggactttatcactccagcaaatttatgtgatttgtatggtgcatgtggaccttttgggctgtgtgtgacgtccaatcccacaaagtgtaaatgcatgaaagggtttgtaccaaaatacaaggaggagtggaagcgcgggaacatgacttctggatgtatgcgacgtacagaattatcttgtcaggcaaacttatctacaaagacacaaggaaaaggtgtagacgtcttctatcgtctggccaatgtaaagcctccggatctctacgaatatgcaagctttgtggatgcagatcaatgccaccagggttgtctcagcaattgctcttgctctgcttttgcgtatattactggaattggttgtttgctttggaatcatgagctaatagacacaattagatattccgttggaggagagtttctttccattcgtcttgcaagttcagaactgggtagggctgaaagacattatcccataaagacacatcatttttgtttacgtatttatttcaactgcagtgtggttttaacttgttgaaattttgttttgtggtaaatctctcagctggaagcaggaggaccaagattattgttggtagtatcagcctttccatttttgtgattttggcctttggctcatataagtactggagatacagagcaaaacaaaatggtgagacaccgaataacatagtagtgctctttcttttcttgtgatttgttgttatctctatatcgtgatcaaatttacacataaacctgcatctgctcataaagactatggttgcacttttcttttagcttatagagtttctgtattgcatatatatatttacaagaagcttgtctatttgagctttagcttgttatacttcttcaaattatatactaattcacagacatttgtgactagttgggccaacttgggcattcttcaacaattcacaagattcatggaaaaatggtttggaaccacaagaaatctcaggtttaacattctttgagatgaataccatacgagctgctaccaataacttcaatgtctcaaacaaactcggtcaaggtggatttggtccagtttataaggtaaaagagaattggttttctttgcccttctctgtcattctttgtagtttgttttgtggatgactgtttgcaactctgcttctagggaacactgtcagacaagaaggatatagccgttaaacgcctttctagcagctctgggcagggtacagaagagttcatgaacgaaataaaactcatctcaaaattacaacacagaaacttggttcgacttttgggatgctgcattgatggagaagaaaaactactaatttatgagtttctagtgaacaaaagcctcgacacttttctctttggtatgctccttgtcctgtatttgcctctccatttttatttttctttcatcttgtgagaacttttctttcttgctcattaaaatggtttttcttattggctagatttgacgctaaagcttcagattgattggcctaagaggttcaacatcattcaaggtgtttcacgtgggcttctctatctccatcgtgactcttgcatgagggtcatacatcgagatctgaaggtcagcaacattctcttggacgacaaaatgaacccaaaaatatcagatttcggattggctcggatgtttcaaggaacccaacatcaagacaacactcgtaaggttgttggaactctgtaagtatctatcccagtgacatgctcaatcaaagtattaattatgtcatgtccacttagttgactgtttgggaatatgaacagaggatacatgtctcctgagtatgcatggacaggaatgttctcagagaagtccgacatatatgcttttggagttctcctgttagaaatcataagtgggaagaagatttcaagcttttgctgtggagaggaaggcaaaacccttcttggacatgtaagacatttgctctatcctcctagtgtttcaaatcgcaaattcttaaactggtgtcaatttttaaactgtatatcaggcatgggaatgttggctcgagaccggtggagtggatctattggatgaagatattagcagctcgtgttctccagttgaagttgaagtcgctcgatgtgttcagattggtctactctgcatccaacagcaagctgttgacagaccaaacatagcacaagtagtgaccatgatgacaagtgcaacagatcttccgagaccaaaacaaccactctttgcattgcagattcaagatcaagagagtgttgtgtcagtctcaaagtctgtgaatcatgttacacaaactgagatatatgggcgataaagtttgctttattatgtattaactgcagactgaaatgtaataccagcaatagagtgtaatcacttaatttaaattgtacattacgatagtttggttgttaataaatatgatgttaagaaagcttacgtaattatactgttcgataaaaacaaaaggctatcaatagaagaagatgataacacaccaaatcaaaaaaaaaaaaaaagagcccaaaaactgactatgctcctgctcagatactatgttcgtatcatatcagatactatgttcgtaacaatgcattttttgaatcatgcatttttggagtatatctgattttggactataaaaattttccaatgcatttttttttttttgaatcatgtcaagaatcaaggggttttttattttctttttgggaccggcgtttacggacttcttttttttatgtgacaaagaaaaaggattgtgggttgaaagcccaaaagaaagagagggttgcaaagaggttgcaggtataactttaacttgttctgagtttccgatgagatgatctctgcctctctcctccaccggtaagagcatcgacatcaacgctcatataggataaaaaagattgttctaagggtagagacttagaaatcggactcctgagtatttgatttcatcatttcgtgaggtacttcaccctgtaaattatttatttataattattttctgtgattgtgttttttgatttccttaagctcaactcgtgtttgtgtatatatatatataaattgtctgttgatcaatcaattagagagatagagacaagaagacaatgttgaaaagagattgctcgagtgttgttggatcggaaagagagagagatggctccagtttggctttgaaaagacattgctctagtgtggtgaaattgctgctaccacacgatgttgttgggctcatcctcgagagacttcctgtggagtctctgctgagattcaagtgcgtatccaaccagtggaaatccacaatcgagtcccagtgttttcaagaacgacagttgatccgtcgtatggagtcccgaggtcctgatgttcttgtagtgtcctttgctgatgatgaagataagtatgggagaaaagctgtgtttggttcgtccatagtttctacgttcagattccctactctgcacaccttgatctgctatggtagttgtgaaggtctgatatgcatctactgtgtttactcaccgaatatcgtggtgaatcccgccactaaatggcatcgaagttgtcctctttccaacttgcaacagttcctcgacgacaaatttgaaaagaaagagtatgacttcccaactcctaaacttgcattcggtaaagacaaactcaatggcacatataagcaggtttggttatataattcatccgagtttcgcctcgacgacgttacaacttgtgaagttttcgattttagcaacaatgcttggaggtacgttcaccctgcttctccttatcggataaatgattaccaagatcccgtgtattctgatggatcagttcattggctcaccgagggtaaagaatccaagattttatctttccatcttcacactgaaacttttcaagtcttatgtgaagctcccttcctccgtgaacgtgaccctgttggcgactccatgtgcatcctcgataatcgcttgtgcgtttctgagataaacggtcctgcccaactgatatggtccttggattcttcaggcggcaacaagtgttagagtaaaattcttttagaggtaatggagaaagtgtttaagtgttttgagagagttttttaggaaatagaacttttattactttgctttaaacttgaatacaacttcacaacattgcaacatttgagagggggaggaggtatttatagcctccaaactacaaaatatctaaaatattttaatcctaagtctagagagttcttacataagatctagattacattattcaaattatctagattattctattagagtatctagatttttatgtttaaggaggtggaagatgattctagaaaatttctagaatcttttaaggaggtggaaatgatgatatttctagagaaaactctagaacttggatttggccataattaattattggataattgatccaataattaaacttgattcaaaatcaagtttaactttcaacaccccctcttaaacttgattttgctactccaagcaaactcctcatcttgataaagttttcacgcttgagaggcttggtaaaaaaatcggctacttgatcatgtgtcttcacatactccaattgcacgtccttcttgctaacacactctctaatgtagtgatagcgtgtgtcaatgtgtttacttcgatcatggaagaccgggttcttcgccaaagctattgccgacttgttgtccacaaagatcttcgttggttcctcttgtggtaagcttaactccttcaagaggtttcttaaccaaatagcatggcatacacatgacgtagccgctacatactccgcttcacaagtggatagagtgacaattggttgtttcttcgacatccatgtgaaagccgtgtctccaatgtaaaacacaaaaccacttgtactctttcggtcatctacgtctccaccccaatcgctatcgctatatccaacaagcttgtaatcactagtagttgaataatgtaagccaaagtttacagtacctttgatatagcgaagaatcctttttgccgctttgaaatgagttgttgttggatgctccatgtaacgactaacaactccgaccgcatataaaatatcgggccttgtgcatgttaagtatctcaagcttccaaccaagctcttaaaggttgttggatccactccttccccttcttctttctttgatagtttgattccgcattccattggtgtacaaacgggatttgagtcatccatcttgaacttcttaagtacctccttagcatagccttcttgagttatgaatattccattgtcttcttgttttacttcaattccgagatagtaagacatcaatccaatgtccgtcatctcgaactccttcgtcatctctttcttgaattcttcgaatatgcttggattgttacccgtgaatatcaagtcatctacatataagcatgcgatcaatatatcttctttttgaattttgatatagagtgcatgctcatatggacacttgatgaaatctttctccttgaaatacttgtcaattcgagtattccaagctcttggggcttgttttaatccataaagcaccttttttagcctcaagactttgtcttcttcacctttgactatgtagccttgtggttgctcaatgtaaacttcttcttcaagatctccatttaagaaggccgacttgacatccatttgatgtatcttccacttgttttgagccgctagtgagatgattagtctaaccgtttctagacgagcaacgggagcaaatacctcgtcatagtcaattccgactctttgactataaccttttgcaaccaatcttgctttgtatctttccacttctcctttagagtttttctttgctttatacacccacttcacgccaattgccttgtgtccatttggaagtgaagttaactcccatgtgtcattcttttgtattgatttgatctcttcatccatggcatttctccaagtcttcttttcaatggctttttggaaatccatgggttcgcactccgcaaataaacaaaataaggtaaggttttcttgattttcggttacctcatagagctcttgtatacttctaaaacgcggagtcctttcactcgaactttcttctatttgagaacttgttggtgaagttggtggtgtagtaggctcttcacttggtggctcctctcttgttggctccggctcatcttcttcaaaatgtggaaagaagttataatcttcttcatttgagttccaatcccattctccttcttcatcgaacactatatttcgactaataattgtcttcttcgtatcgggattatagagcttgtagcctttggagttgttatcataaccaatgaagatatacttctcacttttgtcatctagtttgctccgcttctcatccggtacatgagcatgagcaatacttccaaagactcttaaatgagaaacaccgggctttcttccgctccaagcttcttgtggtgtttttccggagacactttttgttggagatcgatttaatagataaaccgcacacgcgaccgcttccgcccacaactcttttggtagtctcttacttttgagcatgctccttgccatctcaagaattgttctattctttctttccactacaccattttgttgaggggatcttggcaccgttaattgtcttcgaatgccgttgtcttcacaatacttaagaaactccttggatgtaaattctcctccacggtcggatctcatggttttgatcacaagaccactctccttctcaacatgggctttaaactttttgaaaatttcgaacacctcggatttttctttcaaaaaatatacccatgtttttcttgaaaaatcatcaataaagagaaggaagtaattacttttaccaagtgatttcggcttgatcggaccacacacatcggtgtgtattagctccaacggtttttgtgctcttgaacttgactcctttggaaagctcattttgaattgctttccaagtagacatccttcacacacttgatttggatgatttatacaaggtagccctctcaccatttccttccttgaaagcaactccaatcctccaaaatttagatgtccgaatcgaagatgccatagccaagactcctctttgtaacacatcttaagacattgtgcaatgtcatttcgaatgttgaggacaaacattctatttttcgacattggcaccttggtaatgagattgctttcttggtctcttattgaaaggttattatcttttaatctaatatcataacctttctctaagagttgtccaaggctcaagatgtttgtcttcatgctcggaatatagtaaacgttggaaataaattgatgatctccattcttcaatcgaatgagaatgtttcctttaccttttacctccatcttcgattcatctcctaaagccacatttcctctcaccgattcatcaagctccgcgaacatactttttctcccgcacatgtgattacttgcaccactatcgaggtaccacttatgattctctttttgttcatctttcttgtagctagccattaataacatgtcttcttcttgaattttttcttcaacgtagttggccttctcctcaaattttttgttgctaggagctttacattcagaagcataatgtccaaacttcccacaattgtagcatttgacacttgatttatcgtatcttgattttgggtgtcctttcccacgacctcttgatgagttttcacctctttggtttgtgttgtcttcatgtggcctccaaccacgtccatttccatatccaccacgacctcgtcctcgtacttgaccaccacctcttctttggtaactttggccgttttcttcttttgtaatttgcatattgaggacttgttcgacgatatcttctttcttcttcttcttttcttcataagcttgtaatgacccaagaagttgctctattgtcatagcttctaaatcttttgtttcttcaatgacggtgacaatatgctcaaattttagatccaatgatctaagaactttctccatgattctcacatcatctagcttctctccgtttcttttaaggttattagtaaccgtcaacactcttgagaagtaatcggagacgagttcaccttccttcatttgtagtgcttcaaattctcctcttagagtttgaagacgtactttcttgacttgatcggcacctttgtaagaggttcgaagcttctcccatgcttctttcgccgacgtagcttcaacgaccttctcgaacgtatcttcatctaatccttgatagattagacagagagctttcttgtctctctttcttgagtctctcaaaccatctttttgagtttgagaaagactaccttcattctccggttcaatgaaacctttctcgactatctcccacacgtcatgtgctcctaggatagccttcattcgtagactccaattatcatagttgctctttgtgagcaccgggacttggaagggaacattattactcgccatctttaggatcttcaagctctgataccactttgttagagtaaaattcttttagaggtaatggagaaagtgtttaagtgttttgagagagttttttaggaaatagaacttttattactttgctttaaacttgaatacaacttcacaacattgcaacatttgagagggggaggaggtatttatagcctccaaactacaaaatatctaaaatattttaatcctaagtctagagagttcttacataagatctagattacattattcaaattatctagattattctattagagtatctagatttttatgtttaaggaggtggaagatgattctagaaaatttctagaatcttttaaggaggtggaaatgatgatatttctagagaaaactctagaacttggatttggccataattaattattggataattgatccaataattaaacttgattcaaaatcaagtttaactttcaacaacaagacatggaagaaattgtgttccatagatctcacagtaaatatctcttggtttttttctttcagctacccattggctccaatagcaatcatggacgggaataagctattgcttcaaggtcgaaatagctggggacatcgggtgatatatgatctccatgacaaatcttatgatttactctttgacccttcaaccggatatgctgtttattattaccaaagcttattctctgcttaatttgtctttcttttcgttctaccaatgatgaacctttgtaatttaacattttctgcatttttagcttcttctcggattttctttgttgatctcagcatttttagatttttgtctaaatatatttttgttggtggtacttagttatattgttggtggttcattggagtacaatgctgcgaaagaagaatcaaagagaaaacacttggtttaagtaaagagtataacaattacagacaattaacgaagaatcatatgcataatttcttcatgtggtattgaattatataaacaccaataaatatctaggctaatacactttttcctttacgacattagaaattacaaatcttttttctttctttcttaaaactctcattaaaaacaatgataaatcaaacatgcttcgttccagcttggttactgttcttgcccatctcaagcgcattcccatactcaccatcctccacaaaccttgaccaataccagtgtgacctccacacttgacccatctcctctatcggaatccctttcgtctccggcaagaaaatgtatacaaagatcgacatcaccaccacgaaaaaggcgaaaacaaggaataacccaaacttcaaatgacaaagcatcgtcaagaagatttgcgcgataatgaacgtgaagatcatgttcacggacacggtgatactctgcgccgccgaccttatctccaacgggaagatttcactcggtactaaccaccctagtgggccccacgaccacgcaaaacccgccacatagatgcaaatgaacgttacaaccactatagcataccactttggtagctcaccaggggtcccgtctaccccaaacttggcccctatgcaagctgcaaccacagcctacaattacacagagagtgaaccaacacatctttattagtatatgtttatatagatcttagagataaataaaagtagtaattgttccttacctggcatataagcatttgtgtaccaccttcaagaaagagaaaccgacgtccccatctgtcaacaccgtagatagaaacaagcgtagcggccacgttaaccgagccagtgaccacagcggacatgagagaagcatcggtcgtgaaaccaatggtgttgaacaaaaccggagcgtaaaacataatcacattgattccggttagctgttgaaagaacggaatcataacggccattgtgagatgtggtcggtacttgcggcggaggaggtttctccacgggtgctctatcgactgcgactctttactagcggcgaccaaatcgtcaaactcttggctgacgtcatcgacaccacggattcgtctgagcttggttttggcttcttcgtgttggccacgctcgatcattgaattgggagtgtcagggaggacgagggagccgatggttatgatcaaggcaggaaccaccgcgcctccgagactgagccgccatccccaaccgcctttgatcttggcgaagaagtagtttagcacttcggcgacgaggattccgattgtaattgagagctggaaaccaatgtttaaagctcctctgtatttgtatggagccatctcagagaggtacagtggcacagcctgtaaatagtgatattaactagggttagttacgtagttagcaggtttaagtagatacgtgtcctaatctgacttttttaagtgagtgaagattctgattgttcgagatcaaatagagatatgaacgtaaatatggaagttaaacagggtcaattttgtcattgcgttataactcgaagataggtccgaatatgacctttttcctaactaaaaaatatataatatgacgtcaaaaacaatatatttttttaattaattaaaacaatggaaatggagagaaagagacatcatcacagtctaatgaaaagaccatgtggaattgtggatactagcagaaaaacaaatcaataacaaaattcaataattgtaatatcatatactctataacgtggaatataatgatcgttgtagtagaaaagcaaaagaaaattgataaagtcaagttgacctaactattttatgattatgtttaatgaaagtagttggcttagtccataactttttttccaaaaccaaggtacatttataacggttataaatataactttcaatacattaataacttctatagtagtattaaagacaattttatttttgttagttttctgttcgacaaaaaaaaatcaattttgatagaaacacattatggatggttatttgtaaactaaaccaacgtaattaaaattaaggttttttaatgacggacctgattagcgaaaccgataccgaaaccaagcaagatacgaccgacgatgagcatccaaacatgtttggcgaaaccattgatgagagctccggcgcagaagagtatgccgccgaagagcatcgagagccgccgtccgaactttcttgtcacggtggaagccaccagcgacgaaattagcgccgctagatatagagacgatgtgaacatcgttagcgtcgggctatcgtactgacagtactggttcgttgacgcgtcctcttgttgtttccgatacaccgacgggaagaatcgcttgaggaaagacggcatagacgtcacaccacctgtaaatattttaaattcattaacagatatcccagagaaaatttatcagacatggatgagggtttacatgactctgttttaaaacatgtgcggcgattttgtaattttaaagacttgcaatattgttggtgattctgtaattttgagccttgtgtgtcatcatgactaaagtgaaaatatggggtgggtactctaatgttttcgtatcaaaaacgacaattattatttctgatttgggtgtgttgatgactacatagatacttttggggtggaaatgtaaaatctgaaaaatagagagacactaaccggagattccgatatcgtatccgaagatgagaccgcccatggcagcaacaacgcaagtgaagagaacaaagggagtgagtttgccgggataagccttttggccatccccgacgacgaatccaccggcaggcatttcttttatcctaaacaagacccgtaaagtctttaggattcttctttaggccctcttgtttatttttgatgggatgggtttttgcaaacgaaaggaaagtggaaccgaaattgagaaagagatattagatggagagatcagagattatttatcagagttatatagacagtggggaatagaagtggaaaagtgttgagctgtcttttcgtattttcttagctgtgaatctataattaatttaattttcttacaaataatgcggtactaattatccacattataagataaattatgtgacgttgtttcatgattttgagccacttggttaccgttatgtgaacatttattaaccgcatcatgactttaagagtccgtggatttatgtacgtatgtcttattttaaatatttaccattagttcacaacaaaatatatatatatatatatatatatatatatatatataccattcatcaccacattagttttataaatgattgagaatgttaaaatgtgaaacataattgctatatctttctttaaattagtttattctaatttatatatatatatatataaaaatacctgaataaatgaattgcaacaaaaatcttaacacatcaatctagagaaagaaaaaagtggacaccagaggtgttagtagtgtgtgaataaaattgtggccgatgtacatgagtgtaaaatcaaattcagttcgttgacttgaagacccacttgatggttcaacggctctatccaattccatacgtatacataacgagtaatgtccaaattatctttgttcgttttcaagattttgttttcgggataatgtaactcattaatgtatcgtatatcctcaaaattcctaattaggtactagaaactcattaacaataaagacaatagtagaagacttgtttacaaaaatgttattaaaaacgtggaaaaaaatatatatatattgaaccattgtatgatatcatttttaataaatccaacatagtgctctaaactttcaacttttgtacccataaattgactaatatcagttcaaattaacgtcatatatcatgcaaaaacaaatacttcaaaatgtaccaaatagtaataaattgtgtatcacaagatatcataaacataaaattttaccaaaagaagagttgaggtcggtggaatggtggcaaaaataaatgaacacgtcatgtgctaatcagcaaggatcgcatttcattcgacggtccaactaattttcttgatctatttggataacattaaattcgttttggataatgttcttggaattaatttgtttcatgggatgcagcattggtttttcttataaagtgacatcgaaattttctttacagatataaagatttatttttcaatttcgaccacgcaaagattttgtttatctagaaaagaacataacaatgtacggttacgtggaatgcttatccatatatcttctttttgagtttgaaagtgttgttaacgttcacatatataagtccgtggtattaggataggttcaaaatttataggacagattcatatgtacgcaattttaaaatactctttttctttcttcagtcttacttgatgttaattggtttccatctaatctttggctttttgcttaataggcagagtaaagagaaagaggcaaaatttggttgataaaaaaaggtaaaggcgaataaagaaattgttttaaaataaaggggttaaaggtaattttaaaaagctgtgcttattcttttcccagattcgcggcacttctgaactaagatttgcatatgattatcatttatcataacccaaacttcctaaattacccctgtacacttcccccttttgataattcacaaccaaatggaactttcataatttcaaactcactgcgaaattccaaaacaacataattgtcaaacttcctgaaaaatctgtgtaaaatgaagtatagtaattgctagagcagtgaatataaaatccaaggacaaagggacgaatatgacatttttgggtggatttttaattaataaacgtcgtagtgaaggatgataaagacaagatcttttttatataaagaaaatacaggatattttgtacgaatgataaatgataaactaaatttgtaaaacgaaaagatggtccctgggttttctcaaagaaaaaaaaagatcaaggtaaatttcaacaaaaatttatgcaaaatggggaaaatcccaaaaacaacatcaactaattttaatttggatgtttaatacccaatacttttagattagtttaaaaatacaaaacatttaaaatattagtagattcgactccgtaacttaccgtccgttaacggccgttacaaaatcgttaactagcgttaaattttcagttctacgtatttaaactgatatatacaatttatttatatgcattaaggcatattgtgttgtagtctggtggtgaaagctgtgtattatcaacagtcgaacccgggattgaaactccattaaaaaaaaaattcgttttttttttcttccgtcttcttcctctgacaaagaacaacacgaaatttttcagtattggatctgaccttaaattttcagtattggatctgaaatttttcttccgtctttttcgtcttctctctttctctttgtaatgtaaaaccttaattgatgggaagattttttaaaattttgagcaattttaaattaacaaatcaaagatttttaaagatctttgctggaccttatagccggaatctagtctatgatgcatgaatccaagctatgttactctgttgaccggcggctagggtttctatttgcagagcaaaaaagatgaaaaagggatctgtaggcttttcgaacccaggaccctatgggttgttgacctcatccgttaccaccaagctaaagcattatattcactagtatttataaacaaaaagtattatattcgtttaaatgcgtgtagttagaatttaacgtcagtcagagattctttaacggttgtaaagggacgttaagtcacgggtttgaattcactaacaatttaaatgtaaagtatttttaagctaaatatatataattaaggtatttttattccaatcaaaaagtattgtgtattaaacattcaaattaaaattagttgggttttttttttgggatttttccatgcaaaatgatagttatgattttcaaactctcctcggctaacgtgaagacaaattttatggaatattcgaatttttggcgtttttgacgaatttttaaaatcagaatcagcaaaaatacaagtatctcatgaactgtttctctaatgagtacagttatgttacttaccaaaaaagaaaaagtataattatgtataaaatacattagcgtttagtaatggccaattgaaaagaaggttagcatcttcatttccaccaaaataaataattactctttttgagtaagaaataaaacattaataatttttttttttttttccaaatcattcacctggtatccgatgggtccatataccatacaaataattaatatctgacaacaatgttatgttattctaagggtttttctacataatcgtttgaaaatttcttatgttcaatgaattctatattgaatgctcgaagaaaattagtaaggacgaaaacttagaagaagaagaaataattctgaataaaccaatatgatttaggggaacaaaaaaggaaaaaagaagtcaaggtcaactaaaggtggtcactgtggcgcccattgtgtttagtttggtttgacaaaagtcacaacagctatttcggcttaagttttactcaaagacttgtgtgtgtcccatctctgatagatttcacgcgctaaaatagttgacatttcggttatcgttggttttactggttagttccatggtttggtttgctcagattttgttacttccgttggaaagtctactcttgattatggatggacgattagtatttcgtatatcaagttcaatctcatagatgacaagaatgttaaccaattttttatttttttttgttaaaagtacgaaaagaagtatcaattaacttggttagtttggttttgaaagtccactactttggtttggtttggcaaacttggttagtttggttcgattagttgtgttgttcattttaaaggatatgtttgtatgtgactattgactccttgcaaatttaaatagaaaaaagtaaaaacattgtagtgtgaattttaaaaaaatgtcttgatagatatatggaaaatatatgtgaatgttatataaactcttaaaatgacggaacaagaagagaggcaaggcaacaagtgttatgttaaattccaacctaattaatgatcgtgtctctagtgtggaacggtgacatatgaactatttaagaatgcaagcaaatccacaaacttgttcaaagattgttttggagtgaatacgcatatcttaatgagaatcgtaataaaaacaaatcaccaagttaaagcccacttgtacatttgatctccgttatgaattttatatatatagttgcctaccaatgaaaaattaatactcaacttttgttttgctcgcaagagtccaacatattacctctcgttaaaaagtcaaaaactatttagaatgtataatagatctatagatatctatcgctgtttcagtatgaaagtcgacgacgcatgacttttctcatttcaatttattttgcggcgaagctctcttctacactctcgcaccaaatgaagggccaatctctatatacaaaacaaaaaaaaacgaagaagataagtctctatacaaagatcaatttgatgtataaaataaagtatacggacttatatataattggtctttgccgctgatacaaatctttttgtttctttttagctattgtatacatcctttagagtaattcgatagacttctgaatgcaaagaataccataagcttatacttcttcttcttcttcctttggtaatcaagggttccataatcaaagattgattagatcaatctttgaaatctataaagaacatgaatattcgagtcatatatagtcatgcatgattgaaatttcatagaatattcaaactcttatcggcattcatcgaaacatactctactttgtaattgcttgtgtcgacaataatagaattatatcacaatcaaaatttaaaagcgttgacggacgaatcatgttcatgcgtgccgaacggctgaaactaatggcgacaccaaggctttgctggtgtctccgtccgttgactttcttttgcatgagaacaaaaatctagaaaacgatttatatagaaacaaaaacgaaactaattaactataaaattcgttacgacttgattagttgttgtcaccaaactcatagtactactaactaagcttaacacacaaattgataattgaatattcgatctactaaacaattcttagcatttttcttctttctttttcaattattagagcctttaagggcaaaagaagtagagaacagtaaaatctgctatgtggttagttgtttggacttcatatgaaattagtttattacctggattaatagtccaaattttttttataaaccggtgatatttccttttataaacatgtggacatcttattatataaaatgttttttaaaattactaactcataggattatgccatgggtcaagtctatcaatcagatgttgacacgtataagaaaataattaacttttttcttcttaaagaaatagaaatactaaaaaataaatcaattaactttttttttcttaaagaaatagaaaactaaaaaataaatcattattaacatatactaattcatatgtctatatctaaaaaatattacatttgtttttcttaaccaaaagaaaaattaaccaaaaaaatttatatatgttattggtcaaatttttaatatgtatggtattaacaaattttttattattattatttatgttttgttaattgttaataatttttaatattaactaagatatagatttgatctcatatatatattattttgacatgaaatcattatcaagtaagatgaagtgtgtagaattaaaatcaagctttttatgaaatagatagttaaattgtatacaaaattgaatatgtaagataaaaaatttgttcttttcttctaaatactaaattataataaagaaaaagtgtgtaggttactatttagacttcaaatatcatcaataagattgaatgggtataataaaataaaatgcataagactactattttactattcaaaattatatatcaagaacaatgtatagattattattttattattcaaaatttaaatattatcgataaaaattacagttacatcttacacccgcttatttaggcgggccttatctagtaaaataggattcaaggtgtttagtaaatcgtggatgttactactttctgctttcgtcatgagtcgaaaatctaattctgaaaaggtaaattaatcacctaaaggaaaatggctttggcccaaccactacaagaggctaaacacatgaaatgaaatgaaatgaatgtgctgatatcgaaaaatctagagtgatgctattagttattaacgctaagctaagatagataagtatggacgttaccgaagtcgaagacattagtagaaaatgtgtataagcaattcagttttgtatagttggaaactatcgatgaacgtgcattattcatagaaaatgaatgaaagtctttggatttagcagaagaaagttttgtcttatcagaatttctaattcccataggctttgggattaagagagtccgatacgataaagactgaaattaaaatatatgtattcatggatggggacaccggacacatatattataataatatagagaaaagagggctgaatcttgacgtaaaaaaaagaaggttgtatcttaccgtttctctgaagttagtatgaagcggtttcctgaagtggtccttagccaaataaatgtaagcaaatgcgttttcgatcgcccacccaacgcacatgccccccaattctttactccaacaccaccttcaaggtacgtggttttgacaacaaatgtcgttttataaagtttttaaatacatccaactagtaaagttcatatatgaattattaaataaataaatgaaaactccttttgtctctccaaataactgagttgtggtttatgagagacaccatttataccaccgttattggtggtatcttagcaaaaattttaggctaaaatttgtgaagaaaaaactgttatataagcttaaaagctttgtttatcttaatacatttagtttatcgattttattccattccataccatacgtagcccatatgcttttccatttctatatacttacaaacacaacccttttgataatgctattgctaatcccaaaatttagttccaattttccgaaacaaatccctaatttgaatctaaaacaatgtatatgcttcactctaacatttcagcatctatgatacaacattgtcatataaacactaacgatgaagataataattgtcaaaagatatacaataataataaagaactggtacttcaaaaatctctacaaattgtttgccatggtttcaccgtaatctaactatttcattcaatattaacaaaatataaaataagaggaaaaataacaagcgaagagatgattttgagatttcaagttcaactctttagaaaattcacttcaacatgagcattatgtgaggtagaaggggaatgagaaggaggataaagatgacgatgaagaggatgatggcgtaacaagtccatttcctcgagctcttttggtattccctcgcatcttggagctgatcagtccctcttctcacaaacgagctcgctttcgccacatggctctctatgttgtttaattgttgcccttgcgcttctactagagctgccatgtccaagaaaacctggtgcagctccagtagattcttctctatctccttcactgcatcatgtctctcctggatctcagatatcgtgtctaggatttgacctcttccttgctcttgaatcgctttttggagaaaattctcgctctcaccgctcgctatcaagttatcgattgtttgctcgtctgctttttctcctgttattgtgaaatacctgcaccaattttaacataatcatataacttgcaacccaaacagagcatagcttgcaacacaagaaacctaaagaaaaacaaagacctgcgctctacggtttccttatactcattgttcatacgagcacgtagaccttgaaaactatccatcaagtctttgagcttcttcccgagaccgctaaccacagaagatcgagtcctatccgtagacgaaccaggcccacaaccagggacattacggctattagcattcgctttctctaaggcttcgagcttctgcttgatgattttaaccctcttaaggaccattgctacgtctccatccatcttagctcgtagctctttaaccttcttggcattgtgaaccgtcttgcactcctcgtttgagtcttgaagcttcttataaagagcctcgactcctttcatgtcgtccttcacattctcgacatcctcgaagaatttatcgaggttcatcgtttcttgacctgcctcaacatcccccagttgagcctggttcttcttgaatgaattagagaataaatcgttcatttttactctgtctttattttctttctctggcttaattatgtacagaagttttttttttggggttttatgtgtttttttctttgattttgtttttgttcaaaagcaattgattatgatgatgaacatcaccatcgtcgtcctctgcatgagtaagaggaagaagatgctaggaagttttttttttgttttattttgatgagtgaaaaagaaaaacttttagttttgtgggaaggtttattttgttttgttagaaacgagagacacaagccacttttggtaattgtccaaatttagtcaatggcataactttttcttaaccaaattagctccatttagtcaaagacaatattacccttataatgggccaagccttaaagcctaaagcccaattaaaaggccattttttctgcttcctgcttcttcttcttcataggcttgttttgattaaacctcgcaaaacctaatttttgacctgaaccgcttcgtttccgatcggaggaagtatctggtgatgacgggaggcttgcataatgaggaggcgggttcactggctacgccgactagtgctaggcacattgggaagagagctcgcaagaacaaaagcctcaccgtctcttttgacgagaaagatctcaagtacaataaaaattctaactttactgctgattcaatctgggaatctttgaattcgcatgattagtgagttttctggtgtgtgttgttttgttggtagggattttgtgactggttttcacaagaggaagaagaaaagaagaaaggaagctcagaagcagcaggaggaagcttttaggcggaaacgaatcgaggcccgtaagaatgtaagcatctaactgttccttcttattctgatatgcgttatagattagtctcaaattctttgtttagctaaatttagatttgtctggagcttaaaaacactgtctttttggtaagaggttgtgcaatgagcttgttctgatttgtttctatagaaatttgagtgcttcttttgttttgaccgcaattgttaatcgaaattttacatgtccttcgatagtgtctgtgatgtatgagtgattaatagtggatgagatgtcagagagattgttgatgatcaatcatttttattatgtagattttgattcttggacttgagcctatcttttctcttattgttctgaatctggtatatgagctttgcagaggaaattggaagagctaatggttgctggtaatggcgaggataatgaagatggggaagctgaagatgaagtggatgcagaggatgaagaagcagagcctgatgcttcaacatctggtaatctttttgtaatcttttttttttttgttttccattacgcaatgattgatagtttgtcgccataatgtgaaagctggttgattggaatggagaagtttgcaacacaagcattattgatgtctttttctccgttgattgcttttgcattagtatgattttgctttgactggctttgttctgatatttgttgtgtttctttgtggatgaaagccacgacgatgtatgatacaggcgagttgaaagtaactgtgacaacaagtgagatatctcgtgaagaggaagagcctattcgcaaggagaagactcaatcaacagaatcaggttccacggccaaagcttccacaaagcagcctgtgcctgtgaggaaaaccaaacccatgaaacagagcaggagacggtcaaccaccaaaactatgaagaaaagggataagaagaaacaagcaagagggatcaagacttcgcgataggagtagaaatgtctgttgtcctctaaaagcatgcttttagagcttctgatgattcggattctcgagcgttttgatatttttctgctgttgaaatggagggtaacaattggataatgttgagttttgttgtaacaatcacatttgttaatcaaatctgtaatgttacacttactttaccgttcaccaagttctttgatcactaactcttcctataaatttggttaaattggtaacaagcaattactgcggttgaatactaaccgctttggtggctacaaatcggcaaaggggttggttttggcgatttaaagaagcggttcaagttggcagtaaaaaagatatgctcgaacatgatctgatttcgtatagaaggccggttcaaccgtcatgggcctcatggcacggcttacaaatttgcagaggatgaatatttcactaaatagaatacaaatgcaaatatgtatgactttctctaaaaaaagaattcaatctaattatttagttcaatacatttcctaaatagaaatcttaccgaatatggtatatataatatatgtaggtaacacataagttgcagtctataacaaatctttgtatagtttcaaggagggtatagttcgttactacttacattttatgttacagtttacacgttttgatattttttttgtaactcatctgcaaatgttaaacaataactaaagagatccttcgttttgatatattgatataaatcagagcagctagtagcacagggacacgagagatctttagacccgacatttaccttaaataatggtcaaatgtatgttcgttgagaattgaaactcgaccttcgccacgtcttaaggaaataaacattttggaattgtttgatccattgattattgcctagaagacgcctttgatttatcttaactcttaggtagaagatattttcgagccagaaaagaaagagtcgaagatcttttatttcattttatcactacgtgataaagtccaaaatcaagtaacttgtggttgtcatttgtcaataatgtaagtgataaattacgggaccacgaagtcaccatgagacttgtaaccctaacaaaaacgtcttaaaaattgatgtcctcatttgtatcatacaatttatatatttattactaaatggaacacccacatgcatacgtcaatctatcaagcccgctaactaaacgaaacgaatttgtgggagcgtaattgatataggctacatatcaatccaccataactaaaaaaattgatgggaagaccaaattcataacacaaactcacaaaagcattgaactatcacacatcacagattcacaattcacacaaagcaaagacataacattgagaccaaggggaagccaattaaacacgcaaggttacaacttgcaagatagtatagtgtcttgttttttcttttgctagtataatattgtcttgtttatttcttataatgttgcttgtatgtaaatcgaccaaacagtcaagtttatgtttacatgcaaggtatatatattgaaaatttatgttcaattgtttgttttgcagcaacagataataatacatcacgaataacgtaactgcattttttttggctcaatcagaaacaagtatatatgtttaccaaatcattcttctcgttttacaagatctcatcgtgcatcaactcttcatgtgttttttgtcgaacaaaaccaaaatacataatttattaactcgtatttgtggtaagtacaacaaatacgtttgcatatcaaaaaaaaaaaaaaacgtttgcatatcattttgaaactaccatttgattttttctccggtgactgaaagtgaatattggttgacagacctgacactcgagactaagataaataagtggtcgcaactttgggaaacgattgaaaacaaaagaaaaaataataggcgttattttgcaagtattctaaagtctctatttcccaccaacccccatacaatttactgacttataatgtttcccgtttaattccttattgataaatttttggaggttgaataaacgacacgtggaaaatatgacgtggcagaaagacaaactaaaaaggccacgtcttcgtgctgaatgaattcataatttcgtactacaaaattaatatcacctaccattttcgtctatgaccttaatcgatctcatccgttcatctctttattcgtggatccaacggtctatatcaaatcatatccccatatttatcaacagtggatagattaagaaaataccgaattaaaaggccacgtcctcttatgctgcatgaattcgtatattacctaccatttgccatgcccataatcgatcccaaccgtccatcttcctgttattagatccaacggtgtagattaaatcgtatcctaagcttccccatgagctccacctatatatatcatcagccagtgcatagatcaagaggaaaccaactcagaaaatggtttgttcgaccatcatcaaggcggtgcttatatccaccggaatcatcaccgccatgtctatgtttctaaaggttttccttcccgtaacattatatttctccttatctttttcgaccctttggagttccttcctcccgtggctgaaaccgccgtacctcttcgtcttcgtcaacgtcatgatcaccattattattgcttcttccagatattaccggagcattggtgatcacgatggtaaagacgagaagaatttacacggacgtggctactataggattcaaactgagccaatcgtcaaccaaacttctccgccacggcttgaggttaaggatatggatcttgacgtggactttgacttcatggcgacgattcagccgccagaggtggagagatcagaggttgtgtatgaagagaaggaggaggagatttcagaactgattaacggcggagatgagtttgttgtgttggaagaatcagagaatctccctccggttgagaagcctttggtttcggctagatttgaacaccggaaaatggtcaaagtgactccaaaaggtactatcacttccaaatgtttaaggaaaaaggtgacgtcattcaagacaacggataggtttttattcgaattttggaacactatttatgtaacttcggagggggattattattttgcaggcgatgatattagaaagaaggcgttgaaagtggtgaacccgaagcgagataataagtggaagacgatatcggaggagggaacgtcaagaccgttgagtactagtcattaccagagaccggatatattcggacttggcgccggtggtgattctttgaggaaatcagagacttttagagacgtgactaattactatcaccagtcgtctctgacggtgacgcctccggtgaagatggagaaagagatgttgccgagtctagaggacctgaatcgaagaattgaagcgtttataaagaaggttaaggaagagaggctcgagtcactaaggttagacaaagaggtcgcttagctagctttgtcgtagttattactcttttttactattttgattgtccttttttttttccttctatatatatacacatgaaatgaaacaaaagacgttaaatgtaacgatgggtacgtattaaattgatattgtaatatacaatatacaatgtaatgttagcactgttttatttacctgatgagatgcgtacttctgtttgttcaatctagatcatggtccgacgtccaatagaggcggtcctgagtttacaggccccagcgaatcttaaaacgtggctaaagaaaaaactagaattacttatcaaaaatccaaaagagaaaataatataacaacatgtatacatgtttatatcaaaatctggatgtatttaaatgatataagctgaactagttaagctttaataagtgtttacttttaaaaagaattctgatgcaaaacacactctttcagatttagtctgcggacggtaaaccgcggggacaatttatctttttaaagttagtataattttttttttgcaaattgtatctatctataatatatttttattttatagtttacaattgttattaagtaacgtcttgccaaacccgtcccgccaaacccgtcccgtaaaaaaaccatttatttatattaatgttgatcttatttatgatatgtttataaatcattgtctatatatttttgtcgatgcgggacgttgaatcacaaaatatgacggaaaaaattaagatttttttaaactctatatataatataatgatgttaaaaattgtgatatatcaaattttttataagtttaaatattaataatgttttataaatgttaaatatataaataataatatttaaaaaattaatatgtttgcttataaggtaatgacataataactctaaaagaaatgattaaaaagatctaaatctttaattaaatattttcattaataaataattaatgtcggtgacatgacattgtaaataagttcaaatacaaaatttatttatttaaacaaaaaacgtttagtatgaataatatttatttaacaaaaaactttgttttaaaatattgttaacaaatatgtttatgctaattttaagggattgatttgaagtttgttgggactaaatttgattgataatgtgattgacaatttaaataaagaatttaaagaaaaattaattattttggaaaaaagatttaatgctaatgacattagatcgtaaataagtccaagtccaagatttatttgctaaaattgctgcaaaaatgtatatatatatatatatatacattctgatgcaaaacacactctttcagttatttcctatttttttctataaatgaaaatgtaagaatgtatagttatgataagaagatgcgtatcatatagatctctttagttttgttttttttacttaacatgttgatatggaacaaggtatacaattgataagttaagttggataaaattttgtggttctgagcaatgtaagtgatatattattacatatttacatcaagaaggtgatatattacggggccacaaagccaccatgcagttggtaaccctaacaaaaagtcttaaagatagatgttttaattttgtatcgtacacaaatatcttgagtacttaaaggactggcatatgtcaataatctatcaaggcagccggctaatgaaattgtgggaataatattaaaataggctacatatcattccaccataactagaattaaaatgatgggaagaccataccgaatcaaaaatataaacgacatgaagtaatttggatatctttcttaagtataacaaatacgtttgcatatattttctaatttaaaataattgttcgacttttttttcgtcggtcgattgaaaagtgaaatatttgccaagagtaagaatgtaaaatataaggttaaataattaatcaaaaaggaaaaagaacagataaggttaaaaagaggtggtcacaacgtgagaaacaattgattcgttatagtatatagctaggtcgactaagaaaattacaatgtttcatttgttttcttatttagagaattttggagattccagaattgacacaaactaaaacgacacgtgaccaaccattcgccaaacctttcactaatcctaaccgtccatctttatattcttagatccaacggtgtaaggttaacatcacagcgtaattaagcttttcacataaagctccacctccacctctatgattcaacagtcgacagatcgagagtactccaaatcggaaaaaatggtttcgtctatgatttcgatcaaggcggcgctaatcaccgccggaatcgtggccgtgtctctgtttctgaagtcctctgttcctatcgcagtagacttctctgtatcacgattcccgatcttttggagctcctttctctcgtggctgaaaccgccgtatcttttcgtcgccatcaacgtcataatcaccattatcatggcttcttccaagttttatcagagcgttggagagcaagacggtgaagacgacgagattttactcggtggcgaatatacgattccgaatgtcatcacccaagctcctccgcgacggttggttgatctggacgcagattttgattttgtggcgacggttcagtcgccgatcctcgttgcggaggtggagatattggaggtcgtgtttgaagagaaggagatggcgatttcaggacagaccaacggtggagatgagtttgcggtgatgagatcagagttgaatcagccgataatggaggaatccgagaatctgcctccggctgagaaaccactggtttcggctagatccggccaccggaaaccgatcaaagcgagttcaaaaggtaccggagaaattaagagtaggcgaaaactttttaaattattaatttaataattgaggaaaggatgacgtcattcaacataacggctagattttatttgaattttcacgctatatcgacgacaatgaccgattataaccggtttaaaccgaaataaaccgtagaggggtaaataggtaattgtcttatataggaaattcttattttgcaggcgttaatagaaaaaagaaggcgttgaaagtggtgaaaccgaaccggcacgagacactggagaacacgtggaacatgataactgaggagggaaaatcaacgccgttgacttgtcattaccggaaaaccagtatgtctggacttaacgccggcggcgatgtaaaacctgtcttgaggaaagcggagacgttcagggacgtgactaattatcgacagtcgtctccgacggtgacgtcaccggtgaagatgaagaaggagatgtcgccgagtagggaggagctgaatcgaagagtagaagcgtttatcaagaagtgtaaggaagagagattggagtcgctaaaattggagaaataagtggcttaattaaacacgagattaattagctttttgtcttaataattaattgttaatcgttttttactatttaaatgtcttttatattttgtttttttttatatggactacaagtaatgaagcaaaaagagatttgaaccataatacatctaatcagtttaagaaggagcctttttgattattaaaaaataaaaagattgttttcatcaaatatctaaatagaaaatgatataatttactaaaaatatgttttacataaagatggatgtcatttaaaaataataggcttgggaggagtctaaaacggttgttttcacttggctatccctagggcccgttacgtatggtccgattgtttcgtctaatttgcaacatgaaattggtgcacattatttcttcatatggagtttgtaacaaagcaaaacataatattcacgttaacaaaaaaaaaaaagattaaccacgattttagtataaaactttagaccaaaaaatataacatttattattggtcttatctggcaaaaggatcttatgtcttttattttgtgatcaaaatcaatcaattcttcttcttgatcattcttatctcagctttggttgctccaatgttaggaataatgtgaaaacatattgttgaatgacgacgaagacaataaacatctcctacttgtatgtgaattttgagttttgggcattgagctggtcttatttcgtattgtttgaatcttgcatatgaacaacgcgtaacaaattggaagagctaatggtcgaggtccttgtgaattgtgagtatagtggagatgtacgtaaaatctgagaaggatatgcagaaaatgaagaagggagcctcatgctcttattttcgataattcgatttataatcactgtaaaaaataaaaataaaaatgtataacgagaaatctggagccaataatcacgtgttagatgtgacacacacgagacatattttgttataaccctggactggacagtgaacggtgcttactgcttgcttagcaacgactcttcggtcgataatgacaccatctttacgtgcgatcgtattattggtcgtttaactatcgacggggaaaattaacaaaacgaattaattatggacgcgtccaactattggattttcttggattctcatccaaaagagctttcactcttttaggccgtgaaatctaacggtcgaacgtcagacaaactttgcgactcactctcaccatcaaagtcacatcacagggcagttggatcgctgttcttgttctgtatttcgaagaagtttcgtttgccacttctttttatgtcggtaatatattaactaaaattggaatttcgtattgctcttcttgtgctagatgagatgtgaatcaaatgaagcatggggatattattattattgtgagaacgtcaaaaataccttttgaaatttcttaccttctaatttgttaaagacggaatgtcattgtctgtaattttctttttataagtatataataatttagtacatcgatctttcaaatggtaatatttctaatttatatattcaatccaaatgaaaataaacaatcaaatcaaacaaacaaagtttacgtttatataacactgttaactatatatgtgtttgctctttcgagtcaagcaaccattataacatatccctttttaagaaatcatcaatgagatattaaagaaaaacctaagagcttttttagatatatcaaaagggtaagatccgaaaatgtaaggataatatctgtggtttgagcagtagtagtattttcatcattgctgtaagcgaaattagtagtggtcgacaaagaaaaagattaaatagtaaagagtggatggccacttgggacgagtcggagtcaaatatacgacgacagttggagaaacttgacatctaccttggcccgttcttacttcttaactcttaaaaataccttagtgggtttctgccgtcagggataatttttattatgaaatccttcattttaatccggtgacataaataagatactagatcatttgaaagataaataatgtatcataataataaaaatagtgtttttgcgtttttggcgatactcatactatggattaatttgttttgtggtaggatattatttaatatgagtaaaatacttaacaatttaattattttaagaaaagaatttaatgtcattttcttgtaacatcttatcaactagagattatacactataaacttttgtatcaagccgtttttaaaattatgtgagattttactttttctaaaaacaattcaatgatatgatttctcttgtttttacttgattgtccttatataaaccaaccaaaaaaatactatactttaatacttgttaagtaatattaaatatccatcttagatattttacaactctttttaggtaaagatattttacaaccttttcttttctttgttttgcaaaaggtttttaacaacgctttacatccaatgcagtttgtaatctataaaagaacatataaacttatactccgtaaagtaattagttatgaattcgctcaaaacattattctcgtttgtctaaaattaacataaaacccaatataccggtaaaagtaaacatacatgcaaggctaaaagacgtgggcataacgtgtgattgggaaaccatcggaaacaaaaataaggaattataacgaatggccatactaggttgactaataagagaattattatttgacgtatataagataataagacaattatgggataaaattaagagacataagtgtggacacgtgaagcttagagtacgtgtcaatattcaataagacataaacaacaacaaaaaaaagggtttattctctactcttgttttgtttatacaagaggatgcatctactgccccaaaacaatcctgaccgttcatgtctctattcttagatccaacggtatgtatcagctatctcattgtcccctctcatagctttctatataaaccgaaagaaagaataatagagtcagagctaagacttaagagcgtcacaacaatatcacactcagataaatatcaagagatagagagagtaacagtgatatagtcgagaaaatggcgtcgtggatgaaagcggtgctaatctctactggcgtcgtagccacggctatgcatctaaaggttattgttcctgtggctatggatttctcacaaaatccgattattttgagctctttcctcacgtggctgaaaccgccgtatctttacgtcatcactaacgtcatcatcatcgttgtcggagtttcctaccggattactactgtctccagccacgtcgacggcaaagactatgaggcttcttacagtggcgacaataagtttcagactgatcatcagcagatcgtccaagaagctcctctaaggcgacgaacggagacgaaagatgcggattttggtttcatcggcaaagttttgcagatcgttaaggagccggaggttgtgtatgaagagaaggagaggccggcgacggtagaggaggaggagaagaagtgtataattgtggtgagcaaatcggaaaatcaacctccggtggagaagcctcttgttacggctaggatcggccaaaagaaaccggtggttaagactacaccagcaggtaatttaatttagatatttaatcactaaggtgacgtcatccgaatttagatattttataaaaatctaaaaacactatttgttaaaaggttaatttcgtaatttttcagaaaggaattctatgagagcgttgagagttgcgaaaccgaaacgtaacgagacgttagagaatacgtggaagatgattatggaaggcaacaagtcaacgcttccgttgaccagttattacaagagacccgacacgttcggacttggcgaagagacaaaacaatcaggtgttttgaagaaatcggagacgtttagtgacagaactaactgttaccagtctctgccgccgccacctccgccgctagtgaaggtgaagaaggtgaaagtgtcacggagtagggatgagcttaaccggaaagtagaagcgtttataaaaaaatgcaacgacgagaggttcgcgtcgatgaaactggacaacgaagtggctcgtcatggtctttcttattaaaatcattttcttcataatttttttggttgtctttcaatacacgacaataacaagttaacaaaagtagaaagtcacggataaacaaaatctctgctttgtattattgattggataagggtggaattggttggtgcacctagtgatatttcttcttcgttaacaatgtaattaaaagtcattgaatagatattttctcctctgcgtaaagccaaagatattagttaatgggaacactataattcaatctactttataatgctctttctttcctaaaataggaaaacaaataaacaaaggtacattatcaatcacgatggtagtggtaacataacaacattaacattcacattaaccaaaaaaagaagaagataagatcttctctggtctaaatttggaaagagtctgcactctcagaatcaatctctcttgttgaatctcatcttagcttcagtttctccactgtaaggagcaacgtgaaaagcgtactgttgaatgatggagaagacgatcatctcaagacatacaagcacattttgcagagcttcttcaagctgatccacctccaaccagaaatgatgcgacttaattaatcccaatcccaccaatatcttcaggactattccctgtgcaacacataattcccaaggtttaagaatggaacaaggcgaaaaattagacatgaatgctttaaacttgacccaatgtagcagtgatcctaaaatctattgagatgagacttttttgtgtctcaagtaccaaccaacaagctctaaacggttttcgttcgctacacaatcgaaagacttagattaaggagaaaaatctcaacgctcagaccatatgcacattacaaaaatcctagacaaaagagttcccctttaaaccttcagctctcaactaaatagcctacggtctgttgttgagctggcaaagctacaattccttgttaaagtagtcctgcaaaccttaatggtctaattcgtggcggtgaaatattataaggcgggaacccctaaaacatcttatgacattctagagactatatgtatctttccattgtctaaacagcagattgaagaaaaatttgaatgtttcctcatcaaactcagttagttgattgaagaaactagtaggcagagaacttgtgattttggcatttggcaggcaaagaaaaagttggaaattaagtatttacctgccaaaagcagaagaacactatccctttgacgcacatgaactttgtaagaggcttatgaggctccaactctttagcaaaaacatggtagaatttcaccaaagaatacaacgccagggaaaccgaaacattgagaatagcagtgaagatccagctcaaccaaactggataaatcccaaggatctgtaatgttatcatcaagatggaacacactgggcggataatacaaaactgccatgtccattgcttgagctgtttcagtgtgaggtaatccagatgtgtggtacggggcacgaaaagagtcattggaaacgaatggtggatttctcgccctttgaattcatctgggataatccgtgcactcatcgatatgtttacataactatacatcaaagccaagaatttagcaatgacctgaaacaaacagaggcaaatacaacaaatcaagaaatatccacacagagagagagagttaatgtagggaaaatgagacatgacagaatctagaaggaacctacaagtgcctcatagcattccttaacggcgtctagaaacatgaagaaaggtttgcttcctttagcatctaacaagcccacaaaagagttgatagcgtaaacaggagccataagcacaataataagaatggctctctgttcattaggtttcttccagtaaaacagatgctgggatacaagctgcatagtgaagtgcatcgagagcaaaacacagaacacggatcccatcaccgtgatctccgcaggagataaagtagataagtcaatcattctgcataaaatgaaacaagttaagtacacactgatcatcacgattcccaaaaaactaacaatggttgtgaattccaatcagatgtagcagctagcacaattatgaagtgtttctagactgaatagaactaaaacatcatgattcctgagatatagatactaattcagaaattcccagtacttaaatagtaacctcactactttgacatactttctttgtctaagtcacagatcttatactctagaaaccccagaatcaaatcattgacgaacgagctaaaagattccaaatttaactaagacacagcaaaatggggctaaaaggagtaactatacgccgaaaacccattactttcaagctcttcaggatcatcaaaatcgaaactttttgtgatactgaacttaagagatgaacaagaagaagaagtagagagaatcagaaggcaaaccttgattgaaacaagagggagattatcgaagaagacgattcaggtagagaacttcaccgagttgtttgttattgtacgattcatcaatggtatagatttgtttgattaaaagaattgtttttttgaccagaatctgttcatcattgaccggttcaaaatcagccgagtcctctttgcgaccaagaaatatacccaagtcctccgtcgttatttgccggccggtttggttttccgtttaaaagttcgaaccgaattgaaatttggttattcattaaaacaaaattggttaggacttaaattgcggtttggtttgatttattttgtgaaacaagcaagaacaaagaaaataacaagttaagaagatgcaaatgtttgacaagattaggcgttaattaaattattgtaagatatgccacacatgacacatggatgatgctgttacatactataagagtataaggaatgtgctttaactaataaattgacgactctttcatcttatgtttatactcgtgttctttttgtcaacttttatgaggaacgtatgagactcgcaatgtcttgcttgcacacaaactcaacatcatatatgttgcttccggttaacctaacttgtaagtccattcttgtctctctatttataatctctctgtgtgttttcttttcaaattcgatgaggttgttatagacaagagaagacatttttatacaaaagagtttatcattatataagtttcaaactttgaagatatggcatcggcttttagatcatccacgaggttgattcttgtattaggtatactgattttgtgttcggtttcttctgtccgaagctggagcaaagaaggtcatattcttacttgtagaattgctcaggtaattaagttaatgatctattgtttgaagcaactattttggttattcttgtcttatatatgtattagtgagatatacctacaaatttttaattaggattgacttttaaattgctatacgttaccatgcctaacatctcatgtagatgatcatgaatacaaacatgtctaatggcatatcaaattccaagtttttttggtagagatctgagtcatttgaccgttataagattcataacaaaagttcgtatgtgtgtgtttttgtggtgtgaccagaatcttttagaagccggaccagcacatgtagtagagaatctgttaccggattacgtgaaaggagatttatcagcattgtgtgtgtggcctgaccagatccgacattggtacaagtatcgttggaccagccatctccattacatcgacactcccgaccaagcctgctcttacgaatactctagtaagtcacaaccgagacattttcagataaccttaatccgttttctaattatcttgaaccggagttaaccaaaaaatcaattacaaataccaaaccggattaaaaacaggggattgtcatgatcaacatggattgaaggatatgtgtgtggatggagcaatccagaatttcacgtctcagcttcagcattacggtgaaggaacatctgatcgtagatgtatgtcatcattttcatttatttcatataatgatgatatccaaagtgtaactgcgtattttgtattttgatgcataacttaagtttttaaaattataatatatccttgttcaatcacatagataacatgaccgaagcccttttgttcttgtctcatttcatgggagatattcatcaggtttattactcatcatcgattcatttcacacctccacacatatagctctatttccatgttaaatatttaattaacatggtttttttttttttccttaaaaagccgatgcatgtgggattcacaagtgatgaaggaggaaacacgatagatttacgttggtacaaacacaaatccaatctacatcatgtaagcttcttcttttgtctctttcaactttaaatttcatcatgaaaacaaaaaaaaaattaacgaaggaaacaaaatatgtaggtatgggatagagagatcattctcacggctctaaaagaaaactacgacaagaacttggatcttctccaagaggatcttgagaagaacatcaccaatgtaatagacactaatttattcatattttactataattttaagaatctttataatggttatcatatattagggattatggcacgacgatctatcttcgtggacagaatgcaacgatcttatcgcttgtccacacaagtaagttttaaattacttggtttaagattggcttgacgctcgtttgaagctagctacaaattttgatactttttctggtccaaaaatcttacaaagatactgaaaataaaataataggttttaaacttttaatttatttggagttggataggattaagtttcactaacttccaattcaaagtcaattaatagtagtttaccatgattagtgggttgactaatgtaccatatatattaccttatatcacatcttatttccgatgtgagatttcttatgaaacataattagactcgaaccttttgtgtttcgatatatgtagtgtattcatgatcagaatcttattaagtttacaactgaaaactaaaatattaacatcataattatagattcttaagtaggttttgtttgggtggagaaaatatccaatttcgaataacattatataaaatattgaactaattttaattgtatacgcaggtatgcttcagagagtataaagttagcttgtaaatggggatacaaaggcgtcaagtctggtgaaacgttatcaggtacgttgtttgcttcttctttttctcgtacgctaacaaaaatatttaaaaataaacccgaccaaatgaagtttaattaatcggattaatgatttttaatagtcactactttttttgtgtgggatatatgactgtctaatatataattttataagaaagctaaaggatttgtttaataatttccgataaataattttgcagaagaatatttcaatacaaggttgccaatagtgatgaagagaatagttcagggaggagttagactagccatgatactaaaccgggtttttagtgacgatcatgctattgctggtgttgctgccacttgaaccaaacccgacataccggggcatcaaagcatttgattaagagattatttgatacattcacaaaattaattaaggctgatcagacattcttttcttttagtagctttatctatgtgacagctaatgcctgtggactgctttgtttagaagtgtttagcattagatcatatgctaattcaatgttattaattcatcgtatgatcgttttagagatagtggttctaagaaaataaactagattatttcattcaagtaaacctagttcatctataaatatttgattccagtctaagacaaatgagaccaaaagctaaatattatagatcaaattgataaagtaaataagaaatctagcatctagaaagatcacaatatatatattttaacaagagaaactacataggatttgtacaaaaatgaaatgacaaaatgaaattgaactcaacaaactagacactacaagatcaccaatcttatctcactccaataaaccacagaaaattctaaaaagtgaatgaaaatatttctgtgggaaatgagaagatagaagattaagtttaggatccatggaagtttctcgttgagccaaagatggaagcaaaagaattagcaaaaccaagcaagatcccaactttgacttgccctctcttcgggatcggacggctactgtgttctctaccaccttttctagttccatctccaccgttgatcatgctgactttacctcttccttccattttctgctcttcgaagtcaaagtcttgtggaaagtagagaagaagaagaagtgagctcactgaaaaacaagaatgtttgatttgctacaagttacaaaaccacaaggggactcggctcttatataaattcccaagtgctctccaaaacaaccttgcttttcgctaatattacaggtttaacacaatgcctagacgtttttgccccttgccgccccttaaggccatagattaagataagatctttactttattaatctagtttgatttggtttaataaggtttttgttttgattacattatggcactgaagaattttaaaaagaaaaatattataacttaataatttacgaataaatttcatggtgttacatataaattaatatctcttaaaactaattagatttacatttttttttcatttatgtcatccaaatttaagtattataatcaaaacaaaaaaagaacagtctaatcataggttagttctatattcatatgtatgcattggtcaataatgaagactaattatctttttgattactttgtgagtgtgtaaatcataactgtgatttatccaggtacattgcacgatggctgcaagcttataattaaataactaattatgaaaaataagtaggttcgctataaagtggacaccaacttgtgttcccactaagaaaaaaagactaaaaagtagtaatactcaaatcttaagggtagattagtcatctaataaagggaccaaaaaatattcttacagtcttaaagtgctctttgattaattaatagtctaatacatgtgtcatttcgcactaatttcacgtgcctaaaaccaaagaaagcttacatatctttttatgaatttgatgccataatgcattaactgaaagtaaaattaataaaattcttaatagtttgcagacaaacaacaaaactcacgtgggaaaataagtagtgtgagtgccacactaaaaagttagtggaaaagattaggtgttttagaaaacgtttatgtatgtggttcaagactcgcgatatatattttggagatataacaagtaacacaacaaacgataaatagtttgcaagtttttaactaaattgaattcaattttttatacatgagctttacttttactacttttaataacagctgacgaaaataaaaataaaagttcaagaaaaaaaatcgatcagtgaagctaaataacaactgaaaaatagtgtaaaacattacacatcacaagcaatggcttaagaagagatgactagactcattgatttacatttgcctcatatggcagctctcatggctcctcttgcagcatcccgtctcatatcatccgcttttccgcttcctctgaagtacatgtatacttgctgcacacaatcaaatgttaaaaagagttttgcttcagaacctatatcgatccagagattgtatctgattaggaaagagacctgtataacccagatgctaaccactgattcaagacagaataacccaaacccaatgaagtagaagatctgtaaaaaggaaaaaaacaaggtattatcgatgagtgatagtatgatcaggagcctctctacgtttatcaggcaagatttatggttgcagccgaaaaatcaagggatggataagggcttaccccgaccaatgcctgagcgctcaacacatctattgcaggtaatatgcccctgtatatttcaagatcatcagacacttgaacattaactgtgttacaccctagacgatgtcttaaagcttgtgaggaaacttacgcaagtgattttcctttgaagacaataggaggagcaactgcagcaaagaggcagaaaagtatgtggagctgtagccagaaacagaaagcagatgaattttaggcaagtctgttataaactatgcagaagatctgccacagtgccactaaaaccagcaaaaaactagggattcaccatgtagaacaagaaaaaccatccaaagttgaatgcactatcacttctgcaggaattcaacacaaagagaaacattgaatatggatatatggaaaaataaaaatactacgaacactttcctacacaaaattagtgtctagggatgaaaaataagaacctgaaggcacggtagagaggccgataccataacacatagcctcctggaacacccgatatgaagtaaataacggcgagaagccaaattgttactcctgaaaaaagagaaaaaaaaaatcaagactgtaaataaacagagacggaccatcacagaagacttggccagctaaaaaggaacacaagacatgtgtaagagaacaaaaagagaccttctcctttgatccaagcggtagtaacggcgatgatattccagaaaagtgcgagaaccaaccctgttggaacatggacacatgagttagatattaccaaattacaattttcttacttaacctatataagtgaagtgaatgtaagagtatttgggtaaattcctgattctccaagtaagactatatttacgtacccaaatatgttgcaaatgcaatatactgtagcctttggagacgaaccagaatttcatttgcaatgtcatggtggataagggggaagaaggtaggccagttttttgcctcgataacaattccggctacaaagaaaggtaatataagagcaaacttatggaagcaagactatgaatcagtaaacagagacatatatcataggttacactaaattcaaatcctcggtgttgaaaagaggtagatgttttacctcgggcagcagcatcctgttttcgtttaagatcctacacagaaacaaaataaatcagtaatagaaaacgaaacgtacacaaattactttcaaactggaattttctaatcacaaaagtataaaagatgccacttcaacaaaatgaataaacttcaggaactgtaaaagtgagttccaaagggtgatgtttgagttaaagttttacttgctctcgtcgtcttaggtcagcttctttggcttggagctccttctctttctttttcaaatcctgtattcccaacaatgtaacattcaaacaagaattattctaactaattcatataaccccctaatcacaaaatgtataatgtttactccattgtcaatcaaacctgtgcaccagaccctggtctgtcaagaggaatgtcaacagtacgaccataaccaaaaccagcaggttcgggaggcaaaggcgatagtctggaattcgaagcagcaggaacactcccaggattctaagaatgtagacaaaaattaacagtcattaggcatcaaatggtcttcagaataaaaaaaaagagcacatagcaagaaatcattgaatagagataccaatagaaaacatcaaagagccaaaataaagaactcgagcacatctctaaagcgatctactcgtgctcaattacgttaatccttagtaacagcagtaaagtaacaaacttttaacgaatttggattatattctcgtcaactatcaacattatcctcaacagacatagcgaaagagagaggcaggtaaagcaaacacagaaccaggaacaacccccaaaataaaccctaagtaagaatgataagatacaaatagaccaatttgaggaaacccagtacgaagaagctagctttaagggagataacacgccggagtttcttctttcactttcagtggtgaaatcagagagtaaaagcttacagcaaaaggattgacttcgtcttgttcgtcgaatgtgttccgatcgtaacgaccacccatggtttaccaaagcttatctctcgatttcacaacaaagatcaaaccttcaattctgaccttcggaagggggaaaactgaaaagacaacaatttgtatttatccatttaaattcatattttaacctttggaatttttttattaggatttctgattttttttttttttttttttttgtcgtcaaacagatttttcattaacaagcccaaatatgcttcataacagagtacaactgcaggtcaaaagcccactaattgcaaacattaaaatagataagatgacgacacgtgtatgcaacgtggaaattgcagggtagatcaacgtttcacagcaccttcacggcttcaccgacacgacgcaatcctcttcaccggagaattttttgccggtcagcaaataattcagctcctccatgaaagttctacatctgcccgcctttggttgtaccgtacgccttttgccaaaattcgtcgggagagattttttggatttagtttggccaccggagatttaaacttcagctgatgaggattggaataatccttggaggaccatcaaaacacgacgtgaaccccaactcttcatactcctctccaatcaaccgcaaacatcttgatctatcacccatgaagaaccgacgcccttacgctcttattagcaaagcgaggaatttaccttcacatggaagaaaaatcaagcatccaatgaacaaagatccatctaaaactctcccggaattaaacatcttccaagattggaagtggtgatttgcaacttgcaaaagatcttatcaaaaaaccggcaataaaaccggaagaaattccgaacaagtcggaaatttaaaccggcaaaataccggaatcaaaagaaaacaaagaaaagcaaactaagatgaaatccgatttcaatcggagaaaatattaaacacaactttcctctctctgaaagatacgagagaggaaaaactctttttgtagttcatattaggattttctgattattccattttgtcattattatccttaatttttttatttttaaaaaaactaccaaaaataaaaattagccttttattttttacttcaaaaacctttttatttgtattggtccaataagaattttttgtttttgtttttgtcaatcatccaataagaataagttaggaaagtgggtctctttatttgatttttaaagtagttatagtgatgaaagtacataatggacatgagcttttacaaatcttaatatgaaccctttttcatcaattccaagaaagctatatactaactaaggataagtagtataatcatatataaattggttaatgagataaagaaaaacactatctatgtgtataataatccttctcttgctatttgtgtgttgttgttgttcttgatgtctcttgacttctcttatgctttactcggtgactactactactaccacgccttaatcttctgttattaccgttactcttcctctttgtcatcgagcttgatgacgatggatcgatccacttaatgtcttcttctaccgctttgctccatcgttctttaaaagtttgaagctcccatgtcgattgtctccttatctacttgtttcatcacaaacactagaatgctaagttttaccgtctattgaatacatatcaaagaaacaataattcatcggttaactcacctcggttcttgaatcaaaagttgtatggccttgtctcttgaaatatcgacaaaaaaaagaaacacgaaggagtgagttttatttagtgaagaccaaaagaattagaatcgagaatgtttttgagtcgatacaacttaccctggtcccaacatcacgagccgtcttctgcggatatcataggaacaacggttatataaaaatttgtttggtcaaccggatcatcaaaacatgtcctttctatattggttttaagagattataccttcttctcaggaacactttcacctaaagtttgaatgccttgatgaaggatatactcgctatccacaatccctacgtttttcgttcggtctccctacaacattcataccggtttgtaaatgatagaaaattggattaaaaatgccaaactatgcgtaatatcagaaataggaacaagaatggtgaaatcattagcttaatgtaagttcttggttagtaccacaaaatcttgagttatacagaaaaaaggtaacctgtgcgcagtacccaagtttcatatccattccccatccatgaaccaaatcattctacagaaatcaaaacaaatatgtcagcaagtgaataaattacttcaggatcagattactaacttatacaagtaatcaagtgaaaattacctgtataagattccaagtgcaaagccaagcagctttcgaaaacaccggagccattccttcaacaaatctacaaacagagaaaacagaacaaaatgtatcaatatatatagccaacaattcaaagaaattaattcatcgccgaccaaaccattacccggtgcaaggaggatctgagctagtattagaacatcttttatggcctctattgatgtaaactctcctgtgtttttaggcatcatgatgtaaattagtaccaaatgcattgaaaaccaaaaaaagttcctaatgaacaaaatttaacctatgaaatttctttgttttagaacggagagtgattttatggtgtatttcagtcgagttgtggtccaaagccggttgagatatctccagtcccactgatttaactatcttcaaatatctgcagaaaaatagtgtcacttagttctctatcactcatgattccttctagtagaaagagtaagaagattaaacctctctggattgaaattctctactccaagatcctcgtcccaaagaaaaatataatcataaatggatacaacatccggatggaggaatcgttttgcaaaccacctataacaaccaagagaggaacattcataaaccaatgttacacaattgaacatctaaacaaaacattgtttctatgtcaccttctttaaagatgcatatgcatgcttaaactctaccaaaaactagttatcatccaatacaattcgatatcccaagttgaagcagaacaatagggaatagagaatgaggaagataactaccatttagtctggttttgtgcaactatatgtatggattttgaactccactccagatcccaccatttatccatatttccatcataatggaaaagaacaatcgtgaaattcgcgggaagaaactgagacacaagagctttacgttaagaggaatcctctgttcttcttcaatgcctaggattagtatcaactcgagcaaaaatagcaataccttctttacaagagcgtcgacgttacccttttgcttaagtcctacgggtattgccaacaagttacggttagtcatttccacaccctgtgttaaataatcacaacaaacatcagaaactcctcaagctacatagatattcaaagaatatattccgcgattcttgatgcctctaacctttgacctcagactacctctagaccagagaggctttaattcaagatctgatctagactgtatgattccacgaggcaagccttttaatttatcgttaactgcttcagattcctgaacaccatccacaagtgaactttacattaaaccggtaacacgcaacaaatgatgactctcctagtatcaaaacgttaccttagccatgtcaaaaggataatctgtttcttctatctgaacaaagtaagaaagaagtttacttctctaataatcgaatccccacatctcacttaataggattggttccaacagtacctctgtttgttcaaactgaatatttgtggtcttataccaaaagatcaaaagagctgtacacatgagagccaaaaagggcttcattttccacccggatttactctgcaattgtaccatgttccaaagctttagtcaccgaagaaggcaggataaatgagaacataatcgaaaattctatatagtaggaaaaacgcttataccacttcttgagcattggtttttcttttaacaagtgacttcaatgatttgatagacttcatagatggcaaaccatgtatcatattttacctgcaacacaattcaacataaagactaattttgcaagaaaatttataaatcttttcaagaatcagaaaactcaccagactccacactgcctttgtgttctcccaagaacagagaacaagacaccaccacactggtcactaaatctcagtcttagaagctgattttaagcccatgcatgttgctgaaatcagtctgaatttcccacaagaaaacaattttagaaaaatttacttctgaaccttatggtaatattacaaagagaactactactttacactaagcaaagcactaacaataaatgttaaatgcacaaaaagttaaaaggcataataagccgaaaaaactagaaaaaggttttcccagaaaacagcaatgaaatattgaagcggcaaagtttgtaaccgcaaacaaaagatggcttctctcaggtttcacaagctgacctagaagacacgaatcacctggggcctgagaaagcgaaacggctaagcaaatttttacaagagttaaatacgaaaaaattatgatgagaaaaaagggaaagatttattaattgttttagatctaagaagagtaattactgtttttttgtttatagatataacgatgattttaaaaagctcccattgattgcaaatttattgacataaaaaggaatcattaaattcaaaacctctaggttttcgaagaaacagagagatagagagagaatggaatcgacaaaggtcaatgatgaaattaaatttgtcgaaagataggatcttttgttagaggagacacaaatctagagaccctagaaagtaaattacggaacagaaaagaagagaattcaagaattagacgagacctgaagcatgcagagtcactgtaatgaaagtagacaagacaagagccagctcaagagaaagagaaacagaggagaagagaggaagagtttttgtttgctttgcatgaaaggaagacaaaactgatattagttttttatagccacgaataatttccataaactgttgatccattgaaaccaaaacgaaacgaaacctaataacagatattttagttgaatcgggtaacataatcagataagaaaaataaaataaaatcataaagtaataaaaagcaaaaaatctttagaaaagttagtagtgactcgtgtcctactcctatgtcaaatactttagaaggttgacaaaaactaaataaatcaaataatcatgctttgaaattttggattcttcgacctaatacgagacaattttatttattttttaaagaaagaagtcttattaaaaaaaaaaaaacaattccatgttttgcgttcttccattatttttaaccattacttcattgagacaggagtgtctctatatagtggttgactccttacgcaactccgaaacccaataagttaaaaaccatttttttttgttcttattcttgatttctgcaaccaatgcgacttgctaatacacactgtctggctccatccgaattcgtgtttacgttttttttttctttcttttgtttatagatctttcgtttttagatctttttccagtttagattcacttctctattaaaatatttttttctttagaagatctttttttgtttggttggatgtatctgaatatttactagtttagatccaacaacattttgcactaaccggttgagctaatgtaaaaagttgagaaaccccaaaacggcaaatgggataaaacgttaagactaatacttatgaaacgtgaaagtgttagaataatttttaggtagtttgcaagtttttcattgatatttagatggttaacaggtgatctcatcatagaagccatgtaagaaattgaagaaatcccgaaataatgaacaaggtaagaataatcttttcgaattaccaaaagtggaagagtttaaaagtttatacaagtaattgaatcttagaagaatgtgcaacgctatgtgtggaaaatgacactatacaatagacaataagtcaataacagctattggttcggttagaactaccgttttgtctattacaaaatgatattgtagacaaaataagaaagactacacaaagacacatcagttaggaattaaatcaatatgagttgcagttccacggaacaacaacaaaccaagaattgaagctacgtaggccaaaaaaatgatttacaacaaccattagtttccagaatatatagttcgatcccacagcaagagactctgcctttctctctgatatataaaccttagtgagattggactcgagagacacaagacgcttctttgcaacgtacattacaacaacttgtggaccgcttgtatgatcaattcttggttttgcttgccgctatggttcttgaagaactaggtttagttcttgagcctttcttgttattagaccgcctcttctatattcatagcaaaaagaaaagagagccaaaacaagggaaatatgtgaagaattcgatttccaaaagttactcttctatcgcttaaagtcattaggaatgtgatgaaagtagcatgcttaggatgtttaccttgcgagaactggaagaattctttgaatcttgtgcagtcccgcagaacaaatttggcaaatttctagcctgcattgtggtttatttacttttattggtgaatgagaatcagcgtagcaaactaaatgagattccagagagtggtgttagctcaaatacctttcatttgcatgaagatcaacgccgacaatccgtggagctgaaacagttgagcgtataactgtaccgaacactgctacaagcttcaagagcatatccaaggagacatttaccggcctgcacagtcgttactctcatttagaaaccaagtcatgaaatcgttatagctcagaagcaaaaaaatatggtctaaggtggaaatttggtatgatatgtttacctctctgtcctgctacccaataagcttgtgaggacagggaccaattgagaaaacatatccaatgtgagaatttctattttttcagttagaatactgatcacatctgcttgaacctgtcccaacatctatgagttagcttatctaaacatacaaacatcaaaaacaaaagtaatctaccgagaatctgagatacccacagactgatctgtcagttttcttaatgccccaattgcgcctttaacatcgctacgctcccaaaaatgtcttacaatctgcatgtttagaagtcaaccacttgcaaactaatactaaaacaaataatggtcagggaaaagaacagaaaagaagcaagaatgcttacttgtaactttgtcaacctcgattgaagagtgcttaagaactcgttatgggttagcataagattttcagttatgtcactatcatcttccctatcagatatattcggctcttccttctgcacaaagccacaaaccaaacaatcaattacgtttgtcatgtatacagtactctttcaaagtaaaaaataagttgcctaggctaatcattgcaaagtacctgaggcatgttatcgcaagctggttgaatttgtgttgcatgtgtctcatccaatgtcatatcagccacttgatcaatcacagtgggtgtagccaacatttgtgttggactaactcggtgcatggatgctatatgagatgtatcagatgtcatgttaacagattgatttagtttcgtgggcattacacgggctggagaagtccttaatggacgtactgatgttacaggacactcatgagatgttgcctgactgagtaacacaggccttactcgtgctgcagaattcctgcgttggcgccttaatgttacagaagcctcctcagatgtaatatttgtcgcctgattgaatgtcacaggcaatatacgggcatgagaagttctagattcttgtgttaacgctacagaaggctcatcatatgtgacattagaagcttgattgagtatcacaggcatcactggaaatgaagaagtcctagctggttgtgttaaaggaggctcatcagatgtcacgttactatcccgattgagaacaataggcatcactctggctggagtactcctagctcgtcgtgttgatatgacaggagtttcacctgtctgtcttgatgtcttacgcggatcttcctgcactgcattattgttctgttctattgttgtactggctccttcagtatgagtagttttttctcctctctcaaacttctcaactaaggagcgtgtcctccccgagacaacatttactgtaaacatatcaatttataaggaaactgtagccagccaacttaaatgctaagaagaaaaaacagaaacagcaaaagttttaaattcctaacctccttcaacaatcttcacagggttcaattctctgctgccgctagggtactcagtgtctacagaacagaaattttataccggtcaattactaattgatcattgtctcaaaaccaagtacgtgaaccacagactacggatgatgaagaattcgaagcaagttctaacagtagctaaagatttagatagtagcaatctatagtaactagatatagtctagtagctcttcctaatagatgtcttttggcatcgtgggctgtctttttgttcactcatatttgacacaaagccagtcacattaaggttgcataagatttggcgtttgctttaatagaaaaaatggccatatattagtcagttttaatttttgaatcaagaacttacttttctgttcatcgccaggtttttctcgtgaaagaactctttcagttttgctgggaatatcctctacgtctcctgagttctccatcccacctttgccaaaagttgccggatcagcagacattgctcgtcttgtgtcattgtacttgctatttgatgacctatggatacgaggtggtttaaggaacatacctgaggcaaggttgcagagatattcaaaagatagattaaaatatctgaaagctacatgaaactaaagtctgagaacagggaacctacgattcgcttcatcagttggtggttccgatgataaagctttttcaaacttgttagtaatacccttgatgatagaatcttcagcatcaaaaggtttactagcattctgttctgaaagaaacgcgttttgagtttgtggttcctcctcaacagccaatccgcttttctttcgagttgcagattgaacaaccgctgactgttttgattcttcaaactttgctagcgtctttcttacatgtgctggtcttagcaacatgcccgatttcgttcttgagaaagggatagattccctttctgaataagaagattcctctccactatcactatcccgcgatgtactagaatacttgtctcctgctggtccaaaatatgctgcattctgcttctcgctcaccatagtagctacttttcctgattccaaaggcaatgtcgctttcagagatcctggattttgcgctacattcaaatttccacctgtggctttaaacaaagagagttcaaatcagaccaaacataaggaattagcccacataagtgaatgacatagaaatattatgttgatctggccaagaaacagacatcaaagccaaaaaatcacatgtcagctcccccaactattgtctaaagactactttgttccatacaataacgaatactgcgatttgcattttggactcattcatttcaattcctacaaaatttttaagtataaacaaaagagttcacagcactatattgtgacaacatgcttaaagtctagatacctttttgtgttgctgatcacaagagttcctactacagttgcaatggtttacattaaaaacacttctgactaagtcaaaaaccatttcaagcattcatccaggtgccaagatagcaactagataacctcttacatcacaggtcatttatactgacagatgaaggcctagcatatatctgccataccacacttgcaaagcaaatgaacataaaaacataattaacattcactcacagtcgacgtatatgttctttatctctcttgtctcataatctggggatacgctgccccttgggccacttcccattctctcagactgatcattcaagacactaaatcttttcaccatgcattcattcttatcctcagatactgctccatatggctcaagttcctgagaaacaaacacgaacttaatacaagtttaagtttttcacatgaggtatggacattcacattcggttacataccgatatatctgaaacccatatcccaacagaatttcggtaatatgagcaaccaataaactttccttcgttgatgcagaagtcaccaagtgttgaccatcccatatcaacaccgtcccggcaaatcactggttcccatgaataaacctgcattatgtgcatgaacttataatatcagtgtttgactctggacatcatctaagttgtatagttgagcacaaagacaatcagaaccttcaagccatcatccaatccacagaaaagggtttgaccatctggatgaaaagcgattgcacgaactccagtagcctggaaaacaaaggacaccacatgccaggaagaaggttgacaatagtgcaagtaaaactaagtcttatcttatggactataaagtgaatccaacgctaaacaggacagattaataacaaaacacaagctcaggtacctctggtctagtagttccaatcagttcaaacgtttccaaatcccagaatttcacagtcctgtcagcagaacctgaattacgaaagggtggtatatgaagtcagaagacctcaaaacaaacctagtggatgcaaaacagtaatttatcaactaaaagaaagctgctaccaattcagccctaaaacacatgaaaagaaaagctaaaaactcaccagtggctaagagaaactccagcggatggaagtctagggagcgaataggtccttcatgacacttaaactcatgcaatagctttccagcagtcaaatcccatacctattgagtacaataaagagtacattgttataagaacaatcattaaggaacaaaacaatgcacttgtcgttactgctgttcttacctttacaacgttgtcaagtcctccagacactacccaacgaccatcagggctaaattcaatagtgctgatgccgcgagtatgacccttgtatgtttggatgcatcccttctttctggtatcccaaacccttagattggtgtcactagatcccgatgcaagaaattcaccaaatggatgaaactcaacagcagaacaattggatctgtgtccagtaaaagctcgaaccactacacttcaagagcaagagtgaaaatattagacctcattatctgaaactaaccatccatcacaggacttataattcgtccagacaataacaagtgtgagtgcctctaatataatctagggataatatatgagaagagaaaattaatcagcttactctttgattcttctagatcccacagctttatcacacctgaagaagccccagcgagtaccaaaacttcttctgagttaaaagctactgaatcaaccgggcttgtatgcccacaaagactctgccaacaacacataaaataaaatatcatcactcttctatgaagagaaacaagatgttacatgctttataccaagagggaccacaattttgacattttcatacacattagctgaaataactgtagttatagctataagtggcaaatcttgaaaccagataagaaattgcaaatgaagaccagcgagaatgaacaaattaaaaaaagagagaaatgtgaaagagaccattggagaagtggttttgccgattgaccaaaggttgaccttataatcatctccacctgttagaaggagccgtgacgtcttctttccgatacttagacaattcacatttccagaatgtgccacaaactcctctaattttccaaatccaagtcaagaaaaattcatatccagaacgaaagaaaaagtcaagacaaacagagataacaatgtctcttctatcatctgaactcggtttggtttttaagatgacagaggcagaaattagaacccagaagaacattttcatgaaaaatctcaaataacaatttaccaacaaaaaaaagaacataaaccccaccaatgcagataaaccctaacgctacagtgaatgaacaacatcaaatttctaaagttaggggtgaaaataaatcaaatatgtagctaaagtttgtatcttttgttattcaggttacaagtttccaataatatagcaccaatgaagaactataaaaggatacgtagcttatatccacgcttcgccattttctactcgatttcagtagattcatgcgactaggaagctgaagccaaatcaccagcctttgttatgaatcgaaaagaattaaaaacaaaaaaatgtcggagctggtttaaaaattcaaaatgtgactagacgacaagacagagttgaagatttctgggagattcggaaaatagaaacttgagacataagagattgcttcctgctgagattagagatttaaagaagaacttagaaagaaaagaagagattttttgaaagagtggcacgagcagacgaacaaaacagagacgaagataaaaaaaagtaaagcgacgaatttttcgtcctttttctcagattctgtcattttcaattctttattaaaaaaaaaaacacatttccggttgttatgttttattttattttgtttatttatgtcattgatgatgagaataatacacacacaaatcgttgaaaacttcagaatattggaccctcgtcgttactttttctgacgaaaatacccttccttttctactacacgtataaatcaacctaaatataaatatagcactcacaagtcacaactaacggattacaaatttaaaatattgttttgtttttttattgtcggttttaaaatattgtttttatcatgattgagtaacaggaaaggaaaaaaaaaaaacaaagttaaaaagtactatgttcagtttgacgaaaaagaaaaataacaagtattactggttaatcgcaatacgttttaacactttttttaagatgtcaatcacacaacttgattgaaataaataaaatactcgtcaactaattccattttaatataaccaactcaacggcctgaattaatattgaattttataccacattgaatttttcgtataaccaataatacacggatacaatctactacaactagatcatactaaatgactaattaactaccacttcttgattctaaaaaaaaagacaatgaaaatttcaaagtttggttgtggccttgtgggtagattaattgatctgaaagaagaggttgattgaagtttgatttaacaactgttaatcacgttttgaatatttgtgtttgagtgtttttgttcctacgacacatgtatttgcgtttaaacgttcaatacaatgttcacacttttttggtcaactgttttctcacttccaaaatgtaatcatatagtagtaagatatttttttttcacattataaaaacccaaaaagataatcacggaatcaaggtttgtaaaagttatatttggtgaagatctcctggtttatgatatgtgacatttgcttgtattgtattaaattgtttttttatagttataaattattactctagttcccgtgttataatttgtctctcttttggacaagagcataacatgatctaagtgcttcccatgttttggtgttttaagttttcttgcataataagggtcaatcccaatcaacgactttatttggtgaagtaaaaagaagatcatttatttcgataagaaatgtttgttacttccacagattgattgacataaaatctgaaatcaactcaaacgtactttatgaatattgaaaagtacaattttattatgtgatatagtaaaatagttttagattgttttttgctttcattatttagtagtcactaacttcttgttttggctagtattcatgtataatcccaatactgtatatattttaagaaaagctcttctcgtctcttccaaacacgtcaaaatcagtaggtagatttgtttagatatgagagattaaactttgaaaataagaaacttttctccgagacaaaggacgttggtaaaatgaagctagagactttgttaggggatcatattttagcagaccgcgggaatagcgatgtgagagcaaaattgtcttgttcttgcataacgccacaggtgtggatggattaaccaaatcctgctcgtcccagtaaaattcatcacgaaactgagtccgggaagaagaacatgaaagcaaatctatagtacaaatcttctcccatgagtcttctgatgatttcaacctccaaatctcttggaccaacgtattcggttctcttttcgacatgcacaaaccattatccagagtgcacatgtcaatatgcatcggatctgaaccagcaatagccggtttgatcttaggcagcaaccggaatgattcggcatgaatatcaaaagccactacttcgattttatcattatatggctccgtcaaccaatatactgacccgtttgcacatgctggtatttggccatgaaatatccgataacttggagtgcaagtcaagtctctccaagagtttgccctaaagtcaaaaacctcgcactttgtaactccctcgtttggactcaaggcatcagcattgtacttgtcagaattatacaaccacactaatttataatcattggccttcacgaatgctagatgaaagactgacttcatgtctaaccaatctctataagtggccttttgcatcaaaatctgaaacctagctggaggaagttgtcgtaaccaccgtgtagccggatttactacatacatggcttgcgatctcggtgaatggacgcagaaaaggccatcgcagcatccagaaacgtagatatagttggcgaaactttgagggaaattgagaagaataaaggatagaagagaacccgattccaagcagaataacctaaaaccaatgtctgcgtctggacgaggtcgaggcaatagttttaggggatctttttcagtgatcaccataaccctaggatgatgtgcatggaatcgctcggcgatctttaagtgtctctcttcgaaggattgagactcgatcgtcgatctccattgtttcgagagagttttgagtcgaaatagtgctttcactggaaatcgtaagaagatttcctctacgacgtcatttggcagagatgatggagcaatcactggcttctcgtttcttcttcttctttctttttttttcttttttttttttgaaagaatgtaaaattatattcaaacaaaaaacgtttatacaataaatgctacttcatgctgaaatttagaagagaagtagaaacagagtttgacatagaaaaacagaacactcgggctaagaggacgagcgtgtggagaaccaaagctgcaggccatccttgtaacgatggttgctagtggctgtgattgtgctgagacggttccgtacggttccatcgattagcttgatttgtcgaattgttgtggtaggtatctcgccgtgtcgtctagcattcctctcgcgccatatatggtaaagagtagcttgaaagacataacgaagcagaaagaggtggagccggggagtgcttgtgttgtgaagcattgcggtgagctggtgccaatttgatgagtagtttgtttgaagaaggcgatgtgccaagttctcccagatcgttgaggagtatgggcaggagaagaacaaatgatctctcgtctcctccgtgttcgtacataagacacagtgtacatgctgccccgtattccacttcttgattcgatcccctgttgctaatttattatgaattggaagccacgttaagaatgagtatttgggcgtagagtaagagaaccatacacctttcgaccaaaccactgttggatgtgtgcctctaatattattccaagtgaactttgttgagaaagttgtcttaaacttatctcccacaaatctccacatcgagatgtccttctcatttattctgatccgttggcgagtagtatgtatctcagcttcaattctgttgagaacgtcaactcgatgctttcgacgccgtcgaggatgtagagctgtttcaaccattgcatcgagaggaatacccaaatcaatgactccacgaggacctgttatatcgatcaatctgcccaactgtgaccaattatcaaaccaaaaagaggttgagctgccactcttaatttccaccttgtgcatagtcttggcacaatctctatatttgaatagctttttccacatccaagaacccatattggagctctctttaaccaaccagaatgacccttttcgtatgagatatttccatatccaagtaacccacaaagactctgatttggatagtatcctccataccaatttcaaacaactaaccttgtttgcctctactagtgatttaattcccagccctccctcatttattggcttacaaatctcggtccaagcaatcttagctctgttgggattaagatccggtccagaccacagaaaagccgcacaaatcttctcaatttcctttaaacaactgtttggtaatcgataagcagatatccagaagttggtgatacttacaagtactgatttgatgagagtaaggcggcctgcgtacgatagtgctcttgcagtccatgagctgatttttgatctaaccttttctttttattattcttcttatctttcttctctttctctttctttgtgttgatgatgcaatcaccactcgattctctgcctcctccatcaataatagtattgcctctatctctctctgctgagcaaatatttatatctcaaagggataaaaggaacaaaatcaagcatttaagggggtgtattcaatcttatattttgagtgatttgaggtaaattgagtttttctatgtttttatgattttgggtggatttaaggaaaccattcaaaaccacaatgccacctaaagccataagatttaaaaatctcttacaatcattaaaaatctaatccttaagttttcaaggacatgaaaattttgagtagattttcaagctttcaataacactagattttattagattttattagaccttttaaaatttataattaaataatattagatttgctattttaacacccccataattctctagatccctcatttaattctcgtttatatttttccatcagtaagaatttacattttctatagccatttgagcaattatggcaagtagtgatcatcctatatgcaaaaaaattagatggcccaatttcaaaaagacatcagtgaaaggagtttccgaagagagcaagcaatgaagcagagatagaacctggattcaaaaatttcataaatagatcggagagtgcgaaaacgtaatggcataaatagatcagagattccacaatttgatgatgatgaagaagcatagctcttgtggtatgacacgttggcatgacatgccaaagctacccgcgcaagatggaggtgaagcagggactcactctgtttgctaggaagcaggacatgaaggttcttgacgctgaaagcggacacgactttttgtggatctacttttcattttccttgctatccctttggagtctgtatgggaaatcactggaagcaatatcgacctagtatgcattggcaacttttgtagaagcttgaaggacttgagctctaggggaggcacagatgcatctactaacacatgtatgcttccttggcaatatagtttgcagaaaccgttgcttggggtcagttatttaaacagtgacggtagttctcagtcgacacctcatggtagcaatgggttagttaagagaggggcaacatacattgtctcagatgatcttactatttgcgtaaagaagaagtttgatgtgaacttggacgatatttttgagcatgaaatcaacattggcaaaacacatgtatatctatattactattctttcctgatatttttttttgaatctgacactaatccaggccataggtttactaagagcctcattcgtgacatccactgccttgactacggctttcgggagctttctttcagagaaacgactctaaagcatcaatcacatgccctctgtggagcagattgatttgaagtttaggttttgttgtctacagtgctagttgaacaagttaccttctcttttacactactgttaagtacaaccttttgttcttgaattttaatgtcttttgattcaaaaaatgtttatccttttcagaaaatagaatctaaatacatgatcaggttggtgaataatgtttgagccggtaatgggattggggttacataatgatgatcccatagctcatttcatacagccaacaacatacataaagtgttattataatacaaaagaaatactttcattcatcaaaggacaaagaacaagaatctgacaataaactattgcttctgcgtcttagtccaaggttgtgtatcttagatcatatgttgaagatcttggactatttctgatatcggcggtctaaatcctggttccatctacagacaaagataagcatgcacagaagtcaaaagggttagttaatattctgatgtcacgtgtttgacattgctttctcatctagttaagtgatgaatgaagttaagtttacctgcagtgaacgtgatatgatatctgcaaaacgtgacaatgatttcattggatacgctccgtgtaatgacggatcaaccattcttgtcaacgcatcgatgtcatgaagccgaggaatcgcccactgagctagtgtttgatgtcccctcggccttgtcctgcaaaaaaaaacagggttttgtcttgagatagtgtagtacagtgattttgcataagaaacataagtgaacatgttgacttttgagttcagactcttttatggcttctattagttgtctctttagagtagctaacctgtcaaatggtctgcgtccagtgagcagttctaacattacaaccccaaggctaaatacgtcgctctgacaagtgtagcttccatactcaacctcaggagcggcataacccgccatctacaattttataagcaaacatcatatcctttacaacactcactcttatgtttgggatcttcaaaataagatgacaaatttacctgactcgttgggcgtggtggtaacatataagccaaaccgctgtctgcaacacgtactgagagctttccatcaagaagaaccttggaagacttgaaattctggtgaacaaccggcggttgacatacctcatgaagaaacctgaaaccaaactctaagatcctatatgttccaaatatagattggcgtaacatgttgaggttctttaacttactgcaatgcctttgaagctcctaatgcaatatttatacgtacattccaagtgagcttcttgtgcaacttgcgatccaaatgtagtgcatcttgaagtgatccattaggacagtactcatacacaagtaacctttgaccaaactcgttacagtaaccaagaagctccaatatatgaccgcgtttaagcttcaacacattggagactagattgaggaattcgccgtcactctgtgttctgttgatggtattgctcagcttcttcaccgcaagaaactatagatcacaacgtgtcaagacgtaaataagaatgcacagcataaaatactgtaagaccaaatgacaaataagaggaaagtgtcacacctttccatgacgaagctcagctctgtagacattaccaatcgacccttccccgattatattctcttctgagaaattatttgtgtattgctgaagtgaagcaatggtgaaaacagtagcagaagatgaggaattcaagcccggggggaaatgagccgctctctttgaagcagtatcattggactggaactgcctcggtggttgttgcagcggcttttgaggtgtattaacatccttattataatatgaagtaggaggcattgctctccggctctcttcagcccgctgtggcattggatacccatatttcctgtctccagctccatatccatcgaaaggcttaaccataggctcccgagaaactgcaacaaaagaaaacaccacagcagtttgccgttaggtaatgagccaaagcacaagtttcttttcttttcttggaaggaaaagaatcagtgtaccttttcccatagtgggggttggttgagatggaggcttattgaagtatggtcgttgtaaatctttacgagctccactgtaatatcggttatatattttacttctgcaacatctccaaagtgtaacacacaaaccggatacaagaacaattatggccactgaagaaactactagaatgattctttgagtggaccagaattttcctgatcctgaacctgaaggaggtgatatttgcaaggtaggttgccctgacacagagttccagggatctcctcctccattatcagaagaaggtggtgaccagaccagaggtggtgatggtggtggatgttgttgtggttgcagtggagcaaaaggagcaaaaggtgctgggggaacaccagaaacaggagggatacggggaacaggaggagcacggtgagtagcgggaggaggatcaaccacaggcggaggcggtggtgttataatcgatgtattgaacggagttccatcttttctgcggttataatgacaatgtaacatgaatggctaaagaaaaggaaaaaaaaaacattcaagttttcttttagtaatacttacttgaagtttggaattttcaatagatttggcggtataggtcccgagaataagttgttttctacattcctgaatcaaaaatatgaaaagccatagtgagatactgaagttggcttaatggttggagagtcaagaacaaagagtatgcaaggtgaaaaacgattacaaatcggttaagaaaagatcctctataacatcaagtgttcctgtgagcttgttgtcctgcaaatacctacagtccgaccacatcacatataaaagcaatgataacaatgtttgtatacggtttcatatatgtgcacttacaatatcttaagagaagctaagtctcccatggaagaaggtaaatgcccctccagtatgttagacgataagtccctgcattagaaacttaatgtataaatgaaagacgctgatgggaggatacaaaatgagacttagtgaggaggaaatatacagttttgtcagttttgatagctgctgaaagtaatctggtatctctcctgatagaagattgcttcccaatgacctgaagggaaaagaaagagtctgcttcaaacagaggaaaaaccgcagatgcaagaaacggtatctacattaataaagacttacagttcagacaaatcggatagaaaggacaatgtaaagggaatgttcccagtgaagcgattgcttgagagagatctgaaacaagaaaatgaaaccaaacatgaagtgtcttttaactgttggaaacataagtattgccatacacatagtcaattctcaaacgcacaggtttcggatggaagaaggcaaagcctgcggaattgtccctgaaatatgattgctactgaagtccctgtccactcaaacaaagaagagagaaaaagtatcacaaagcaattcaagattataaccaaaccttatagtcaatggtaacaacatcttgcatgttcttcacatagcaagaagcctcatacaaaagatgaagatgaaagaaaacaagacaagaagctttgcttacatgacttggatagatgaaaaatcagccagagtatcacttaagcctccacctaccttcatgccaggtatccttctgcagccaacaacaataattcacgtggttagaacctgaattggtgactcaaagcaaaccataacaaagagttacaagagcagaagaggaagtatacatttctgtgatgtttgaggagtcacacaccacaccttgccacttttctccacaagggtctcctccaaaagcaagccaatgatgtagagatggtgctcccaaagtgatatacaagttattaatcgccgaaactgcagaagttattaaacaacagacaaacacatcaaaaagtaaaatttctagagattaaagaatctttcttatgataaccatttaatgaagaacaataagaacaaatttcttggtcttgaactaaaaccctaacaagagcttatgtgtcaaaaacctaaactttttagggtttttgaggtagcctcaaaatcatagaactttgccaatctggagcttcccaaacagctatattgcttacctagtttaccctaaaactgatgtaagtcattttcactagacacaagtctaaaaaaaatctagagtgttcactaaaccaaaagaaggagagtcaaagcaaaatccaaataaaaaaaactttgcagagaaagattattaccatctcgtagattagtaactccagctgagaaaggcattgtcaaggctaaaacagagagaccaaagaacacttcccatcttgtaaagctcataacttcagccactgaagatgagaaaacccttgaacttggattagattgtttctttccaataaaaaacgaagattcagagggaatgttatggaaaaaaaacacgaggaagaagaagaagaagaagaagaagaagggtgaaacagggatattcctgattaaaaggtaaagtgaatcataatttcgtcggatttttaggagagagagaaagaagaaaagagatgaagagtgagtgagagagaaagagtgtagtgtgttttgtctcgaagaacgagcggcttacaaaagccaacggctttgtttttctcagttttaagcctttaaggtttcgtctccaaagtgtgaaacagagaaaacttgccaagacttgtctctctttatgtcttttaattgtcgcttctatgcttcatctaattactatagtttcctttcatgtaataattggatttttctaatgccataaggtagagagatagaagtgaatattattttgatgtagattacatattccgttacttcacctattaaaatccaaataatgtaacaggcagagtttatcacacttatttcagtgagatgggccaagaaaacagttgaagtaagaaaagctctgagaattctttaatggaagaagagagtgagagaccctacaacaaggtcaaaaaaaatatcatcatattcatcccacgtccatttttgctcttttggtgataaaaatgtgtgaattagttttagtaacaaactaatagcaacaaactatttgagaaaactagtacttttacatggtttggaaattgatttcaattatacatcttagtgaatcctaatatatgtttttaaacaattagagccaataaagggttttttcttacgactttaaattgaatatacttagtaattatacaataattatcttttcaatatattctaaaaataactaactaatgttatatgtatgattgcacggtgcattttggttaccattcgaaacctttgtttttctattaataattaagaattctggttttgtgtttacagttacaactaacaatcactatttatcaatttctttggaatatattcttaatttgtattattctttgtttgttggttgatgtgatggaggatttgtgtacaattcaatagtagtaatttaatggaatgccatcattgcataatttgagatgagagtaacttcgatattcatatgtgattacttctcaagttccttttttggtaggagttacttctgaagttctgatattcacataaattatttgcaacccgaataataacagcaaacatacattgtatgatcaataaagaataaaacatgcttggtgagcttatgtgttgatattagatttttattttgtcgagatcaattaattatcaatcgatttttttggcttgtcaaaatcaatcaagttcacaccatacacgataataagttgcgactagttaaaaaaaaaaaaccacattcttatgggctattcaaaccaaatgtggcccaaacttggtcaatagtgtaatggtaaagcccacttgaaagaagatacctctcgtaggcctaataatgcaatgagattgcaacggttactttcaatctttgaagaaaagtagaaaactatcgtacatgatgcttttttgcacccaaaaaaaatcgtacatgataacatttttttttttcaaaaccaatatgccaagtgccaaccataataaaccgaaccaaaatcaaataaataataccgaatcaaatttttgtttcgaccgaactcgacccaaaactacaccaatcaggttggattcattttgattcttgtacttcaaaaaatcagaaaccccatataataatgattgtagcacttatacatgcataccaaattagttatgagattggaagatgcatgataatgaattcaaactattggtctcttaaaaaagagtgtcgaggaaaaaatacagatattgtaaagttaggctttattttataatatggtctctcattacgcaaaaggcgaaacaaaattaaagaatgcaacactactttatggtcacccgttagccagaggatccaaggcacataacgaatgttttatttatttaaatcaaatctagttacgtatctacacgaattttggttcaagttttggttttacatcaccctagctttttccgccctaccattttacatcaagaagctt

SEQ ID NO: 34 - DNA, 84797 bp, Arabidopsis thaliana
aagcttgttttgggaagagaagttatttgttgctgcaacgatcgtgttaagatcaaataaaggtaactcccggtttctcgccttgtcttgttcaaatctaaatgattcgtcaaaatcaaaagggaccggggcgaagtttgccgaagagcttctatgcctgtttgactctgcacttgaacatgtttcaagtagttagttgtgagctaagatagcagcatatcatcttaagagattcatcatcagatattcacttacttcgtcgctcccttacaacacagaacaaaatgacagttagtaacattacggctgcaatcaaactgataagaatcagaaggactctcctcttccctgataagccatttctgttccaccgcgctgaaacaagcaagaaactcagtatttgaagtacttcgatactaaacattgacatgtttctttattctctttgttttaatgaaacagagtggttgttttatgaagagcaagaacgtagaaaatagggattctcatttatagatgtgtacctaactcttccttgtctacacgtatgtagaaatcttgtcccgagttcaagtatgtccttgcatccaacataccaccatgccatttcaagcatcctattgctcctcttttactctcgtggtaagcacttgcgtaagcgacacaagagcagttcttcaagcacctctgtttgcactccttcaatgttatgttcatatccacacttgcatctgatgtgtcgggaatcttcatgcgctttaacttcacaaacccgtctttctcactgcatattgaagctctctttttctttgtacacccgccagaagagtccctcaagaaccaatgccggggaaacttgggctcaaaaccaggtaggcatgtgcactcaaacgtttttgagctaggggaatcacagtaaccgttagggccacaatgagcgtagttatcgcactgctctttaggaactgaccagaaatcattccatctcttgtccctcgcaatccatgtaaaccggtgcatggttccagtctcgttcaccatggttcttgttatgaccgaagcatctgtcacaccgtaagtgaaggatacttcgtcctcattattcacaaatgagttattgaagatgtaccctattggcatttcaggcaccccgctccacctatgcccggtccatgaccccatacgccaccatggggttacacctttgtacagaatcaactgtggaaaccctctacgttccatccgcagtattaagtctccagaaccagggtcaccatgagacttccatgatgttagagagcgatccaaaccgtcttttcgtgtgaatcccaatctcataaacggaagaaacgtgtctgtagggtgatcaaagctctcccagaaacttctccctgtgactggatcaaacagaacaaggttgcctaaatcagagagtgtagcaactaaagttggttccaacatactatctgaaacatttgttgaccagataagctctgtttcattgtcagatgcatagacagagagattgcctctgttgctgaactttaccatcccagaggtgtcattaataggatggtctctgtttgcaacccaaacaatagtctgttgagagatttgagcataccaaatcccaacataccggagctctgaatccccaagactgaagaatccaaacgcgaatctcttccctgcggagagtataacctcaccatctctcaaggactgtcttctcataattgtatccacagagatacaaaattggaagaggaagaaaaagaagataacgaagacaaccttcatatttgtgtttgtttcagagcaaggatttagtgaaaatgtataaatgctgtgtaagtattgaaaaccaagtggatcagtcattaactgtgagtcacgccccagttccggatatatctcaaaggttggactttcaaaaagatgtaagaactgattcatgtgacttaaaagtgtgaaactaactaaaagaacaccaacaataatcattaattacgtaccaaaaatggagagttttgttggtatcgagaaactcctatgattacatatctacattctgtgtatttgtatgtgcaatgattggactaaagagcagaaactgtattccaaagaagtacgctcagatgctctgtctacaataaaacatgttctatatttatgtgacttcatacaagaacatgaccagattctgaattttagttcgtaacctatagattactcttacatacagatatacaacttaaacattttttcatcaaaattctttagcagtaggtttatctcacttacagagctaacgtcctgttatttttgtgaggctcacattgttgatcgatgctcttgggtcgctttgtcccgaggattcaacttctgaagtgccccttctaggtataaatgcaggttgctttggctctggaaggtttgagttctcgctacttagcatccaaatcaccgttgcaacgctcggcctatcatttgcgtgatcttgtacacacaatagtcctacgtgcacacatctgcgtatttcattttcaaaacactcttcaaagatgaccggatccacaagagcaatatcttccccggtgttccagagtttccatgcctggtcaaaataaggagataaagtttcaagaatggttcaaaagctttaccaaaagaaaggtcgtggttttaaaatgagacttacataagctgaaagatttggattctgcccatcattgtaaaagcttgagtttcttcttccactcacaatctctaagagtatgactcctaagctgaaaacgtcagatttctctgagaacaaccctcccattgcatattcgggtgccatataaccgctgtggtgttatgcttttgtcagttacataattgacaatcatcgaaaaaagatcagaaaaagctgtgtaagagttagttagggtggctactcactatgttccaaccactcttacggtgcttacttcatcctcattcccctggaaaatcctagccagcccaaagtcggatatcttcgggtttagattctcatctaacaaaatattgcttgcttttagatctctgtgtatgatcttcagccttgaatctctgtgaaggtacataagacctctgcaaatcccatcgattatgttaaaccgcgtcttccagtcaagaagtctttgcttcaccgggtctggattacacagcaacaaggtgcacaaacaagactagcattaggttctgttcatgtgcctactaagactgtaacagagttaaaccaaacgataagttcactaccaaatagatatgcgtctaaacaattctctggcatgaactcatagaccaacatcctctcttctccttcaatgcagaaaccaagcaatctcacgagattccggtgttgcagctttgagatcacgaccacttcattcacaaactcctcgactccttgtcccgatgttcgcgaaagcctcttcacagcgatatcgagcccttcttgtaacctcccctgtaaatgaaagtagagcaacttaacactccattgtcactttgaaattcctcctaccaatgaaacaaagaattgtttaagaaccttgtaaacagcaccaaatcctccttgtccgagcttgtttgtgatagaaaaattgttggtcgccactgctaacacttggaactcgaacagtggtagctctttaagcttgtattgattcacaaggattgcaccaacgtcattactacttaaagcttccattctctcattaagtagccttgtgtttctgttcttctctgttaaacaaagcaatgcaaaaagttagttatctaataatataaaatcatagagagatatctcttatatagttggaatgtaacgctaacctctatgcttagcgatcttccacagtgctaagacaacagtccctgcaaacaaaaaagcgcctactagcaaagttactgtgatcacaattgaccgattggtccgcttttctacaaaagatttggtgcaaatctgttatgatctagtaaactaagttggatggaaaaatgaggttgatactacacttactaaactctgaatctgcaagacgaatgtaaaaaaccacgccagtgccagaaaactcctgcatatccatcaagtttccgctccaaagaagacaaccaatccctctgtcgaatgagtaagccgtacaagaacagttcttcagacagctctcaggacagtcttgttcattggctccagatcgttgtggattgtggggcactttcatcttttgcactctcacaaatccatcactttttctacttccatcgttgttgtctcgactttcgcactgcaatggtgcctttcttacgcatccctgagtccagtttccgttgttccactccgcgtaactctgtggcttaaaccctctaatgcacatgcaaggcggagtcgacccgggattgaatctgcaactagcgaattggccacatgtggcgtatgtatcacacttggtcgatgggacctttaaccaggtcttccattcttggatagccacgttccaatctctctgaaacacgcttccttcggagtccaagagaaaatgatacaacaaagtatttccagcataggacatggagacagatcctcgattgtcactactaagggttaactcgaaaagattgatacggtaatccatatttggtaacccaatgaagtattgaccattccatggaccgctacgccacatcagaagatcatctttccagacaacaagttctggaaatggcagaggaatcaaacctgcagagtatcgtccaggcgatggatcaaacgggcttttccaagatcttagcttaaggctcctgcctgttttcgtgtcagtagcaagactcattgttggcaaatatatgttttgaggatgctcaaagctctcccaaagaatctcatccccagtattagtagttcctagcagcacgaggttccctgtattcagcaaccgggcatagaaggtgttagcagccaccggcaccaagacattggtggaccagtgaacctgtccgcgaccatccataacaacaagattcccttccttggatatggaaaccattccggaagagtcattgatcgggctgttactgtttgctacccaaaccacggtttgaacaggaatattattgaaccatatccctgcataacgtcctgtggagttaaccgggctgaagaaaccaaacctgaaggtgctgtggttggagacgacagtctcagagtccctgaactcgctagaaaacgtgattacatcagtagccaaacaaagcctcaaggaaaagcaaatcaatgtaagaagaagaattagcaaacaacccatcttctcagcaactttgagagaaacgtagagctttaagggttgatttaatcctaagacttgaaataactttatgtcatctaatgtttggtggttacatttaattgccactggcagaggcaccacacttgacttttccgctcagaaataattggaaagtgtgatggggccttacgagcatgtgtgagataggggcatgcaaggagtcactatcagagacaacttcacattttgcaaacttgaaatcgaacttggaagccgttttgaaaccaggtcgcgcaacaacaggcaacaggagctcatgaaatcgacaaatgcaaacaaggatttaccgattccttaggtaaatgtctcttaactcttcaaagttgggaatagatagtggacgttgatcataggaagagagttcgctgcttgagaatagggacaatgtggtgaaaatgttaatgatgcctacatttgaaaccatcagagatgctttctatggggaaaactaaactgcagagagacaaaatagaacttatttgagactgtacaaacagtgaaacttcggaaccattatcagtctttttcccaaagatacaaacaaagacacatcggtaccattgatcttatgaacttccacacagtcaagagaaaagtcagaaacaggacaagacaaatgtaatggttctgaaagatgcaagcatagccatttcatggtaaagtttatttaatggtcattactgacaagatatattatttggaaccgtcaaagatgttattttgtaccaactattcaactgcagagatatacaagaccactgaaattcttttcactgctttttcaaagacaaacaaaagacatcgaatccactcatcccaaattccatagagtttaaaacaaaaccaagaaacaagagaatacttacaaaagagatctagaataccccaaaccccaaaaacaacacaattaagcacactcaagaacacaaaccaagggcaaaggaacgctttcttttctttctaagtctccttagggaggtctccttctgcaacatgaaagcctgcacaagatcagtgatcacagataagacatcattgattgatccaacttttgaagaaataacttgacatatccagacatcactgagacaaaaaaaagtactcacaaacagcaaatctctagcatatcaatagatgcatatgtaagttattggtcattaacatcaagagattactgaatacaactaaagcaatgatatgcgcaaatgttcaaacatacacacctcaagcatcaggaataaaatagcatcttagtggatcttcctaatatccaatcattctaaaggtcaaagcttgatccgagcagagtattactgattgtatataatattcctaagtaaattgaaactgacatgcattcaaagtcaaccttgctgctactgcttatccgaagcatcatggtactcatccttatctccctcttcttcagccacctcaggcactgtatgaagtttatcactgtccatcagattctccccaccactgtcgccggatttctcatcttctccatccttatcatcaggaaatctaacaacaaccaccggacaagcacaatggtgaactgagtaatcactgacactccctaatctccctttactactcctcttcgtagcaccaaatcctctactacccataatcaaagtacttagccctaacctctccacctccaaacaaagcctctccttcatatcgtgatccttgacgatatggatcttaaacggaatatccgcctcaaccaaaggctgagcaacgtcgctcgctttcttattagtgacaatgtcgaaatcgtcctcaagcttcctctgcgactcttcgttatttggatcccactgcggcgacaaatccatagcgccccaatcggcgccgtaaagtacactcgtcggttgaacatgaaggagaacaacggcgtcacctgatcggagatagttctgaacagcccattgaactgcgtacgcactctcgtcgcttagatcgacagcgatcccgatcttacgttgagctccagcagtaggtgtgctgatcgggaatctgggagaagacggctggacggtgacaaccgtcggtgatttccggtcggatctcggagattttcccggagaagtcatgattccgctcactctctctctcggtttcttcaattgactctgtacggtacggtatagtgacagcgactctttttatttttgtactcttttcttatgagaattggatattgttaagaaccgttagattgatcggtttgaagatctaacggctgtaaaaatatataaccaaaaccatagatattctccaatggtaatatatagtcattctaattatataattaaaacacactataccaaaactaaaataacttttatttattttttcagataataatctagaatcaccaaaaccatagaagaaagatttttgacaatagaaacatctttgaagagttgtgggctaggagtgaaagttaacagctcttctttacacccatcccccatgtcaaacgtacaaacaaccctttgttctaaagtgatatagtccttggatgccaaagttgtgaaggcgtcatcaaaacaatcagtagctttgtcgaacatttctgcacatacatggtaggaacctttagcgttgggatccgttgtgcttcttacgagtgcctggaattgtttcagcatatctgaagtttttcgagaattataagtaagtatatatttggtaaggccatagaaatccagtgatgcaatttcaggggatgagttcaggaactcaaagcacaatgaagcattggtattggcttctgtatgtgtgcagatactgttgatttcactttttgtaatctccgtactaaatcttgcagatgatgaaacaacaaaaacaagaaaaaaaaaactatatgaattaataaacaacttttgacgtttgaaaacatttttttgttcaggattttagagaattatgtgtgatttgtatagtggaaaggggaacgtatctaatctagagttttaatgctaacattgtgctaccataataagatgatttacatctttaatcaaataataataatctacagttttaatgctaacattacgtatcttcttcattatattagtaataactaataagtaatgacatgattaacattaatagcaataatatggcaaagattcaacggtttcctttttcgtaatttagatatgtgaggttttacagtcgtagatttcattcatgtaaaaataaaggaaatctgggatgaatcgcacaaaattcttattgctaggtaggtgaataaggtaggtgaatagtgcaaaataaaacaatgtgtaattttacatcaatggcaatatggcaaatattcaacggttttgtgagctttgaaaattttagattttttacgaattttgtataggtgagatccctagtcgagtatttacagcgactctttttctattttttgactctttttttttatgagaattggatattgttaaggaccgctagattaatcggttataagacctaatggctgtaaaggaggggctaaaaatccagtcttaaaagtatttgattttttcacaattctgataataaaatctaaagatcatatccattggttgaagattctttcaagtcttaatatcgcctaattatataattaaaaattaaaaatatataggaagaagtttaataaatcatgtgaagataattgtcataccgatttctcaaaagtcaaaactttctcataatgagagatccattaacttttctcaattcaatcgtcgatatttttgtagagatttatgggatatcttaaaaagaggcaataacaacactaatataacgttttttattttttcagaaatagtttcacaatcaccaaacccataatagacagatttttgacaatagaaatatctttgaagagttgtggattaggtttgaaagttgacagctcatcttcacacccagctgccatgtcaaacgtacattcaacactccattccaaagtgatatagtccttggatgccaaatgtctgaaggcgtcatcaaaacaaccagtacctttgtcaaacgttcctacgcatacatgataggaacctttagcactaggatccgtagtgctgtttacgagtgactggaattgtttcaacatatctgaaaattttcgagattcataagtaattaaatatttggtaaggccataaaaatccagtgctgcaatttgaggagatgagttcaagaactcaaagcacaatgaagcatcgacatctgtatgtgtgcagatactgttgatttcgctttttgtaacctccgtgctaaatcttgcagatgctgaaacaacaaaaacaagaaagaatactatattagcaaataaaaaacaacttttaacgtttaaacacattatttttgttcaggattttagagaactaggtgtgatttatatagagagggggtgggggatcggacgcatctacagttttaatgccaagttgctaacagattgtgttaccataatagtctttgaccaaataataataaagccttttcgagacaaaagaggcttacgtatcttctttatactaataacatgatttacatcaatagcaatatggcaaagattttcaacggtttcctttttcgtaatttttagatatgtgagcttttaaaattgtatatttcattcacgtaaaaaataaagaaaatctgggatgaatctcacaaaattcttattgctacctaggtaggtgaataatagtacaaaataaaacaaaatgtaaattttacattcatggcaatagggcaaattcaacgcttttgtgagcttttaaaagtgtatattttactcatgtaaaaatagatattttaatgctaacagattgtgttaccataataagaagatttacaaaccgaaatcgtaatcaatacgaattatatacggtttttatgattttaatttttttttataaaataaataatcaaatttaaactaaactaaaagaaatttgcaaaactacccttttttactaccctttttgcaacaatatctttttatattgtttatttataaaaaaaatccctttccttgaacaaaatgaccaaattaccctcatctaataagaacatgtaattggaaactgaaagttggcgccaaaatttatttttcccgccaaaagaaaaaattccaccaaatttcttttcccgccaaaaaaataaaaattcccgcaaaaaaataaaaattcccagccaaaaaaatgcttttaaaaatccttgtaaaattttttaaaaactcttttaaaaaaccttgtaaagttttttaaaagttttgatagttgctaaaaacccttgtaaatcattttaaaacctctgaaaatctttataaagtctttaaaaacataagtaaatactttaaaacctttttttaaacctttgtaaattattttaaaactttttacaatagttttacaagatttacaatcgttttttaaatataaattagtgacattgaacgatttacaagggattttaaaagcttataaaaaatgtaaaacatgatttacaatcgttttaaagcataagtaagtggcataaaatgatttacaagggatttaaaaaaggttagcatggtttacaatcgtttttagcataagtaagtggcattgaatgatttacaagagattttaaaagcttataaaagggtaaaacatgatttacaatcgtttttaaagcataagtaggtggcatataatgatttacaaggatttttaaaaagggttagcatggtttacaatttttttttaagtataagtaagtggtattggaatgatttacaagggattttaaaagcttataaaaggataaaacatgatttacaatcgtttttaaaacataagtaagtggcataaaataatttacaagggattctaaaagtgtttgtatggtttacaatcgttttaaagcataagtaagtggcattaaatgatttacaagggattttaaaaggggttaacatgatttacaatcgtttttaaagcataagtaagtgtcaaagaatgatttacaatagattttaaaaaatgtttgcatggtttacaatcgtttttaaagataagtaagtggtatataatgatttacaaggattttaaaagcttataaaatggtaaaacatgatttacaagagtttttaaagagttttaaaaggatttacaaggattttaaacctttgtaaatccttttaaaactcttataagtctttacaagcattttttaactcttagaaaaaaaattgtaagtacttaaaacatttacctttttgaaccatttgtgaacttttacaaaagattttaaaaaaatttacaagattttttaaaaggttttcttataacttcttttaaaatctgttaaatactcttgtacatcttttaaaacccttttaaaatcccttgtaaattttttaaaacacttttaaaccctttaaaaatcattaaaaaactcttgtaagtcttttaaagccctttaaaatctcttgtaaatcttttaaaacccttttaaaatctcttgtaattctcttaaacccttttaaaatctcttgtaaatcttttaaaatattttaaaacccttttaaaattccttgtaaatctatttcccgccaaaaaaaaaaattttacaggaaaaatgttttagaattttttttttgacgggaaaaatgtttttgaaaaaaaaaattggcgggaaattttattttggaatattttaggcaaaaaatattaatatttcattttgttaacctaaatcaatttacaaataagggtaaaatggttattaaaaaatttaaatagagtataaatgaaaatagtaaatagaaaagggtagaattgaaaaggggtactgtaaaaaagacatttcaaagaatttttcctaaactaaactaaactaaaaaaattgaacacacatctctacataacaaataaagattagtattatgtataaaatgattaaagttgcactataaaatagacaacaatccaactttaataaatatttaaaactaaaatttgatctgtgttgcaccagcacaattataatctagttaataaacaacataaaataatcaaagtcctaattcgaatggaactatactagcgttaatccacaaatgtccctgtagaagtttttccactgtaaaacttgtagcttcattaagggtgattgtgtgatatcctttccaaccgactcttttacttgtatctgctcctggacccgtatttttgtattcaccatagtacaaggtcgatagggttccaatatcagttatgtttcatggagtccaacccgctcgatcgatgacatcgtctataaacgactccatgaatactactctcgagaatgcacgccacggacgtcccagaaacgtctttacagttcctttaattggagtgaggtcagaacttgcactgatgttgcatttctggaacgaaaatcccgaagttgcagtatcttcctcgcgagattgagcagtcaagatgttggtttgtcctatccccggtttacgtgcctcgatttggcaatattgaaataccgcagctgcccgtccgaaaatgaaatcgacggttcccgtaatataacaatctcggtagaattgtctacccgaatatgcataaagggtgtcttgatacgcgtcgatcctgcaacgataaatgatcgtcatatcagtgctaatacggagagccacggcctgccgcttctctggcccagctgtgttccgaatacacaaatcttgagccataaatccactctcatctacagctgcacacagatctcaacatcattaatatagaattactttgtataataaaaaaacccgataagattaatgaacaacatcattaagataaaacgataagattgataaaacgtttcaacagagtacaaagtcatggaggttcaagagtggcagaatccaaacgtctccaaaaggaaccgccggtaatttccgggattattgatcaaaattgtgtcaggttcggcgatttttgacaacggaaaagggaagaagtgtgaaaactgaagacaggtggaagaagaagattctgggacggaagaaaaacagggtgcttaagatgggtaaggtggagtagttctcactgggcgacgagttgatttctgattcacgaaagttaggcagaatcaaaaatcaatctgatttggtaaaggaacaattttcatcagataaatgagttgttggaacggaattctcaggtctagggacgctttaggagtaatgattctatggttttaaggttttgtgattctaaaatacgtttcttgcaggctgtttaaacagggaattctaaaactctctgaaggtttcaagtttgagggaaagtctgcagtctcatgttcatcagagggttctagttataaaaacaggttgtaaggtagtttctctttcaaccagatcatgacaaaggataatggatgttgagtttgctggttggctatgtaagtagcaggtttacttatacagagggtgttctgtatggagaacagcagtaagggttcttaatctttgtacattaatcagaacaaaaggctcatgaaacatttgagataatggcaggttgttgtatcaacaagcatagttcaaggaaaggactttatgtgttgaggtgacttttgttttgggttgttcagtgacatgttcacactaacacaagaagtagtactatgttcaggtgagctttcgggatatttatcaaagacaattggttacagcaaagcttggatagacaacaaaggtgttagacaagaccaacaagagtgttcttgcataatgataggataggattcaacagttacttagacaagctattggttctgacttctgcgaggagagattctatgttatgacataatgcatgaatcatgatgacaaactgatggaaacaaataatcagctggaaggaaatgatgaggcaaacgactcagggttcagatctagctaccaaaatcacatgtcaatacacatgatcatctaagtaaattttcacaagtgtcttttcaaacagttgaatgagtatgcaaaagatgatgagataacatgtaaagttattgtggtagctgaattagttccagtttatgattagacacatcatcagaaacattattgataaagaggaaaatgacttaccaagtgttgcggagtcgaaagtcttgatgccatcaacgccgttcaaatcgccgctgaggaccgtcaagtctctgccgtcgccaacgagggttaagttagttttcttcttcccgatacgaataacttccttgtataacccttctttgatgtagatgacaaaaggcttcacaccattctctggagctgctgcaaccgcttcattcaccgtggtgaagttgccgctgccatccttggcgacaatcaagtcggctttatccttcaatgcctgcaaattatgtttaagagaaaaaaaaatgaaatagttaataaaacatatgaaagtcaacaataaacatatgaaacatatgaaagtcaacaataaacaacaattcaaagataaaaaaaaaaaaagaacgaatcggagttttaggcttcagatatttgaggtattatctcaaaagacaaatatataataaaacaggaaaattaggtttttacagtgaaacaaactctgtaagaacatggttcgtcggaagtgacaacccaaagctcagatctgatggataaagttaaataacttgttcatatttcaacaatggtgatatttgttttgctaacacaaaaaaattgaagcttttctgctaattagagaaagttggggattatttctttaacaacaaaaaaaagttggggattattttgatcatttcccattgttgatttgttgtccataagtttttcattttctaatcgatttctgttttcaaagctggaactttattagttataaacgctagagagcctaaaagttggattcgcggatacaaaacaaaaaaaaatcgattagcggacacacaaacaaaataaaggttttcctagttacctgatcgggcgtggagatcaaacttgctggaggagccaccgttgccccaagaaacagtgaggctattacgagaaaactcaatactaagagctgcatggtactggtcatcgccattaggtctctaattctctatctctcgaaaataaaaatcagccgaggaagtgtaactgaagaagagagaatgagatgttgcagagtagaacttaattttgttatgacttttgagtcttataattacttctcatacatatagtttatacagattatatataccaagtttaaacgctagtggaacgtctatatatctctgcatgcatgcacgaataaggaatacatcctataattgtccatcctataattgtcatgattgaatggtccatgacgacaaaatttcctcatatgagtgtgaacgcatatagataatacaatattaattaacaataaatattaaaccagacacgaaaccaaatgtttgtgttgttacacttaacatatatgtaagtatattgaagtacatgttctcagcattttatggctttgtatgatgttagaataagaaatgtacgtataaatgactttttcttttttggtcaaatgtataaatgactaatgaaattcattattcattgacctgaggttaggtggaccactgatctatatatagtcacgctcactgcagtgccaggatcaacatatatatataaataataaattgcataaataaacataaattataagtcaacaatgtagttaattgcataaataagaaacaaacaaaagttataattgacaaaagaacaatgtagatgatgttatggagctttttacaaaaaggtaaccaacattttcaatgaattatgtaaaaataaacttggttctcaatttttttgatacctctatctctaacatatgttgccaatcaaatcgtatttcttatccaatcagagaattataaatattcttgtccatatttattatgcacttacactatagtcctctttttgtgtgtggttagatggatgggcttaagatctaacggctatagaggtgggagtaaatctcacttaattaaatagtaccggaaacacttgataattcattcaaaaatatttcctgacttttagggttttctatcgattgaaattgagttaaaaatccctaattccaaagctactctgattttgtaaagtgaaagctatatgccacagagcactcgaagaagaagctagactatggaacgcagaaggagagattagggagctattcaactccatctcagtatcttgttaccaaatttaacaaactatcttaaaacggaaaacacagtattaatggaggtagatgcgactataaactcatagtaattgctaaattaaaaacttacctataaactaaagttgcaatttaaacaaacaatatacgtagtctggagccttaaattagccaaattatctgtctttagaaacgttattaattcggtatttttgattcacacctcttaccatatttacatgtgacaattaaaaaataaaacttgctttttcagaaaattataaaatctaaatataagaattgatacgtatttataattgagcatattggataagaataaacatcaatcactctttccactagacgaatatcttacgtggcaacagctgtaccgttaataatgacagtttttagctgtgtttatgaataattaattacccgccaaatcactaacgctttaaaaaaaacaacaactttaagaaaacaaataaataaataaaagagtatcaaaaggcgttcaccaaaaaaggtacaaagtcctttgggagaagatatcatcaaagagaaaagccctaattaaatctctcatcaatggcggatttggataaactcgagggtggaggaggaggaggagccgtcgtaatcgccgacattagagccgatgaaggcggaggagcggtggaggagagggagaggttaacggaacttgaaggaatttctgtgttggatttcgatttgctttgctcaacggttgcgcttcagactcaggggaaatggaggaagcttgagagctcggagggagaagatgcgacggaggatgattatggcggtggcgttttacggctttgggaaggcgatgttatggattgctttgaagatcgtcatctctgtatcgaatctgcttggtattgggttttctcttctcatatcattctttaattccaaaagcattttttttttgttctccagaaattgaaattcatataatttactgtaattagagcaattgagttctatatgtgattataaagcaagagacttttttttgtttatcttgtttcagctgtccatgctacagattcgggaaaaacatgacaaggactggttttggttcttgctttcttcaggtataatatcctcttaatacagttgatctctggccttttgtttaccttcgttcttgtgttgcaatcattgaaagatactgactttaactgtattttgtatgtgtcagggtgctgttcatatgattcttattgccggtttcttattcaatgttgttgcttttgctgtaactaagaggcactgctttctctatctggctattgctttcgttcttttgattggatcctacttgggtttcttccgtatgttgataagaaggaagtttaatattagagtaagcacattccttgtttttttgtttcttttctatggagtgtgttaagaatgttatttgtcttcttttctgcatcatgacttttggatactcttacttttgatagggtactgatagtttcttggacgattttatccaccatctcgtatgtccattctgtacattaactcaggtgtgtgttattcacagatcattctcttgcaaacaagttacatccgttatgtccttttggttcattttgcttgtgatgtgatgtgatgcaggaatctaaaactctggagatgaacaatgttcatgatggtatctggcatggtcgaggagacactctatgtataggcggctattccgaaggaaaagcttttctcgagctgcattcgcctccagttattgcctcaacaatgtcatcatctcaaccctaacaacacacaacagagttcattcacagaaaccgcaaccaagttctgtggcctccatagcaatctgcattggtgtcaacatcggcttatggcaattgatttgctcaacagtgtaaactgattcatgtcaagagaaaactttcatgtttagttttggaaactgtggtatatagcaaacatggaagtttgatagaaatgtcctgtaaggttctaaaaggagagaggctaagaggccatttgtatgctaatagtgaatcagtccaagttacgtatatacagccacctatttgggtcatccaccacccatcttgtggagttttttagtattgaaatacaagacatcatgcttgttgatcgtccagtagaaatcataaactgcagaataaaaatgaatagactagaaacaatgtaacaatgtattttgtgtggtattttggtcttgttcagttctgttccctaatcaaaatcagacaagaaaagcaaaaagggggaaaagaaggcaattagatacacaaagtcattcatggatgtaaacactttattcatatcttcttggccattctcaggcaacatgtttcagtgtttttgttcactgttctttggttcagagaataaacaggcggtttataacggaaaccaaccgcgtaaatacaatctatgtagttagaatgaaccaaaatccatgacaataaaaagcaaaagacaaaagaatgaaagaaaaaaacaaaaggaacataagaacatgtactttctttctatgttctctcatctaagatgtgtaaattgtttcgactcctatgatgataacaaacaaaatttcaaaaagatggaacctttcttcgcctacggcgccatcagaccatccaccgtataagaaagagacttagcccagtcggttttcaacaccattgtttgcaacgtgtgcatcacatcatatcctgggtcaagtttccgttgccaaccctgtaatcaaaccaattacttagttcgaaagtaaacttaatatctctggagttataaacagtttttgaatcaaacaaggctatagaaaccattctctaagctaaaaacagttttaatggctacagctttaagctctggttctataataagcttagctttctttagttctttttaaaccttccatcaaacttagcatgatctaaaatctacactaaaatttgaaagtggggacgattttggctcacctcgagaactaatgttgtcaccataacagtgcacacattcccatcaatatttactctatgacgtcttactttctcaagtaattcgtgcatacaatctgctggatgtactaaatctccctcaggggttccccagaatttgaatgcttcctctacttcctgtcagagtatagattattagccatcacaaataaaagaactttgaaagatatcttccatatatttgacaactcaaactgtttttccgaggtacaaagaaccttagagcaaagatagtattacctcgataaaagcctctggattgggacaattctgctttcttgataatttaagtgttcgttcagcagcagtccggccatctctacgcgcaaccgccttgaaaaagtcaagtaagttctctcggtcattctttgcaagttctgcagtcattcccacatcaaggaaaacaatgtgaggcttcttcgttttgaaaaggcctccacgggaagcctttttccggacaaggatatttcccggatgcatgtcagcgtgaataaagttatcaacctgaagtaacaattcacttgagattaagagcattgatgaagcgtatatcagttatacaaaagatacaaagaggttaataccaagagcatcttcaagagggcatgggtcccgatgtgagccaatctagtcttaatccattcatgtccttccattccatcaacataacgtgccacactttctccatgctcatatgtctccaccaaaacagcaggatgtacaagaggatacacaggtttagggaaagagacatccttccatctacggaagttatatatgaaccgactcaaatgtgaagcttccctcgcgagatcaacttgagacaacatgaagacaccaaactgttgcacactctcgtccaatctcaaccatttcaaagctggaattaaagtcgatatctttgccaccaaattaattatcacaaaatctctcctaatcgattcaccaacacccggatgtctaactttaaccgcaaccagcgaagacttggacttttgtcctggatactgaaaccttaaagaagctctatgtacttgggcaatactcccagatgccactggcacctcatcaaactcctcaaatatctcagaaagtttacgaccaaatgccttctcgatagttttcttagtgtaggcgaagctatgctcaggagcattactgtgaagctttgagagctgtgaacacaaatccttggggaatagatcaggtcgcgtggctgcccattgaccccatttgataaaagcaggacctgctctttccagagttcgatggaccatctcaagccatattttcctaaaacgaggcccacatgattccacaaccagccccatcagaatagtaggagtaaacaaacaagctatataaaaagccctcccaatcaagataaaaccctctataaccgaaaacaataacgaagacagaaagataggaccattcttagcccttgtatagagagatttatctgaagcatagtgatttatccccgaaccaggagctctttgtgcccatgctacttgtccacaagtgacagcaacgatcccaggtattaacaagtgcgaacgggtaagagacaagctaaacgcctgagcaatggtactaatacgctcagaatacttataatgaagccttctccaagcaatttgggcatgatgactaactacatttcttgcaggggcagtagtataacttcgagacagatgattacttaaaaaacttcctttgagatctctaaaggcaaaagtacaatacacattactcggaatcctaccagatgaagagtaagttctgagctgaggcgaccttagagcagctgtaaaagcagttctatagcttccccattgagacactctatctttctggttcgagacaagagattgtgtttgctttccaacgattttagagatcaaaactctgcaataacaacaacaaatcaatgatgagaaagtaagcaataagcagctaagagagtatacagaaggatccgatcaacattaagacgtatgaaccattgaaactcgtaaatgtcgaaactttacagataaaatgagtctccgaggaaatgggaaacaaaaatccgatcagaaatcatgaaagacccacgaaagtggttaagcccgtttgattaaacaaaccttgacatagcgacgaagatggtgagaaaccaacggaaagaatatgcgaaaacagggcttgttgggtatggatctctaaaacgttaaaattgaggagcattttctcattgacttgagcttttggggactagtcggtcacagtctaccgtccggcgttaattgggttcgaagctttcttcccggagaagacctaaagccgatacggagaagagacggaggaagagagagagagatcaggtcaggtcagtgatttcgttcggagagagagacaggcccaaaaaaaggaaattgatatctcgtgggcttaacgcttgatttagtcgacgtgtgacattgtcaaaccaaggaatgatgtgaacataaaaagccttaatgtcggtctaaaagacagcttgtcgtcaaaattaaaatgttcattccaaagttttttattttgtctccctaagtatttattaacttgtctaattttgattttgattggtccacatatctttttaattttatactttagaaagaagaagaaacagaatacacaaaacatagttaaaccacattaagctgtctcgatcccattccttagggtgtcaggtcacggtcgacataaaaacatcttttccatccaatatttaccggtttcgtttcaccggatttgggctctccggcgacggagaatagccaccatctccgtaggtcagctttctttttttttcttctctttcctctctctcatatctctgtatgattggccgaggtgtagggagctctggccgccggcaaaaaaaataggttaactaaatttggtgtgttctcggtttttgttaacagcaacgagacgaaattagaggaaattgaattgagctttaaggttgattgaaactggaatctggaaagtttgtctttttggttatgtttggttttaggatctgtaatgaagattttgcttgtgaggttattaaatgcagccaaaggaattctatcaccaaaggtttatactttgatgataagaaaacagaaaaatgagctgggactttgtattgcatggttttgaaataactgattgttgtgtggttataggaagtggtgtttgatatggcgaatttcttttgtggttgctaatgcttacagctcactaaacaatttttaagttgaatttgaattgttgatcagatgtttgctactgagttgtgtgatcttttgaatatctgctataacttgtatactcattcttgatacacgagcttacatgtttcagagtttagaaagctttataatgtgtgaactacactgttgtgcatttagcttcttctaacaaactgttgtaactcaccgttaaaccaaaactagattccttttcctgtctaaatgtttaactccatgaattgtttaatgaaccctgtaaatttgatacagaaaacagtatacttgatagctgaggaacaagagaagtgacaagggtgattgaaaagttgaaggactcagatgggaagcagaagcggagaacaaggaaagcgaatggcggaactgagcaaaaatcttaaagaaggtgagaggattctggagcccacacgtagacctgatggtactctccggaaacccattcggattcgacctggatatactccagaagatgaagttgtcaaatatcagtccaaaggttctctggtatggaatccttattccctcaacactctattctgttcttggactcattgtttctcgtggaaatgaatcgtttaaatttgatttttctcagtagtcagtactggttgtggatagcctgctttcattatttgtaccacccttatgttctttgttcgagtgctcaacagaaattgttaccaaatttttgctcttctatcttggtttgaataagggcaaaaatgtagatagaacatatcttttttctaatttgtatttcatttgtaatagatgaagaaggagatggcctcacaagggcctccaggttatgaacctgatccagctcctaaaccaaagactaaagctgctaagaggaacgaacgtaaaaaagagaagcgattacaggtatgtgtttcaactcaattcatatgctactagcttggtcttcggttaatggaacatgctttctaattatcacctctgcaggctactgcagaaaaagctaacagctctgaggatggatcagctagtaatggatcccaatcggtgaatgtattggcttctgaaatggaggctttggacgtttcgtcaaataatgatgtatgtgggggagcacctaatccaggaaccacaggagaagacgtagagaaaagaatccgcgcacttaagaagaaagtaagatttccatctttctcagttgctttaattaaaataagacattcgagaacctttggctttgaagatataatctccaccgtctagattcctaattgtggctggtaagccgtaacagcgtatgttccaaatggttttcaatcaattttcttcagtttacagcaaaattgtgtttgaggtatagcagaaatctgcagtctagcggttgtgtaattgcttcattctgttaacatttgcagatccgactcacagaagctcaacagcagaagactgcttcccgagacctaaacccagagcagttagagaaattctctaagttggaagaatggaggcaagaactcaaggctctggaggataaggcggcttaacttgctgcagcatcaacatgaattgtctaacttttaggcaggctgcagtttctctcatgaaatttctggaaccaatccaaatttgtatcaatgaaaagaaggctgttgttacttgttaggttttgtcagatctgattaatgaacttggcgcaatgcctgaatcttcatgggaattgatttcacattgtgtttgcgtttggtcctaatctaaagaatatgattccaaactgatgatataattgtaaagccgttgtagcaaacatcacttgatcaatcattcacttccatctgcatacatgtagtaacatcacccgatgaaggtggagtgcatgctgaaacggtgtagagttcgatcctaaagcttttgtgagttcatgaagatgtctacgtatttgtagacccaacgacataggtacatatacatacacatgtagtcatatctatgattctgcttacatatattatgtaactcttttctgtcttatgctctaagagaacatctctaccattaaagtacatgtcaatacagaccttaaaatgttaaccatttgtatgcttcctgtttcagatttatttaataaacatgcttcatctggaaagaggaagcccatggtgttatgcttaattatggataccgtttctcattttgctaattggaagttgcatttactgactttaatcagtcattgtcaactttatattcacctgatatgatatgcaagtgtctctagctcgaatagttaatatatatctaggagtagtggttaaaatgtctcatagagtcaattattataaatctttctgcattatgcttatggagcttgcttttactgagtccttatcaacttaatcttcactggggtggtaactgtttcacggtccaatagttggtcttaaagtgactattgtttctaagtttcagttctctgtaaatttgtgtataaaataggtctttatattacataatttgcttgtcattttgtatataagtacttatttattattgtaggcaaattgtggtggcgtggaccatttcctgcagtgaaagaggcaatgattgaatggacaaggaagaaaggtttcacagtgttggtaaccttattagttcgtgtcatgttctaagtcacatgaatcagttttttcttacaacttttgaaagttcaacctttgagaaaaatccggaacaggttgtgactgatttcgatgtcagcagttaatgttgttagttgaggtaagccccacttggcttttaacaagaaacatcatttatattgtttcatcaaactatgatcagaaataatcagagaatgaagttcttctttatctttttcattttcttgttctccttcttgattcaatcttgttactctgacaacacaatcttgagaagtcagtctttgaaagatggtgatgttatatactctgaaggaaagagatttgcttttggattcttcagcttggggaattcaaagctcaggtatgttgggatttggtatgctcaagtctctgagcagactattgtatgggttgcaaatagagatcatcctattaatgacacatctggtctgataaagttcagtaccagagggaatctttgtgtgtatgcatctggcaatggaacagagcctatttggtctactgatgttattgatatgatccaagaacctgctttagttgcgaagctatctgatttaggcaaccttgttctacttgatcctgtcacagggaaaagtttctgggagagctttaatcatcctacaaacactttgcttccctttatgaagtttggattcactcgtcaaagcggtgtggatcgtattatgacgtcttggagatctcctggtgacccgggttctggaaacattacataccggatagaacgtagagggtttccgcagatgatgatgtacaagggtctgactctttggtggcgtactgggtcatggacagggcaaagatggagtggtgtgcctgaaatgacaaacaagtttatcttcaatatctcgtttgtgaataatccagatgaagtatcaatcacttatggagtgttagatgcttcggttacaacaagaatggtgctaaacgagacaggaactctgcaacggtttcgctggaacgggagagataagaaatggatcgggttctggtcagctcccgaagataagtgtgacatctacaaccactgtggctttaacggttactgtgattccaccagtacagagaagtttgagtgctcttgcttaccggggtacgagcctaagacacctcgagattggttcttgagagatgcttcggatgggtgcacgaggataaaagcagattcgatatgtaatgggaaagaagggtttgcaaagttgaagcgagtgaagattcccaatacatcagctgttaatgtggatatgaacataacactgaaggaatgtgaacagaggtgcttgaagaactgctcatgtgttgcttatgcgagtgcttaccacgagagtcaagatggagctaaagggtgcttgacatggcacggcaatatgttggatactaggacatacttgagctcaggacaggatttctatttacgcgtagataagtcagagttaggtactaatatacatatactctgcaacttgttctgtttcattgcaacaaaggtggtagcaatttgatttgtttgcttgtttcagcgcggtggaatggaaatggcgcatcggggaagaagagacttgttttaattctcatcagtttgattgcagtcgtgatgttactactgatcagttttcactgttatttaaggaagcgaagacaacgaacacgtaagaaattctctgatgatgattttttaagattatatgtttgcttgcttagatcacagctaacaaattgaacactttcacaagtgcagagtctaacaggcttagaaaagctccatcaagcttcgctccgagctcttttgatcttgaagactcattcatacttgaagagcttgaggacaaatcaagaagccgggagttgcctctctttgagcttagcacgattgctacagcaacgaataattttgcttttcaaaacaagcttggagcaggtggttttggacctgtttataaaggtgtgttacaaaatggtatggaaatagcagtgaagaggttgtcaaaaagctcaggtcaaggaatggaagagttcaagaacgaggtcaagttgatatcgaagctgcagcatcgaaatctcgtgaggatcttaggatgttgtgttgaatttgaagagaagatgttggtatacgagtatttaccaaacaagagcctagactatttcatattccgtacgtttcaacatttcctctatagattcaacttctcccattcaggacgatcagtgacttcgaatttgctttcctgttttgttttcctccttgttgttctcatagatgaagagcaaagagcagagttggattggccaaaaagaatggggataatccgcgggattggtcgtggaatcttataccttcatcaagattcaaggctgaggatcatccacagagaccttaaggccagcaatgtacttcttgacaatgaaatgataccgaagattgcggatttcggcctggctagaatcttcggaggcaaccaaatcgaaggaagcacaaatcgagtcgtcggaacatagtgagttaatctactatatcaatccatccccacaaaactctccaatttctttttttcaatctttaaggtcgtttcaatctcactgtcacagtggatacatgtcaccagagtatgcaatggacggccagttctctattaaatccgatgtatacagctttggagtattgatcttagagatcataaccggaaagagaaacagtgctttttatgaggaatctttgaatctagtcaaacatgtaagtaaaaacttcttcctttctttgacataacttggggatacagaggagcaaaacagaacataagcaaacgtttgtttcttcgtcttgtagatttgggatcgatgggaaaatggtgaagctatagagatcatagacaaattaatgggtgaagagacgtatgatgagggcgaagtaatgaagtgcttacacattgggttactttgcgtgcaagaaaactcttcagacagaccagacatgtcctctgttgtcttcatgttaggtcataacgccattgatcttccatctccgaagcatcctgcatttacggcgggaaggaggagaaacaccaaaactggcggcagctcagataattggcccagcggagaaaccagcagtactattaacgacgttactctcaccgatgttcaaggtcgttaagaagtgtattcctcttctttataatctaagaagactataggtatcaatttatagtaatacttgttatatagaaaattatgtgtttaaagcgtatgcaaacttatttgtataaagtttacaaatacctaatgaaaagaaaagttagcctcattatacaggggattacatggttagcttcatttcttctctacataacccgacttttatcaaccactaaccaaccatattaataatgatctcataaaaatctttaaatcaacttagaaagtgctcaccataggtttgtttttcttaacttaccaaggagccgacaaaattgtctcaaactcaaactccacatcttcaagctctacattgagatcttttgcacatgactccatctgacatatctttttccaggctgcatctttctgttctttttctgcttccttttgttcttttagagcagcttcttgcctctgcagctcgataatcttgtgtttcacctcaagaatcttttgttccatgtcatcaaactcttgtttagccttgctaaattcatttgtcatctccttgtcaaaaccttttagttcctccattatatatagttgtctatctttgagtgctaacagcttgtcgatccgtgataatggagttgtaacattgaagccatgtttctcgagctccgaaaatgaatctttaaggctatttagttggcttacaggaacgtcggcttcaagatctttaaatttctccagtaacccaaaataagtcaccatcatacctattgcatacccttcacggaaatcttgcttagtctcaaacaatgggctgaaatgaagactgtgtgatacacttttgaagacctccagtgattcataagtcttccagaccggtgacttctttgcaaaaggcaaaaccattattgtgtgttttgcatggttttcctcagcattagaagcagaattcttcaccacattgggggtccgatccgaggataacactggacagatgaacgcatacacaacacaatgagaaaataaaggcttatctaccagtaatagtacaatgagaccattgcaagcgggtcctacattccagaatgtgcaatgagagttaagacataccagtcttattgatgtatgaattgagctttagacctcctcttttcctctttcgagtataatatttgatcttaggctcctcaggcatctgtgcatagaagtgttaaaccaaaaggagagccatctcaaagataaataacaatcataaacaataccttctctcgagttgactcatttccaaagccattcttcattggcacaggggatacctttccttgggttttgttctttgttgcagttacccccagggttataggtaaaccagattcttttttctggaaaacaaagaccatagaacaatttcagggcgtagaaaacaaacaaggttataaaagaatccactagcagggttatgaccatataccacatcatcagccatctcatttcccggtggttcctttgtctgcacatttctgttgccgtctaaagaagtttctttctggcgttttggctgaaaatggaaataacataacaacacttcaattaatcctcaaagatgtcacactaattaaaccaaaccaacacaatgttgcctgcaactagtgatacaatttacctttgttcttttatgccaaactccatcttcccactccattggaggcctaatatcagagtgattaaattgcgatgcctcctttgttgccccgaaacttaccatgtaccttccctcaaagacaattcccctgaccacaccttgacgccattcaaaaccactaaacgcctctacatgatccagcaattcatactttccaacagataaaggaggctgcataggccttagtcttagggaatcaacaattaaatttttcgattcccggcagctataggacttattccagtacttgacaagaaacctcttgtccttctccaactccttaatgacaattaccggaatccaagcacaatcaaatctcaattccaccattgtcccgcaactaaaaacagacttgaccaattccttcaaagacaaaaaacaaacatacaacaacggataaagttaacaactttttcatgcaaaggcgaaacgatttcaaaaaaaactcatcataccttattatcaggtcggatccatttgaagccggtccaatcaagatgaaccctcaatttctttttctcaaactgaataatgtctggtgggcaatcgaagtaaaccaaaaacttctcatcctccattgtttttaccaccacaccagtccaccacccatctttgagataagcgtcgaccatcaagccttctacaaaaacgacgccgtcgttcacatcctccgacgggacaggacgaatgaacctctgatcgacgaattccgttaaaggagccaaacggtgttcattgagctgcgtcaagtaacgaactttaagcttattgtgtcctgatttcgttggattatcttccagaatcgctctgtaataagacccttttaactcttcttcttcagaaaaaacttctactttgtcgtcttttctaatgaatatcatctgctccatctcaaaaacccttgaatgaaaactaataacggctcatttttgctctgctaaccctaaatctaaaaaaagacttttctgctgaaacccgaaaaccatagatatgattatatgaaggagactttttgcaaccaaaacacagtgctactgtgtctgtgcttagtgtcgatattcacgatacacatcggggaaagtgtgttttctttttttctttcccaatttacttttctttttttttggcgcttgaaattatgagaaaatgatttaagaaattatcaggcccaaactatctaatgggcctaattaaaaacggtgtcgtttcataggatcctcatcacgaagcaggtaagtaaaaatatatcttatcttctccaaaactctctcttcgatttcagcaattgcaatggcttccttcacaacaacttcttcttcctcgcttctcctcaaaactcttctccccgtaagccacctgaatcgtttctctacactctctggtatccgcgttggcgattcatggactcctctgctccggaacatctccaccgctgggtctcggcgtcgagtggcgattgtgaaagctgcgacggtggattcggattactcgtcgaaacggagcaatagcaatgagcagagagagacgattatgcttcctggttgcgattacaatcattggctcattgtaatggagtttcctaaagatccagcgccaagtagggatcagatgattgatacttaccttaacactcttgctactgttcttggcaggttcgttttcgctttcttattgattctcttcgttgttgaattagttaactaatagacgacatttacttgtgttgctaatggacttgtcctttgattgaatccaatgttgcgtataggaagatttggttttttgttagattagggtttttgatgatactttagggtaagggtttagtgagctgagtaaagctttcagctttaaatttgctctgaagttgacctagttccagaatttgttcttaatatcaggtgtaatctttagctgacttgtttttcgtctcttgatatgtgcaaacttattgaacattgctgcatattgaacacaaaacattggtgtctgatttgatatctaaaactttgtgctctttagcgtaattatgaatgaaattagggggaagaatagaagcatctatttttgcatattttcttcaagctatgtataaattgtaggtgattgtgcatggtttctgtttgttaaaaacttgatgtggacagtgtaagctagtaatgtatgtaaaaggagtgtacaattgtgcagagcattagattgggactcctgactagaaatttcttggtatggcagggaacgagtttgtgttacacaactaatgactaaaactttagtttatttggtgctactctctattttagagaactttgattccggtttacactatcctgctgatgtgataaccaattaatgtacttgtgtccattttccagcataaccagttcatcgtgtttgcttattatatgtacttgtgtctattttccagcatggaagaggcgaagaagaacatgtatgcattcagtaccacgacatatactggattccaatgcaccatcgacgaagaaacatctgagaagttcaagggttagttagtgagcaagaagagccttagtccccttattgaaagttcgtcgaaaaccttcaagatactgatcgttctgtcttttcattattttcacaggtttgcctggagttctctgggtcttgcctgactcctacatagatgtcaagaacaaagactatggaggtaacccatcaaagcctgattttaaactttctaggatctctctctctcccagtatccatgttctgataattgaatcgttctttctcgggtttaggcgacaagtacatcaatggagagattatcccgtgcacatacccaacataccaaccaaagcagcgcaataacactaagtatcaaagtaagagatacgaaagaaaaagagacggtcctccacctcctgaacagaggaaaccaagacaagaaccagcagcctctgattcctcttaaactataataagataatggagtgtttgcaagttttgatcttttggttagcacttagcttgttgaagtcgtgtgtaaaatcgtctagtaccaaatgatgatactgtatcatcacaccttgaacaatagctattgttatgttaggatgaaattcaacttgaaccatttgtttatttaggtaatgttcggttttggtttggtttgattctttgtcaaccactgctttttccccacgttttctcaacaccaatttcagacaagacaaaacaattgtagggtcacacactcgtcaccaactcaccatctacatcagtcgtccctaccttatcaacacatcacatggaaataatacactactctctcacggacttggaaccaaacattccaaattagtttaatcgacagatcactgctcagctgaatcgttttctctcatcaaccgcagagaaagactttcaagatcatccttcaagctctctcaaatggccaacttctatgagaattaccagagtccttacgattacaatcaggttaataatctctacgatcaaaatcattatcattacaatcaacagcagcagcagcttggtttcgaaccaatgagttataattattacaactggaatgaatctgaatctgaatctgaatatgttgcttactctggttatgatgatccaatgagttataattgttataactggaatggatccgagtctgagacaacctctgcatatgttgcttactctgtttctaccatgtctgagcctaaacacttgttctatgatccgaatctctatacaacctacgaatctcctcctcagtttagtatctattgctctgtagcctctgctcttgacttcaacgagccggaattcgatgaatacgatcccacgccgtacggtggtggctacgatgttgttgcaacctatggaaaacctcttcctccatcggtggaaacttgttacccttgttcaaccgctcctcacgctaaagctccctctcctcctgagattattgctcctgttcctcttggaatttatgatggtggtcaaaagaatgttgtcaagaaacgtgtgtcttttgctgaaccggtagaagaagtcaaaccaatagaaaccattaaagagcaagaacaagaacaagacgaagattatgatgaagaaagtgaggacgaagatgatggtgatgatgatgatgaagaagaagaagaaggggatgaggaagctaaagaagaagaaaaagatcacagttcaagctatggaaatgaggaatatgaagtcgtagataaaggagaagtgaaagctttgtatgttccgtctggttacggattagaagcgaccgatctctgtgaggttatatttggaggttactttccttgtgtgttacgtaacaaaagacgtcaggaagatgaacaagatcgtggggctgctgtttcttgctgggaaagcaacgattctgatccgtggaagacaacttccgatcaccttttcggggattcatatccgtacggttacgagaatcggagcgaaagaaatcagttcgaggtctcctcttatggttaccggatgtattaacaaccctagttatcatcagttgtgtcaatgtgaggtaagaacaacattcttttgattattgatgaacctgattttttagtatctgttacacaagagatgagatttactgttgtataacgaggaggggttacttaataataaaacgtcgcacgcaaaatctatcttcaacctttctatttgtaacattctctttaacacgtttgtttaaaatctaaaatctttaaatactacactcgatgtgataattgattactgtatccatcgtaattattattggtatatatacatttctttgtgaaaaacaccaaataaatgaaagaattgtatcatggtatatctaatatctatcactgtgagtacaagtgcagaagaaattgtagaagtagaaaagtcaacgataaagatgaattagctgaagttgaagaacactctaataagtaataacaaacaatgaacaccatgggggttcttgattatcttaaatgaaaattagtacccgattcaaaagaatatcatttttttgtgtttttggaaactcttttgagacgttaacatgttgactaataaattatgtgtaaatatacttttttgcagaaattatttttgtggatgtataacttgtttacctgagcatgtaagtatatggaattttcaaaactgtactacgtatagacaatatgcaaatacagaaaacaaaacaaaataccgtatttacacgcgatattaataaggttcaatgacatgctacttcttaactaaaacaaaatttaaaatgattgatgaaagctttacatgtgcgtcatggaggcttaactttgttttgagacgtctacttctttttttttattcttatccctttccaatttagttatatgtagtataatcagattaattcaccatatataaaaccctttttcaaaaaaaaataaaaaaaattataaaagtataataattattgagctgttggttatactgttttaatttcatcgaatactttctctgttttgttttaaatgatgatccagagaattttgtttatcttatttcaagtgatgttttcaaaagtttaaatatatttgattgtaaccatttatataatagaatatgttttttactagttgaattagttttattttaacaatttatatatataaaataaacaaaatattttttttattatttcttaatttatgtgaaaaactttagatatgatttaatatgaaaagatagaatatattatataccaatcttgtaaatttattctagaactaagtcaaaaccactaacttttcttttgtgacaacttttttataaaaaaaatttaacatcattagaaccactaactcaattgttattatatttggtgaattgatctaattagtagaaggaatatatatgtctgcactactggagagaaaatgccccgtccattatgttctaagccttttctagataacttactgaatctaaaaatagcatctgctttttgtccctacaaagttatatggacaaactaaaggaatgaaagagttcgatatacccaaatggggataatataattttttcatcaactttaaaagttcaaatatagagctaattatacgcatttataattaacaaaaacgagatagtgcaaaacaagatggatccaatgaaaagacaaaagagaataattaatggatcgaatataattcaaaatgggcacaaaacaaatttgcacgcaaaaagttattgaatgagagttgcaaaatctcatatagtacttatttactacatatgattagtttatctcgttgaaaagttcgtgttttttcctattttgcaccaaattcaacaaatccttgagtcagtccaattacaattgaaagtaaagaacccaaacttgaacctatacgaccagacggagacgggcatgcaagtgtttaagtgtcattagattacaaatgtttaagtgtcattagattacacgaagtatagatttagatataccaactagctcgggtttgcatgacttattttttctcactaaactcagttacatcatctctccgactctcttttatgaaaatcattttgctaattaataaggtgcgcggcagataacacgcatgataaagccaatgtatcggtttctcatttactcatataacgtataaaatggaaaagctaattcatcggcgcctcatgaaacgtgtgataaagccaatgtatcggttctcatttctactatataataaataaataaatataacagtaaatatacacatattgaccggaaaaaaaaaagattgttaccgcatgagcagttatatttgtgacgacttcttaaacttaagtatcctactaattttgttctttcattagttaataatatgctcgggtttgtagtagtgctttgttcttcacaaacgcttatcctatataaaaagaaagtttttttagaccagaaaagtaaataaaattaagctagttgtgtgtaggaacattcaacttgttcaaatatttgaactattttgtaatttataattttacataatgtggaacaagattctaatattatttaaattgaacttgacagcactaagttttttatttatttatttttgatagaaagaccactaagttaatataatagagcaataattcaggggttttttctattaaaatgacagaacccaaacacagtactctttcttataagttataaatatgggaagggtggttgccaaactcaaagtactttgggtcttaactctttctaacacacaaactcacatagaattcaagaaagagagaacgagggagagatgggtgaggatatgcgaggagtgaaagtagtctcaaaatggccaccgatgatagttatggtgacatcacaagtagcgatgggttcggtgaatgcacttgtgaagaaagctcttgatgttggtgtgaaccatatgatcattggtgcttatcgaatggctatttcctctttcattctggttcctatcgcctattttttggaaaggtttattgatattttgatgaaaatagttgagttatatatttttcttatgcaaaattttcaaaaatttgattatatcaaaatagttttttcatatttacataattaacaacatttactacaattgaagattgtcagaatgctctattataacatgtaaataaacaccactacatgttactaatatatgaagtagattgatattttctttcccctaaagtttatgtcttattgttaacaggaaaataataccgaaaataacgtttaggctaatggtcgatcatttcatcagtggtttgctcgggtttgtcttctcacaatttcttatgttcttttgtcgtccattttccattttccttttccattatacattgattgtttccacagaagaaagattttctttcaagtgagcataaaatcttcataagctagctaaattgtttttaatcttagcttagttttgggtttaaatttgcagggcgagtttgatgcaatttttctatttgcttggtctgtcctacacgtcagcaactgttgcgtgtgctttggtaagcttgatgcctgcaatcacctttgctttcgctcttattttgaggtaattatggaaccatctaacttctttatcattaaaataagtactgtatttactattactatgcaatgggttcatgcaggatttattcgtatttgttatgtatacagtgcatataatttcttttgttttttcatcaagcatattatacttctatatatagaaatactcaaaagaaccttactcataaattatctcaaatttatcatctaaaaggttatattacttttcagaactgagaagataaaagatctaaagacccaagcaggaatgataaaagtgatgggaactctaatatgtataagtggagctttgttcttaacattttacaaaggccctcatatatcaaactctcactctcacctagaggctcttcctcacaacaacagcgatcacaacaccaagaattggcttcttggatgtctctacttagtcataggaatcgtgttgctatctctatggatattgtttcaagggactttaagcatcaagtatccttgcaaattctcaagcacttgtctcatgtcaattttcgcagcttttcaatgtgctctattgagtctttacaagagtagagaccttaaacattggatcatcgacgatggatttgtgattggtgtcataatatatgctgtaagttataatactatattatcagaaatcttaacatttttataaattataatgtagtatatatgtaaataattaaataaattttggggtttacctaatattaccttattactatacacgtattatagggagtgataggacaagcaatgtcgactgtagcagcgacatggggaataaacagattaggagctgttttcgcatcagcaattatgccagtttctctcatatcggctactctattcgatttccttatcttacacactcctttatacctcggaaggtgctctcttcgatcatctctatgaaattttttgtatagctttatagatgttaatgtattaggttcatgctcgtattactaattacaatttattttgtaacttttgctatacagtgtgattggatcagtagggacaataataggtctctacgtgttcttgtggggtaagaacaaagaaacggaagcagacataactacattgtcttctcggatgaacaacgaagatcaacgagtctaggtcgcccatttaatcaaataatattgttgtcatagaaagattcatatggcttcattgtcgtaaattagtatttactactgaatacatttaccgtaaagaccagtcataaatatttagatttaaattgtgcaagcacactcacgttaaagaccagtcataaatattcagattcaaattgtgcaagcagtttgtataattcatacttttcgtttgcagatttataatttcgtaaagagataacaaaacagatttgttataatattcaaaactaaccaatataaagcatatatgatatatcaaaacatttcacaacagatctgttaaaagagcctcgtaatattgtttttagtttcaaaagctctgtttcttggattattttcgtgctgattttaaatgtgttgcgttttgagtttgtagcctgttgctaaaacagtaagaatttaaggtctagaaaaaataaagaccaattgtaattagtactactgtatatatattatgcactactggagtgaaaatgccccgtccattttttctaagccttaccttaatctagaatagcatctgctttttgtccctacaaagttcgacggacaaaataaaggaaggcaaaatttcgatacccatattggggagaaacaactatatactaatacagtataatttttttcattaacttctatattgaaatgtataacaattattatgtgcattataaataacaaaaacgaggtactgcatggatccagtgaaaggacagagcgtaaaagggatcgaatccaaattgggaacaataaaatggagaattattgaatgagagttgcaaaaatctcatataattatgataactttttcccatcatatcgaatcagaattcaatatgacgtggtcatcgtagatggggaattcagtataatactttagtgtttatgtgtcattagattacactaagtatagattataccgacactgttttacttcatttgcatgacacgggtgataacgccaatgtattggtgtctcatataacgtatagaatggaaagctaaggtatcggtgtctcatggaacgtgtgataaaagccaatgtatcggtgtctcatgcatttctactaaatataaaagtaaaaataatacagtaaaggcaatcgtcatgtatatatcgcaacactgacctgaaaaataaataaaaaatattttaccgcagtaattatatttgcgacaacttcttaaacttaaagctaacgatttaatccattactcaataagaatatgctcgggtttgtgctttgttccctcctcacaaacacttatcttatataaaataaagtttattttttagattagtcttaaccagaacaacaaaaaaatatatacaaattaattagctagttgtgtgggtgggaacattcaaactatttaaatattttgacaaaaaaaaattttattatttttttttacttttcacacataatgcggaacaagattctaatattatttaaaatgaactcgagtagacaccactaagtttttttgtaaaaaatgtttttgatagaaagacaactaagttaatacaacaattcttcaactcagggtcttttctattagaattagagaacccatacacacatgtttcttatatatatagaggaaggtttgtggttgccaaactcaaagcacattgggtttcaattctttttaacgcacatacaccaaatgacatagaaagaaagagaggacgagagagggatgggtgaggatatgcgagtagtgaaagtagaatcaaaatggccaccgataatagtaatggtaatatcacaagtagcaatgggttcggtgaatgcacttgtgaagaaagctcttgatgttggtgtgaaccatatgatcattggtgcttatcgaattgctatttcctctttcattctggctcctatcgcctatattttggaaaggtttgatttttttgatgaaatagtaagttatttacttttttggcgaatattgtgagaatgctctactttaacatgaaataaatataaactagtatttgttactaatatatgaagtttaattattgacattttttcctaaaatttacgtcttattgttaacagggaaataataccggaaataacgtttaggctaatggtcgatcatttcatcagtggattgctcgggtttgtcttctcaactcaacataatatttgattatgttcttttgtcgtccattttcaatttcctttccacataggaattattttctctcaagtagcataaaattcatcataagctttttttttttttttaattctagcttagttttgggtttaaatttgcagggcgagtttgatgcaatttttctatttgcttggtctgtcttacacgtcagcaactgttgcgtgtgctttggtaagcttgatgcctgcaatcacctttgctttcgctcttattttgaggtaattatggaaccatctaacttctttatcattaaaataagtactgtatttactattactatgcaatgggttcatgcaggatttattcgtatttgttatgtatacagtgcatataatttcttttgttttttcatcaagcatattatacttctatatatagaaatactcaaaagaaccttactcataaattatctatataatgggtccgtgtaattactatcttatgcatacaatatatacacatataaaatttctttaattttttcatcaaagataatacttttatagtaatactcaacagcatcttacatatttttcatgtttaatatttggaatgagccaaataggccttggatactataaatatatttatagcatccacacgtaaattattggatttaagtcgatttaaactcctattttctcctgtttttttttttttgttttgtaacgtaaggacaaaaacatttactgtgttaaattatcatataaaattacatatcttttcaggactgaaaagataaaaagtctaagaacccaagcaggaatgataaaagtgatgggaactattatatgtataagtggagctttgttcttaacattttacaaaggccctcatatatcaaactctcactctcaccaagaggctcttcctcacaacaacaacagcgatcacaacacaaagaattggcttcttggatgtctctacttaaccataggaaccgtgttgatatctctatggattttgtttcaagggactttaagcatcaagtacccttgcaaattctcaagcacttgtctcatgtcaattttcgcagcttttcaatgtgctctattgagtctttacaagagtagagatgttaaagattggatcatcgatgatagatttgtgatcggtgtcatcgtatatgctgtaagttctagtgttatatcttcataaatctgaatatttataaattacagattttatatgtaaaaacttaaataaataaataaattttgggaattacctttatattaatcaaattaaagtagcaactttcggtatcttcagatgaaaattctctgtttcaataaccactacaaatttaactagtaatgtttttctttagtctctgttatacaaataattactagacaatctcatgcatgttatcaaaaaaattgaatactataacttggataaacaactcttaccttatagggagtgataggacaagcaatgtcgacggtatcagtgacatggggggtgaagaaattaggagctgttttcgtatcagcaattatgccaatagctctcatttcggctagtctattcgatttcataatcttacacactcctttatacctcggaaggtactctcttctatcatctcaatgaaattaaattcgtttctaaatagctttatatatgtaaatgtatgtaggtccacgatcataacactaattaaaaaatttattttctaacttttgctacacagtctgattggatcagtagggacaataacaggtctctacgtgttcttgtggggtaagaacaaagatatggaagcataactacattgtcttctctaatgaataacgaagaccaaaattaaatattagtgtcgtattattgttcttagtttcaaaacctctgtttcttggatttttttttttttttgtgtgtgtgttgcttttaaatgtatcaatgtgttgctaaaacagtctgaaagggtaattttatgtgatatggactgtaatttttcgaaaagttcacaagtgccattggtaaatgatatataaactaataacatcgagaggcgcactatatgaaaaatggaggaagccatgccatgaaagaacgtcgatgcattcaaaatgagatttgaaattcctaattaaagttaagaccagttgtattagtgttatgcagagtagtatattattctacttggattaattcacagtaaagaagagatatacataattcaaaggcttattgttatttcaaagcaaaacatgaagaggtcacccagttaagaagagatacataataaattcagaggcttataacatgaaaaggtattcgacaatagatgaaatgaaaagagaagacaaagagtacataagaaagcgcgcacacacagacacagacacagaccaaattaatagttaatcattcacttgggagggcgagtagcgtgaactatcccgttttcctttaacagcttagtctccaacttcacgagagacacgaaagcaggccaattctcggtacgattgtgcatttggtcgcagtttgggtctactttcttcaagtaggagtgagcagcagctatgccgatagtgttaccaatgatatccacaaagagtgcaacctcagaggtagagaaactcatctcctttctatgcatccacataaagatctaacaacaaccaaaaaaacaaactttcataaatcctaacacaatgatctctaactagaaaagaaatagagcgatgaatacaaaagttagatagatgagaaagatacctggagagcatctacatgtttgccttccatgtaagctgctttgccgagctgacgagatccgcctgggtgacgggaacacccttcttctcttcctccgcgatgatgaattctaaggtctctcgggtaagagacctcagcttcttgaaaataccactctttgcattctcagcatcacaagaggaagcagaagaagaagctccgttgatctgcctgttccctttgttctcagcagaagaagaaaacggagccgttctcgcgatcttaatctcagcagaagaagaagaaaacggagccattgttctcgtaagcgtagagatcttcatctctcttttccatagatgaagagaacctgatgataccattcggcgcaaggccaacattttccaaaccctaattttgataaccctaattctctaatatataaaacaatcaagttgccttgttaaaatcaggatatgatctctcttatattagtaggttacttacacaattacctacatctttgtcgatttgtcagtttgacttatgaatcagtctactagattgtaaaaataaataaaacgatgaaatgtctataatacccctaactctacacacgtgtgaactttttgaatagtactggacccgggtcaaccacacacagtagacacgagccttcttcttcttctctaagcgagtgaagtaagcttaccagtggcagtgagtgagctcttaccagtgtttagggtcttctgcaattttccttgttttgatcgggagcttgatcaagactactgatgctgagatttacgaaaattgccaacggtctctatgttcccggtgacagtgaagctctttacgcttccaagtttcaagactccactgctactttgacttcgcctatctcgctggtacaaggtctgtggaggttacagtatgggtgataaccttttccttctgcgaggaaagcattgtctcggcttttacttttgttcataacttgtggatattggatagtaaagcctaccactaatggcataacattcaggatgcttcttggtgtgctatgatttgttataagcgaatcactctcgttggctaaacactttgagaaaatgactcttaaaatgctctcttgggctatactggaaacttgctgtgttcagtggatcttcaggtccttgttgacaaccattaacaagcttaaggtaagaataaagaaaccaacaatactttcagtcctttgatgatttataattccataacagactaagggcagtgcatatagatatctttcgtactcatctgctttttctggtctccatcacaaaagccaactaggtaatcatatcaatctctctttaccgtttactcgaccttttccaatcaggtgcttctggtgtgtctactactatcagttttaggtctttgtatacctgatcttatctgctactgaggcttgtaaaagtgattaaaactgtgacatttactctaagagaagtaacctgtttgatgcatttccctaatataccggtgtggaaaagtgtaggtatctgtactcagctgaaatggtggacgattttgaagaagatgaactctcattgactgaaagcgggttgaagagtgaagatggcgttattatcgagatgaatgtctcctggatgcttttattatcatgtttgggaatttaccaagggagaggtatcagaatctatcttagaaggttacatttagctcaagcttgcatcaacatctttacttagagctctacgggttttagtgtgtttgaagtttcttaactcctagtataattagaatcttctgcagcagactttagagttttgggatgtagagctaaccagagtcggtttgtttaaactagaatctttttatgtagcagacttgttcagtacctgaataccagttttaaattaccgtcagatgttgatcttgttggtaataatggagaaacggaagaataattagacgaaacaaactctttaagaacgtatctttcagttttccatcacaaattttcttacaagctacaaaaatcgaactatatataactgaaccgaatttaaaccggagggagggtttgactttggtcaatcacatttccaatgataccgtcgtttggtttggggaagcctcgtcgtacaaatacgacgtcgtttaaggaaagccctccttaaccccagttataagctcaaagttgtacttgacctttttaaagaagcacgaaacgaaaaaccctaaaattcccaagcagagaaagagagacagagcaagtacagatttcaactagctcaagatgatcatccctgttcgttgctttacttgtggaaaggttgatattttccccttcgctttggtcttatttagggttttactccgtctttatagggttttagttactccaaatttggctaagaagagatctttactctctgtatttgacacgaatgtttttaatcggttggatacatgttgggtcgattagagaaataaagtattgagctttactaagctttcaccttgtgattggtttaggtgattggaaacaaatgggatcagtatcttgatcttctccagctcgactacactgaagggtaagcttacaatgattctcacttcttgctgctctaatcatcatactttgtgtcaaaaagagagtaattgctttgcgttttagagaaattagcccagatttcgtattgggtctgtgaagtttcatattagctaacacacttctctaattgataacagaagctataaaatagatttgctgatgaaggagttagctttttataatcttctgtgtttgtgttttactgtctgtgtcattggaagagactatgtcctgcctatataatctctatgtgcctatctagattttctatacaattgatatttgatagaagtagaaagtaagacttaaggtcttttgattagacttgtgcccatctacatgattcttattggactaatcattctttgtgtgaaaatagaatactttgtctgaacatgagagaatggttcataatacgtgtgaagtatgggattagttcaacaatttcgctattggagaagcaaaccaagggttaatcgtttatagggttaagctaatgctctgctctttatatgttattggaacagactattgttgtgcctatcttgtttagttgtagattctatctcgactgttataagtatgactgaaggcttgatgacttatgattctctttacacctgtagaaggatttaagcttggtgtctagatattcaatctgtgttggttttgtctttcttttggctcttagtgttgttcaatctcctcaataggtatgaagttacaatatccttattattttgcagggacgcacttgatgcactccagctagtcagatactgctgcaggcgtatgctaatgactcatgttgatctgattgagaagcttctcaactacaacagtatactctccaaactcttatcatatgttgtgtatcttttgactcggacgttattgtccttttcgatttatttactggtacccacgtacttttccttgcagctctggagaaatcagacaacagttagaagaggatgcaaatctgctgaaaaagttttcctctttagaggcttaaatattagtatgtatgaaaacatttggtgtatgtggtgtagacccttcaactccatctaaaattatatatgtgtgtcagttactttctcgtgtgattcaatctcatgatttcctgaccttgaagatttctcctttggattcatgtttcattagtattattgaggtgattttcatggccataactgaaaacctttgagaaaagagttaaaagtcactggtcttcataaccttttgtatacaaaacgcaagtacaacagaatcgtccaactgtttagtgtgttcaggctcgggcaagagttttcaaatcttccaaacgaacggttaaaataaaatgtataaccaaagaagaatgaagaacacagtgtaatcatatctggcttatgtaacccgaccccgttcttaagggaacatatcacattcaaatctccaataacgatcccaaaccacataagatgtgttattaagatccaattaatcgggactaaaaccaattcgagagaacaaacgaacgatgactcagtacccattaatctgtcttcctgttgttgtcgatcctaccaaccgagagaagggttgctgctgcgtttggttgttgcggcttttgttaaaactgttgctgcttccaattccagatttagggtcagagaaaggagaataggcttgagctagctcaagagcagaagctgcttttccgtgacgaatccctgttccatttggtgaatccagtttctggggaaccggctttcgccatgtctctggtgatggatgtcttgtcttctcctgagtctgctgttgctgtcttgcgctcttgttttcattttcacgccagtttctcctctgagtttcggatctggcaatgtcgcttacatttcgcccatccttttggtcgaatttcctcgttctcatgtcacgtggagaactcactggcctttgacttgcatgctctggaactctttcaatcggtttgaggaccatccttttgatataaaagaaaaaacaaaaacagaactttaaattagatagttggtctcaatggaatcgtaagtgttggatcgcagaaagtatacacagaatgtgagtgggtagagaaacccgttctacctatctgtcggttgatccaatttgtgatgctcgggctcatcaatgcctctctccttcaacacctgtccaggaaatcaaatgatgataaacaaatggacaacataacaagagtgagttatacaacaagatgaaacaaactgcactcaccagctctcgtggtctggcaccaccaaaaaccgcacttctgcaccagccagtacaaattttaagaacaattcttctatataactatagttatgtccccaagctccaaaataattattaccgagctgggacaaaaaaatgtaagtaccacattgttacctgtccttttcagttttaacttctggctgctcaagcaactgtgccacaggcttcagattcaacttgggccgctcagccggctggttaggaatctcatctgtagacaaaccagattttgaattgttgaaacttttctgtgtcgcattttcacgttgtataaggactgaagcactattttcctgcagatacaaaactgaggtatcagaaacatagttgaggaaaaaagaaacctgaaaactaaagtggcagttcagaaacttgtaacaactataccagtttttcgtcattcacaggtttctccacactttcaagtggttttgtccgaggaagcaggttcagcttaggtctttccacaacttcagaaggggcagttggctgcaccaaatgtccagcaggcttaacgtcagagtattttggatgaggtttatcgttggtgtttgctacaattttcgcttccttagcatccacataagttggaccagggattttctcatactcacgggagagttttttcccacgctggatcccatcttcagcaatcagtgcccgttctacatgtgttccatgtggctcaaccccttgactaatcacagggctattagtcttataaactctggtatctatctctgaatgcttaacaacatcaaaacccatctgagaaggaaccaaaagcttggactgccatcctcctgaagacacttggtcaagcgcacttgtatggaccaaattcgaaacagctggttgtttagtccatggagactgtccaggctcattgttagcaactgatacctccttcctcccattccaaatattagagtgatttcctgacactgagttctcaatattaccagtcccagaatgagtcaaaggaccagctgcccaaccactatgcctcccagctaaaaccgagtctgctttcatctccaaacggttattcgcaaaccgaaaaacatcatcactgaccactctacgaggagcagagtgaccatccagaggcttccgttcatcttcactgaaattacgtccgatattgacattgtgaggcagaaacagtgatttatcatcgagatttctaatagcatgagacgaactcggtcttgctctctgatctggcctgccaattgaattcccccaaggcgctctatcaaaaacaggtcgatccggaataaccttcggagtcctacaaaggaaaaaatcgatcaggataaacaacaacagacctaaacaatcagaaaatgaaaatttctatgtagatctaataatagccctagggataaacgagattttgtccaccagaaaacatcactcgaatctcacaaaagcaaaacaaggattcgattgatctccgataagtatataaactaagaaggcgatctaaagggaacgaatcaatagagacttacactccaggagcggaagggagagggagatcagatggtattgagccgccatggaagtccttaagcgtcatggcagccgatttcttctttgacatcgttgcacaactttttctctcgcgtatcgctttgtttttcctctcttctccgattgaaactgaatttctcgccgccggagacgaagaggtggtaagagatcacctccctcgctctctcctctctcgcctcggtttatggttcgtctggttcagcttcttcagattctctccttcttcctctctctctctctcggattttattaatatcgaaaacctttgcttcctcaatggacggaaaaatgttttttttgccccttaaaaagaattaaaatacgaaactatccctattgaaatcaactatttacgattgattacgtggcagtctgatgcacacgtggatttttacacttgttgattcggctgatgatgtggtatacacggaaccaaactgaaatgctctataagtcttctggtgaatatggggtattagtatacaacacagtttataggtaatgtatatattagtaaatggagtgtgtattgctaggattagacaaaagtattatagaaaaatgtttagttgagttttagtttttaagcgagttgaatttattaattggaacaataatacatatattgctactagaactacctgactaagtagcattgaaacgggtacgaaaactagtaacgggagacgacaaagtaaaaaattcatagatccgggtgcatcgtagataaagtatattctatagtttgaggtggaatatagaaaggattcgggttcgcatcaggtgaggcaggaatgacccaggaatcgtcaaaaggcttggcgatatccatgaatccatactcgtcgtaagcctggacatagacgtggttacggactagggaaggaacggatttgtagctactagttgcagagacacagaaagattcagattttgagaggaaaatgcagagatctccaatgtctcgagtgtaaacagcatttccttcttttttttttttttttttttttttttttttttttagcatttccttctttgtcaagcttgaacaccattacagcctttgttgtcatcattctcttcaaatctttgcttttcttcctgtaccacttaaccaagaaagtttcattttctgctgactccaccaaatgttcgctcctgctacacgaatccaaaagcttccattccttctttgtcaacttagcaaggtttcgaaatcgcaccctctgcaacttgtgtttgtggagatcccacgatccagtaacgtgacctccagaagaaggtatgcagaacatctcaactctcttggaaaacatgacaggggaagagaagaagcttgagttctgaatctcgatgttgatccactcagggttactttgagcgggtcaacataagctgagttgtggtcctaagacttatagccacaacacagtcattttcctcaggagatgagcaagacatggccatgttggtgacaacttgggtttggcaatgaggtagagttactagactaggcaatgagatgcgtttcgggtctgaattcgatgtgcttgggtttagatcatcttggagacacactactccgtctttcaaagtagctacccacccatgggatgctcctacaattccctttcctccttccaccaactccacaggggccttcttctccaaaacccacatcgaattatcactactaattgcaatcatgagttttcccatacccaatccgcaaggttcagcgtcgagatgacaagcacccaacactagggcgtctctgagtataattgtagtgatctcacatcagcaaaacatcatcaaaaaaaaaaaaaaagaacaaagtgtgattggggagagaagagaatagtatcttacaaacagaggtttccggagggagaacactgaaggccggctcagaagcagaggagacatgagtgttcttagcgaagagctagtcaaagaaaccctaattgaagaaaatggtagcactaacagttacagtcttcttcaccctttaaatatagaggctgggcatagacttgtccagcaagttttccatctttcaattttggggaaagcccaacatttttaacctattacaggcccaccaaattttgcaagaaaaaagaagatgagaaaactatacaaaaacctaaagaataaattttgcatatacgggcttgtttcatggcttgaagattatcacaaagcaaggtaacaaagcttttgtactcaacaggtaaagctcttcaattcttgaattttgtccaactttcaaagctagtgaatcaaactcagaaaaccctaaagaattttcaaacgtctgcataggtttatgaaccctccctgcaatcactctacatagcacaacagctatcaatgaacctctatttcttccttgatcggtttcgatagattcaagagctgtagagctagttgatgctgtgagaactccttttatcccatctggtcttgttttaggactgaaaccatgtcttagaatatgacaaacttcacagtgatccgagaaacagaggtttgaagagctgttactgaaaccgagagtgcaagaaagagttgtaccgtggaacccaagaaactcgttgccatcagccatacaacgagagtgcttctttgaaagcttgtttgctcttattttcacgagctctctgtaatcttcaaagtctgcaacaactctctgcaagttctggattttaaagatcgctgaaatgttgttccctttcattttgcctagcttgtgagaatagcctgtgttgcagattagttccacagttgttcttgagaaatctcctgctaagagtctaacgactgcaaaaaagaaaaaacaaatcaaattctcctcacaacattggctaaaagtcaatgaaaaagttcatctaattcaagtcttaccagagtggttagagaggtaatgtgcttcaaacgcgtcaagatctctgactctctcatgacatttttgacaagcaagaactccgaaaccgcagatgtcagagccaacaacatcaaatctctctgaacaacgaccgggaagtaaatcagaagaagatgctccgctaagcaaacctttgaatctgtctgaataacctgcattctcctcaaatttcactgtgtttacaaacctggagctctcaagagaccgtgagctgcagcagcttacattctgcatagctccttcatctccattagttacaaagacatctctcagattcgacattgatcttcttgagcatccagatggattctccttcttctgaatttggatcttgtctggatcacaagctacagttgacttctgtgccttgcagcagctaagagacttcttgagataaagccaaaccccacgcatgtttgttcaagatccgtctttggattcactgggagagatgtgaattataaagatattctatgaagatttggctttgattcggacacagctctgtttctgtttgttcctgcttcaccatatctacacaaactgtttccaaaatgagactgaagatttccataaacgtatgatatcatgtcacaccatgaaagaacaaactaaaaaatcttttttagaaatagaaaattacaactaaaatttgacgtttatgttaaaaaaaaatgatcaaatcttaaccctgtatgattcttttccaattacaacctggaaaattataataatttttagcataatatgattacagaaagaaaaaaagatatgggaataataattttcacctctcttcacgttccaaaacagagtataacgccacatgctgcctctattgagctttgacatttttaaagtaaaaaagtcaaacatgtgatcaacctcttaattcaatatgaaattatatctttgtagtagaattatttactactatatccagtttacaagaaaagcatccaaactaatgtcattatatagaaaaggaatgaaactttacttacttggaaagaccaaaaccgaatctgtattcttttgtcttgcagtgagaggcaagcttaggaaagtaatctgatgctgtttccttattattttcctcttccttaaactttcatagaacaattgaaataaatacagtaatcaaataaaaatataaggtttttattatgaatcaaggaaaaatggaaagtgaacttgggttcttggtttctgttgtgatcatatgtgcagacattacagctacagtcctcgggatcgaagccgagattgctcaaagcaaggttctgttttatattaagagtgaaatgtagtttattttattttaactaccaataatcttttcttgtatttgatgtttatccttcaggcacctcatcatcatcatcaacaacattcaagacattcaggttctggatgtcgaagaagccccagcgatggagcatttgctgagggagtagctgcaatggtgcttctgtttattgtccatgtcctagctaatgtgcttggaggctgcacttacattcgctctaagcaagatttcaaaagagcaacggcgaacaagatactcgctgtggctttccttgttctctcctggtaatggaaaagataataggtttttggatttcattcaaaagacaaatttgaattatgtcagctgtttttgtttttgacatacctttgtttgtcttaggatcttttttgttgtcagctactcaacgctaatgataggaacattagccaactcgagaacgaatcgactctgcagcttgccacatcgttggttttttcttattggaggcatattttgtctaggacatggagtggtgacttcagcatattatgtttcagcaattgctgctaaaaaagaagacaaagagaatgcgcaacaagaaaatctagcaaatagaagccgcgcataacacgtcttcttcatcaagatacacaaaatgtttcatctgtaaataaacttaaattgcttcaaaaaagcttccttccattttgataaatccgcaatattccaaaataaactctttcaagaatcaatagaaaactaaaatataatataaaaaagccaagagttctaaacaaaagaggcagaaccaaaaaaacaaaaaccataaatatatctaagcgtttgatccaaatgcttcagatatctttgatagcacttcaaaaagaaaaccatgcttctgcaaaaagaactcaaattccctagcctgcatcgctttccactgctcgtaaaatctcttcatatcctttgaggcaagcttactcaatccttgttgagcagtaagttcatccatgccaagacccactatcgatctaacaagagaagactttgtaaaagagacttctccttcatccatcacctcatcttcacagttgtttttactgttgggcaaagaagaatcaagttcatgcttcacagactcaaacttactactcttcttcgacttctcattagatttcataccagatgcaagagccattctaatacctccccaaactaacttagacaattcaaaagccttgcgatcatgaggtttgacgaaagtaggttcaacaccatccttggctttaccaagattgttctcatacttcttctttaaagccctaagcttttccataagctgattcttactaacatcaaaactaatagattttttcaccaactcataaaccttattcgtattacttacccctgtatcttttttgtcatcaatcagaccttgtaaaaccacaatctcatcatcttcagtccaaagtcgctggaaataagttttcttcgtctcttctcctccgccaccactcttcttcttctcctcttcccctgaaaccttcttagccctcttcacatccatagacactgctgcttcatccacttcaagagaacgtttagccccagatttctcggaggttttcaccttcttagccctcttcacatccacaggattcgtcacaacttgatctttcttcttctcgagttcagagtctgaatcggtttcttcatccgaaccagattcggaatcggaaacggcgtcgagagtcgtcttcaaaggtgatgggttttcagaggaaacgtcatcttcatcatccgaagaagagtttcgtgcgatttctttaccttcttcgtcgcttgaagaagcactcggcggatcttctaacggattgaaacgtctcgacattgttttagggtttatgggactttggagagacttaagaggttgaaattgagatttttgctttgctgccttcaccacttcgttcttagggtttatatatattgaacaaagtgtctctctgttttccaaaaataaataatcaaaaaattattggaaaacgtataaaattatttattgtttttcctctttttttgcatgacgtttagatttccgatttccttccttaaaaatttggaaattagctatattgaccaattttatttccctatattttatctcttacaaataaatgttagatctctcttttcacaacaacacccgaatatgaccgctcattcaatcgtcgcacacgttgatagcgtccttcccaagaaatctcgtgagatcgaccgtcgccgccgcagacggaagcggaagaagaagaacaaagcatctcaggccgatgtagatgcaatggacgtgtcaaaatctctgtcaagcactcctactggtattgagacaccggatgcaattgaacttcgtaaggaacagagaaaggaacctgatagggctctataccaggtacttgaagaaaagggagagagtgttgttgctcctggaacattgctgagaactacacacacatacgttattaagactggtactcaggacaagacgggaaccaaaagggttgatttgctgagagggcaaaagacagatagagtggatttcagtttacagccagaagagctggatgctatgggaaatgttttacagtatgaggaggcaagagaagaggagaaatagcgcaataagccagtggacttgagtgacatggtcgtcgagcatgtgtagcagaatagtaggaagaggaaaatgcatggcaaggaagagaagaaaaagaaagatttcaacttctgaggtgcgttatggaagagacaaaaaaaaaaagattttagattctggacatgagacatagaaagagattcatgttccagaattattagtcttgagtaagagatcttgagtttttagtcttaatgcttattaaaaaaaaaaaaaaatgttagaccaccaatgatgtaaatttttaaataggtgattgcatcattgtgtaaacctaatatttacattttgaaggatttggtctttctgcagtatgtaagttaattcaatccccttattattctgacttgtaaggggattcaaaccccatcaatggtttctaaacttaagtttcttattttagagagataagttttattataaaaaaatgtgtgggttttttgattaatgaagaaaccatctccaaaatactttatataagaaattttggagagaatttctaaatatttaagaaacccacataattaaataatattatttttgttgttttaatgttaagaaacttatatttagaaaccaccaatgaaattcctctaaacattaacattgcatatagtcataaaaaaaatatctattttctttttggttctctttttaatatagctttcttggtcaacacttattcttaaatatcttagaaattaataaattatttcgtaactcgttgaaagataactggccacactttttgtgtatgactcagacatagtttttgtccactcggtcccatcatgcaagtagataaacactgaatcaccaaatcttgtttgagatttagaaaaaaaggaagctccaagagatggcaagagttgttaaaatcgattctgcagagtcatggaatttctatgtgagtcaagccaagaatcagaattgtcccgtaagtctctcttcctcttatcactttcgttttctagtagccaaaatgaaatctgatttagatccaagacctatgaaagaatcaagatcttaggattagagttttatggagaatttgatttacaattggttaaatccaaattgtgttactctttaagatatgaagttagtgagaatgaaccatgaatattaatgttcaggattgtgaatgaatggctctgtcttgtttgtttatatgaattaccaagaacggttgttcctttatggttttttgcagattgtggctcatttcactgcattatggtgtattccttctgtgtttatgaactccttcttcgaagagcttgcgtttaactataaggatgctctgtttctaatagttgatgttgatgaagttaaggtaaaactacttatgtgtctctctacttgatatgtctttctactttggcttctttgttgaagagaagtgtttaaccatcaagagtaaaagatttaaacagttgctaaattggtagatgattaatggtttttctttgttttttactatgttggattggtcaggaagtggcaagtcaactagaggtaaaggcgatgccaactttcttgttcttgaaggatggtaatgcgatggacaaactcgtgggcgcaaaccctgatgagattaagaaacgggtcgatggtttcgttcagtcctcacgtgttgttcatattgcttaagagagatttatagatacgagcagaatactaaataaagtttgtgtgaagtgtaattagtttgtaactttggtatttggtttgtgtgaaatatcaagtgtaagtgtaaatttttataaaagcaagttctgttataaacaagaactggatttatttaattttggttcttaacagggtaatttgaaacccatgtagcgaccagagacaaaatcattccaaacattaaaagctccatgggttgtcatcagtacagtgctaagtgccatgacgataccaactgcaaacacaatgatcgaagccctcccatacttggctataaccttcttaaccaccattagtccaaccagtgatgccacgaaacagaccagagcaaatatcgcagcggttccagcatgttccatgcctagtagtaggtactggattgcagacattgatgaagaaaacaaaaccatgaacgaacatgtagctgcagttacctgtagagagagcacgattaacttaagaatccaattgcttgttttggtaaaactttggttctgatgctgctagagaacaagactcaagaacgtacctctggagcaataccgatttggagaagaagaggactaatgagcattccaccaccaataccaaagaggccacccaaaactccagccaagagagccattacagggagcatcaacttgttttgtcttcctccaactccagtctcctgtggagtaatttcagtttcatattcatcaaacctgttgacttttgaccaacagaaaagctaatttaatcaacagcaagtagtatgtattggacctgttcagagttttggttactatgcgatgtgtggttgctttgaacattgtcactgaagtaaatgcagagagtaaagaagatagtgagaggtatttgaagcgaggagaggaaccagtagagagctccacatggcttgatcgatatgattccctgtgcaaatccaaagtatatcaacttcttacttctacatgccattaagatttcaataatttggaaagaattataacacttcaaggaacgttcaaataagtggagggaatgtggaaacagagcaatgagagcattgagatagaaaaatattcaaatcaatcgaccaaaaatcataaatacgcgtttagatacttaaattcatacctgaccgtatttgtttccgcggaaaagattaatagagaagaacaataaccaaatgatcactaaaactccaagcttcatccatggaaacctaatcatccctctctgtctcacatcttctctttcttcactcagaagcggcgatctcgctacctcgatgccatcaacgtctcttggactcttaatcttcgctctttccgactccaaattccagtaagaaactccctttttacaagtcttcatcgttgaccaggcgaggaacacagcgaagagaaacaacacaagccaatttgggaacatacggttacagatcacaccaatacttactccgagaagtagacatggctgaatagtaagagctaaatcgaagtcgattagggttttgtctcttgatttagggtttctcaggaaaagattgcatcccacgttagcgaaagagacgccggttaccatgaacgctgagaagcttgaagctgttttcatttcgagaccggcgatgattgtcattatcgagaggaagagtccaccgccgccgattcctccggcgctggagatagaggcggcgaagaacgagagaacggcggcgattatggtggggatggagacttcaatagttgattggctgaggtcctccgagaaatggagccattggcttgttgtgctgcggatttgactctggtctgcaagggcggatggattgaagatggtgaagatggtgattagggagaggagaagagggactaaattgatcgtcattttctttacttagggggttgtttgtaaccttttgaaagttttggggtttatttttgtttggaacgttagaaattttatgctcatttattgtttggtttatacttatatatgaatcaataaagggtttagtcaactgcaattctaatacaaggtatttattacggaattaattaatttaagacaatttggtgaaataaaaaactaaagatgacaaatgcaattatttttcctatgtttttgtagatctagtagtattatttttattgaaatatttattcaaaggagcttctttcccatatcctctagatttgtttttgttttaggtacttgtaaaaagtggtaatagcattatgtatttattagctgaaaaaataaagactatggcaccaagttatatttgtctttcttttacatatcaatttttggaaattaattaagagaaagggagaaaagtttgaatatttgcatacaagtttggaaagaaatacttgtgctatgtgtaaatgtcctttgactatcaagacgagaaatgggctagaaacatatatgggagacaagttctagaggaaaaatgatgttagcaagcttagttgacattgtggttcaaagtaagtttacgaacatatttaatttatagtgtgtaagaaaacgtactatttattttatcccaccagtatgtcatattattatttttatacccaaaagtgaggcaatcgtaataaaatgcaagaaattcaaaattgtcaatcaaaaatgaattgtttttcaaattaaaaatgcgataaatagtgttcatcacttggcacgtaaaaggttgacttttaatatcggaatgaatccggacataacacatgtccaacttggcatatttagcaaacttggactatttattagaagatagtgtttatagaagaaatgtacattaaaaaacggtaaatcgctaatcctaggcctatcctcacgattgtgatgtaatgtaacccacttccgttgatttcttcaaagaaatcaaaagttgtgggttcttctagagatgctactactacaacgatcgatggacgattgtcattgatgttatcgaatggtaaatcggacaaaagtttctggatatgctctcttataatatcacaatcacaaatgctatttcttttcaataaggtatttgggcttcattagtagctgtagctgaaccttttgtttgtcacatgtctttactcttatgctcatccatgttcgtttatatttttgacccactgttctgttctgagaccttaagtgtaagaagaattctcaagttaatatacatcttaaaaagcagttatgaaatatagccgactaaataaataattaattaaataaataaacagaggatatagtccataacaaaataagaaatgccaaaaaaaagagagtaaaattattacataaaccatttccactttaatacactcaaaacaaaattgattttaagcccaagggctaatggaacactcccaaggaagagtagggaacctctcactgtctttgcaataatcgtatacgacgagattacgctgcacccacgcataatccatcttctgtgtcttggacaaatgccacgcgtcgtactgatcccaccaattctctgttgtggtagagacgcatgcagggaatggatccttccaacggcagccttcgacggcgaagtccttgtaagaagagacgaatggagcttttttccagtcagtcttctccagaccaccacgtgtagcccaatcgtcagcgttccaaatgctggagaacaagtacatcggcttctggttcgggaagaagtcgttgtttggtaccttatcactgttcttgtatactcgaattggtaccctatccacgaagaacctggtttggattggattaaaccgggttatgcattgtaccaatcgataaaattagctttgattgaccaattcggttcgagttggtctagtttgagttctttaaagtttggttaagataggcttgctttggtcggtttgaactttaaaccagattggaatttttgtgtcggtcgaaatttgaatctgcaccatttaagttttctcaaagctaaacgtaagaaaacaggattgaacctattgtgaaattaatctgtaaactgaattatgttattgtgagtggaatgttggttctaacttcgaaccgatcataaacctaaggttccggtttctacccaaaattcccggtacagttcgtggtatctctatatatgtagccaactaaccattagccaagatcaagagaggacttacacaagctggtggttattccaaagaattgagtaggtgtgataatccttggtcgggtcgaaccagagggaatgtcgcatctcccgattcccggttccgttcttatacacattggtctgaataatgtaaggctgtccggttcggttccctagaaattcgaaatctatctcgtctctctccggtcctgccccattctccgaacacatctgctcaaccaaatttaatctaaaataattaatacaaaacaaaatcattggttatcttctttacaaaattgaaacattaaataagaacgacggctcacgtagtaagcggtgacgacgccggcggagtcgcctccgacgagctttagcttcatactaaaccatccgaatctatacatgtgctttgtctgaaatccacatcctgttttattttttatccaatcagaatatttaaactttcgatataataatcaagagactaagttaaaaaatgtcatgtagatttaagtaggaacagagtaagtatcagtgtaatttcgaaagactagaacggcattgatcctaaaccggaagcaaactggatttgaacgtaccggtgtcgttatctaaggaaagattccagatctctccatcatcggaagtcgtgaagtgattttcagaccacataatgttgaaattatcttcaaacgattgtgtcggtgttgctgcgatagaggacgacgccattagagccgtcatgaacaagaacagagccgtcatggcagaacagctcgttatgatcctcctttccgtctccattggttgtctctacttcgaatatttcgaagagagagagagagagaggtaatgcaatctacacttgttccgtgagtgagaagagtatagagctttcttgcttttattataaagaccggggaaatgactgttttgaccattaataattcttttaatatgctattgcgtttagacttttgatacggttttttttctaagattttcatgtaataatgatgtttacgataatttgtaaaagaaagcaaaaagggtaaatgaaaaagtttaattaaagaaaactaacagtaaaactcaatgatttttatgttaatcaagtgtaaactgtttggttataatacacacggtttagctaattaaaagccgaccggtttattcattaagttgctgagataggtcatttgaaccatattgatgagctagcaagggtactataggaaatatagaaaacaacagcagaacatggagaattggatctccaggctgccaccaagtggaagtgggatccatagaaatgttcatgtaaaagcaaaaccaaaaacattatttaactctgtactttaattctttggttaatcttcacttagtaaatctgatatgggaatatgtctaacaaaacccaaataatataggcgaacatgcttcggaacataatattttgttcaacaaaagaaagagtttgccttgcctctctcatattttgttagcccaagacaaggcacgtgaaacaagcacgttatgaataagaaagcagggaaataatacacctggagttactaaattattaggttgacaaagattagtttattggattgtctcttgcataatccggtattcttacatttttacataattactattttttgtatggatatgaatgtttcagatctaagattgtagactgaggtttatataataccacaagtatatgcaactcgaccttgttactttagactataatagagtagtattaagattatgataatgacaaaaatgatttcttatacattaataataccatttaaatgatttacgagcgatgaaataaatatgcatggtctagttttatgtaaactctctaatccatgtatgagtctctcttttttgtattactaagtggtttctcatatgtttcctgtaaaagaatctcaacttgtcggcatgtcggtcctaataagagaaaccagaagtgatcatcaattttattgttaattatagaatgtttaagtttcacatatcatacaacaagacagtttggccgagtggtctaaggcgccagatttaggctctggtccgaaagggcgtgggttcaaatcccacagctgtcaatttcttttcctttttttcccttctttaaaactaaaccctctaactcatcaagaaggttcaatcaaacctataaacacctagaattttgaacagttcttcacttctccagtatttcccggcaattccagatctctctatctcctttcttcttcaaatccaatcagagagtgatctaaaaatggtgattcaaacgaatctctcatatcgtttcttcatcttaattgtgtttttatttaccctagcgaatccaaaatcagattcagatctcaaaaacgaactagtctccctccgatcaaccgccgaatcaggcgtgatctccttcaacaacgacgacgtttccaaattcataacctccgtatccactcctagaccttactcactcatcatcttcttcgacgccgttcatctccacggcaatagccagctacgtcttccagagttccgccgcgaattcagactcgtctccgccactttcatcaccaacaacaacaatgaatctaacggcacaaagctcttcttctgcgagatcgaatcaactcactccgaggcttctttccgccgcttcgccgtcgagtcactaccacacatttccctcgttagccccacgacagagaatttaacagaatcagatcaaatggacggtggagatttcactggattagccgaatcaatggcagagttcgtcgaacgtcaaacaaaactcaccgtttgttcaatccaacgaccaccactcatatcaaagacacaaatcggaatcatcgttgctataatcataatctcgactccgattctcatcaagaagattctaaaaggagaaacacttctccatgaccatagaatctggttagttggcgcggttttcgtctacttcttcagcgtctcggggacaatgcataacatcattagagaaatgccaatgtatatcaaagattatgaagattcaagtaagtttgttttctttatagaagaatcagagatgcagcttggagcagaaggtttctttgtagggtttttgtatactgttgttggattgcttttggcgtttgttactaatgtagttgtacgagtcaagaaactcgatgagcaaaggatggctatgcttttggctctgtctatatcgttttgggctgtgaggaaagttgtttacttggataattggaagactggttatgaaatttacccatattggccatcgagttggcggggatgagtgatcttcacgtaaggttagtttttcaagattgtggaactgattagttagtgttttggctttcaatacttgaacatgcatatagccaagtttatagtttaaagattcaataattgcagtttaggattcacgaatttgtgctaactagaggaatgattgctcgaagacttataatgcttatggtgttgctttgcatccattgagaaagagtactctaccaaataatcgttgctttactatgtgtgaaggtttggaaaaagattgtatgcaatacttgacccacaagaaaccttcttaaaagtgaaaagattctctctttgttcttttcttccagctttgtttaaagttaagcatctaattccttcacaccctagaatttaattacttaagagagctcatgttaatattactactgtttggttttgctaagaaaatcaattttattttggaaattttgactatggcagagacaaataaaggaattgaagaagaagtggcaagtgcttttgtgaatcactactaccatctctttgacaacgatcgatcatcgctttcttctctctacaatcccacctctttgctcacttttgaaggccaaacgatctacggcgtggataacatctccaataagcttaaacaacttccgttcgatcaatgccatcatttgatcagcaccgtcgattctcagccgtcttcaatggccggtggatgtggtggaatcctagtttttgtgagcggtagcatccaattacatggagaggatcatcctcttaggtttagccaggtctatctcttatctatttgtaatcgattcgaaggtttcatttggttaaaacaatcttaggtttagcttaatcgatttgcataaaacaaaatgttattttcattgttttctagtttccatcggtttatcttggacccccgctataacaatcttcaatttttaatgttgttactaaattatatgaatcaaactataagctatatagtatgagcctgtattattttatttttgttggatttttagctgacttgaataataacattatttattaattgcagacgtttcacttgattccggttctgcaaggaagtttcttcgtccaaaatgagatgtttcggctcaactatggttgaacttattataactttaatgtttgtaatcgattgatctctcttatacgccgaaatccaactgataatgtagtcaaatattttatgaaaatctatcgtttatcttgactagtaaaacatattgactttttctgttattttcatatatgtaaacaagtttcgagttattgaaaaacattcggcaattatagattggaaaaatccatacaatataagactattagtgaacgtagattcacatgatccacttttttaaaaaaagccgaataagacttttctctgctctcatataatctcgtccactcaatagttattaaaaatagggatatctctgtgtattttaaaaatagtgaaaattgacgaaaaaatcgaacaaatatgaggctactactatcttttgactcttgaccattctcttttactcaaaaacatttccttctcttccacgaaaccatttttctctctctcccttttcctgatcaacttctcacgaactacaatatgaagaaccggagcaaaaacttagccaccctgagtttgatgataattacgttattgacatggtcggatatcgtagtaggacaagaagcactactaggaaagaaagtattgccgctatgccacagagaatgtatgccaatatgcatgaaagtgatcgaagccacgcaagacatttgcgaacctgcatgccaatctggttgtcttcagcttcaaggtagaggcaccggactttcagcttccgatcaaggagtcgatatggtcattgcataaattaatatctttaccggaaaaagaaatcaagattttgatattaccaacatagttgcttgatgtcgttcacatgaatagattgtaaaatagggtttcatattttgtatgataaatgcatcatccaatccctccaaaactaaaacaaaatgtagttaatctacagaatccgacatcgtatacaatttttgtttttataattcatggggacaagaagaagatcccttatgtgttcgtctctttatctcatgatcaatcctaagatcattttaatttattaaataaaattacaggttagcttacaaacaaacagtatatatattgatacaaatccaacgtcagaagaattcataaataaatatcgatcgagtgagagacagtttatagttcttctgaattatttttgcaacaaaaacataacaaaaattattcgtcacaggggttatgacatttagcaaaaaaaattactttgtcataaccaagttatctttatctccgttgttattttaaattgaaaaaaatggatgacatactagtaatctagtattttcataattttcaatcaatatgtattcattgatcgtttaggataatgttcaattctggaattttgaacaatcatatagctcgttaaacacacacagaaaacaaatggctagtaaataaaacgatatgtccaaaatattcttgccatattaaatttaaaatattttgaatttatttgtctgagatgtttatccccaagcccccagctctatactaagataatgaaaagaatatggccaccaattatgcattgcttagaataatcgcaccagttgcgtcgtctgtaaatgcatcaactacagcctgaaagaaaaaaaagtgaaacttaaaattttcagaaaagtacataggattaactttgaattatatattttgggaccattttctacaaatacaacatatttatttgacataaaatagtgaagcatacatttttttttttacgagaagtctgtattattgatgataaaagtagtgttttaatcattgaaaattcaactaaattgagaaaagtgcatctagaatttttattttctttcttactttagtggacatatccctttggaaattgaatactataaaagaatgaccctagtggcccggacaataacaaagttagaaaacaagaaaattataattaatttacacttgtagatcgtatactataatttacactagcagacagtcacaaacgtcgaggacaataaactatcactaaaaactaaaaagtaaataaaattaaggagaaaacaaaaataaaataaaatattctgcatatttttatcaataatagcaaatcacacagtacgagtcaaatggatcagacaagtgatctcaaactcgggaagaaaatttagcaaaaaaaaaaactcgggaagaaaaattgataggagacaaatataactaaaataaaataaagacaaatcaaaattttaaagtattttctttaacatttacaaaaataatcgaagtttaaggattttatagtttctatcatatgtagacgcacaagtgaaagaaaaaaaaaaaaaaaaaaaacgcacaagtggtatcatccattgttcttcgcaatcgaatctccaatattttatttttattgtttcttaattcttaaaaatgggtcgggttccgggccgactccatctactccaaaaccacatgttaaaaccgtgccaccactcagagctattgtagatctcttttaactttttcataacacttgtagaaaaataggaaacgaatctggtttaaaatgttttttttttttggataaatcttctttatatgttatttaaggttaattacaaaataagaataaaacttttcgttgtatttagaaaaactgagtagacatggctatataactagttatcgtcatctgaccattttttttttttggctaattattatgtaacaaataacaatataggaagttcttacttaacgatcaatatggctaaaagataattgaataagctaaagtcgttggttgatctgatgaaatggttatttcctataaattctattgttacgaaaacgttttagaaagaagaaccgtttaaaagttatcaatcaataaagcaattaatcgaaacagttaaagaagacgattagagaaagtgactgaaagcactgcaagatggcaaatctagacaacgttctttatcatattttttttttttggattaaatatgttgaattggtgaaaaaatgcacatgtttttatcagtcatcgttttccgcgcatctctaacattttcttcattggtttttttaacagaaaataaaataaataaagccaattccgtgtactacatataagaccacatcttttaccaagccaccactccaacccattgcatgtctctttaacctttagttaacattcttactatagaaaatttcgaactgattaagtcacagaaagtttcaaaatgattatacttaatcagttttaatttcattttaagttaataatatatatattacgataaggataaggtttaaaaaaaaaaaacagagtaggtatagataaatcagataatgactgataccacttgttatttttcattgtagctatagtcaaacgatatatttttgtgttacttttttgttgtcagttatctttactggctaattattacgatgtaagtaaaaataggtatagccgagttcatacttataagtcaatatttctaaaagatagtttgaaaagatcgatgagctaaattctttagtttaactgtttaataaaaagtcattggttggttgcgttcaatgtaatggttatttctttcgaaatcaatttttggtttattcagaaagcatatgtaacgtatatattttataaaagacattacgtgaatatttttataaaacaaaaagccattattaagatgatattacgttacttatttaattcaaacgtgaaaagtacaaacttttttaccgcgtgtttattgtcaatttttgccacataatttagctatctagcaaatttatatatatatttttttttatcaccatcaccaaatattaatggtggtattttttaataataattgatatacatctttggtggttgtcagagatgaaaaacgccagtgatagaaatctatagttgtcgtcgttagtgtgtcgagcgtcaatggatcggatcagatgtaatgaatttcaaacaactgaataagatagctagcactttatattttagaaaacaaaatagtttaggtgtagactcttttttttatattaaaaattgttttgccactgacttaatagaacaccaatttgtcgtttttcttttttcttatatagacggaatcccgtgaattcgtgaaaacacgtatatttgttctttttaataaatgtggataacttttaacagattgatggggaacatggtctttgttaattcagtatctcgtaaatttggtcatgtagttatcaaaaaaaaaatttggtcatgtgtacgttttattatatgaatagtattgcgatttcaatctgttaacgttatctatcaaatattatatttcaagaatgtaaagtttcacacatacgtcatttggtttacatgattttaatcaaataatttttttaaatttttttttagtaattaaaatttacgataaaaaagaattgtcgtcataatataaataaaaattggatatgctaatttggttatatgagtgcttctctatatttttaattcgagtgctgggcaaaacaagagtcaacatgttcatttaatttgcttttaaaaaaaagacaagcacattgttttacattaatttatagagtatttggtgcaatgataatgaaaaagcatgtgcaaagaaaaggaaatcatagcacttcctcatgtactccactcactagcgttttctataaaatgtcatgatttgcggtagtgaaaggccaacacaaagaatcattttacctctaaagccaaagaccaacatgtctaattcaaaccaaccacttctttccaaaccaaagtctcttaagcacaagaatctatgccttgtcctctccttcgtagccattcttggctctgtggctttcttcacagcccaattaatctccgttaacaccaacaataatgatgattccttattaactacgagccagatttgccatggagctcacgaccaagactcatgccaagctctcttgtccgaattcacgacgttgtcgctctcaaagctcaaccgccttgacctattgcacgtgtttttgaagaactcggtgtggcggcttgagagcacgatgaccatggtgagcgaggctaggatccgctcgaacggtgttagagacaaggcaggttttgctgactgcgaggagatgatggacgtatcaaaggatcggatgatgagttcgatggaggaacttcgcggaggaaactataatcttgagtcatactcaaacgttcatacttggctgagcagtgtgcttacaaactacatgacatgtttagaaagtattagtgatgtctccgtcaactctaagcaaatagtcaagccacaactcgaggacttggtttctagggcaagagtggctctagccatctttgtctccgtcttgcctgccagagacgatctcaaaatgatcatttccaatcgcttcccgtcgtggctaactgctcttgacagaaagcttttagaatcttctcccaaggtaataaaaaatcatgttcaattcttatacttcaattaataaatatggccaatatatttctaggaaagaaaaagtttcggttgtaatgtaacaaaaaaataacttttacctatctttcgtcattcaaactctaaacactttgaccttttactagacacttaaggtgaccgcgaacgttgtggtggcaaaagacggcaccggaaagttcaaaacagtgaatgaggcagtggcggcagcaccggagaacagcaatacaagatacgttatatacgtaaagaaaggggtttacaaagaaactattgacataggaaagaaaaagaagaacttaatgcttgttggtgatggcaaagacgcaacgatcataaccggtagtttgaatgtcattgatggatccaccaccttcagatcagccactgttggtaatataacatttttctttcatttgtgtcttttaagttattacattcttgtatccgaagaacttaaaatattgctttgaaaacatgtacagctgccaatggagacgggtttatggcacaagacatatggttccaaaacactgcagggccggcaaagcaccaggctgtggctctacgagtgagtgctgatcaaactgttataaatcgttgtcgcatagatgcgtatcaagacacgctctacactcacacgttgagacaattctaccgcgacagctacatcaccggtaccgtagatttcatcttcggaaactctgctgtggtattccagaactgcgacatcgtggcacgaaatcctggagctgggcaaaagaacatgttaacggctcaaggacgggaggatcagaaccagaacaccgccatttcgatccaaaaatgtaagataacggctagttcggatcttgctcctgtaaaaggatctgtgaaaacgttccttggtcgaccgtggaagttgtactcaagaacagtgatcatgcagtctttcattgacaaccacattgacccggctggttggttcccatgggatggtgagtttgcgctctccacattgtattatggagagtatgcaaataccggtcctggagcggatacgagtaagagagtgaattggaagggatttaaagttattaaagactcaaaagaggccgaacaattcactgtggcgaagcttattcaaggaggattatggttgaaacccactggagttactttccaagagtggctttgattttaatgtctacttgttcttgtactttgtgttgtgttacctctgttttagtttgatgtattttttctggtttgttttgtatgacttacccaataaataacatgctctgtttcgcaagtattaggttaataatgtttaatacaataaatttagtgatgtggcatataatattttgaataactttaatactaattaattgaatttttttaatatataatcatactgccactcatcagttataacaccatcattctacccaaaaaaaaaattataacaccatcaattttttttttttttatgggattattatatgtactagatgacccaaactttgagaatattttcatgaataatataaattttttaagttgattacattatttatcaaaaacagtagttaccaaaaataatagtttcatattaaattttacacgttggtcatataggggatttttgcgtactgcattctgcattgcatgtcaacacagtgtatcagcatgtgatataattttactataagtagagcattcaccagtcgtgaattttcggaatatatattgatgataacgtcggttgttaaatgacacaaaaataatgacgtcggtttgagaaccgtcgttacatcgtccgacgcaaattatattggcttcagttaatcaaatgacggtaagttttacgtcattataatttgcatcggtttaatgagtttagcgacggttttcaattttgacgcaaaagtcaaaagctcatgctttgtatcacttctacaaccgacgcatatccactgtatttattttctatttttttccgttttctattatttctgtatttctcaatacaataaaaattcaaactaaccaaaattcagaaaaaaacagtatattatatataaaatcaattgccgcccaaaaataataatctgttttacaatgaatataactgaacaattatacatatatctagcaaatctatctcttggcatttctaaagtaataatctccattgaagagctacaactttgtgtttgctaaaactttttcacctggaacaaaatgagtgtaatgggagatttaaaaatcaacatatgcatacaaaaatattccagaaagaagagagagataataaggacaacaaattttgagtcacatcatatttgttgtgatgggctccatcccattgataaataccttaatcaaccgattgtcagctgaattcctcatgctaatacctaactatacaatattataattgccatatactagaaaactagcagattacacaacaatatagaaaagacacaaacataagaaagaagcctatgcgacaattactacagatagagtgtatcttttcgggtaaacattgtaacgtagtgaaagttgagagtgaattgcctaacaaccgatagaatgaaccaaaaagaaaaaaaagaacatcttttctaacgcccaaaaaaaaaaacctagagttttttttatttattaggtacatattgtcttttctagtactaaaacaataatggctaagtctcatcctcacacgcaagagattaaggttgagaatatattgtattgttgttagcataaactaaaatggatgaaaccaatttctatcaaatacatattttttttagccatttagagtacattggaaaacaagtatttcaactaaattactctaagacaatttttcttcaatcttttatgagataaaaattttggaccacttttcttttctgttctttgtggataataaaaccaaacttcactgaattatagcttcaattcacattgtactgaatttttagattgatctcaaaataaagttttttttctaaatattatcttttatcgaatacaattaattaaagggtaaattgattaagttgctttgctttgtatataagaccaccatcgctccatcctctttcatcagttaagataatatatattcagtaattaagagagaagaaataaacacaaaaatgttggttaaagttttctcttttttcatccttatgataacaatggtggttattggtgttagcaaagaatattgtgatgacaaacagtcatgtcaaaactttttgttggagcttaaggcgggttcatcgtcactctcggagattagacgtcgtgacttattgatcatcgttttgaagaattccgtacggaggatcgacatggttatgattggtgtgatggatgatacaaaacaacatgaggagatggagaatgatttgcttggtgtgaaggaggacacaaaactatttgaggagatgatggagtcgacaaaagataggatgatccgttcggtggaggaactcttaggaggagaatttcctaatcgtggatcttacgagaacgtccacacttggctcagtagcgttcttactagttacatcacatgtatcgacgaaattggtgaaggtgcctataaacgccgtgtcgagccaaagcttgaagacctcatttctagggcaagaatagctttggctctctttatctccatttcaccgagagacaacaccgaacttatctcggtgattcccaatagcccttcttggttattccatgttgacaagaaagatctatatctcaatgctgaggtaataaaacagaacccttatattttgaaattataatttgataatcgtgaaaacccatattaaggatttacttgatactcaagtaacaaatatttaggatttttatatttaccttttattgtatttacttttaggtagataattcattttccttagagatcagcccttgtataaaaatagaccttaaggtcacgtaatgaagaacacaattcgatcgatatgtttgcaactcttaacaaaccttttatccttttttttctttctttctactgcttatagaatttcttccgtttcttataaagcaggctctaaagaagattgctgatgttgtggtcgcgaaggatgggaccggaaagtacagcacagtgaatgcggccattgcagcggcacctcaacacagccaaaagagattcgtcatctatataaagacaggcatttatgatgaaatcgtcgtcattgagaatacgaaacccaatttaactcttataggtgatggtcaagatttaaccatcatcacgagcaatttaagtgctagcaatgttagaagaacgttcaacaccgcaactgttggtaagaatttgtattctcttcttgaataatttatagttttctcttctttataccaaactataacattcttaaagacattactaattattctagaaatatatttgaagcttctaatggtaatggattcatcggagtagacatgtgcttccgaaacacggccgggccggcaaaaggaccagctgttgccctccgtgtgagtggtgatatgtccgtcatttatagatgccgtgtcgagggatatcaggatgccttgtatcctcacagtgaccgccagttttatagagagtgctttattaccggcactgtagatttcatttgtgggaacgcggtggcggtctttcaattctgccagattgtagcaagacaacctaagatggggcagagcaatgtcataaccgctcagtcacgcgcatttaaggacatttactcgggcttcacgattcaaaaatgcaacattactgcaagctcggatctagacacgacaaccgttaaaacgtatcttggaagaccttggaggatattttcaacagtcgcagttatgcagtctttcatcggtgatttagttgatcccgctggctggactccttgggaaggagaaactggtttgtcaactctccactaccgcgaatatcaaaacaggggtccaggagctgtgactagcagaagggtgaagtggtcaggctttaaagttatgaaagatcctaaacaggctacagaattcactgtagccaagctcttagatggagaaacttggttgaaagaaactcgaatcccatatgaaagtggattgtaataatgttgttccatgcttcacatgtataacgtactaaataaaagatattattcttctataattttttccatgattttctacaaagatggtaagaaagtgatatcagggaaatatcacgaagggatttactatcttgaaggcacggttgttaaggctgaaaagagtgtaccacatgctgaaaatggtggaaaaagtgttgtcaaggctgtagttggagtgaggaagaagaagtcaaggaaggtgactttcaacgtgaatttaatttaaggacctactccatatggctttggaacaaaggaatcatcagttcaaggtggagatgaatcctcaacagaagaatcagattgtttagaggaggttaaatctgcgaaaagtgaaggaccttctgatgaccagccactgttgagagatcacaacaaggagtggatgttgtgtgatagtaaaatgaaggatgaaaggattacgatgccagaaagtatcattaagaaaggggactcgttaaagttgaaatgaaagagttggaaaaagcttcaaggattcagggaatggaggttaacagagataaagctaagggagttctagctctgttacaagaaagtcaggaaaaggaagctaaaactttcaaaatgaatgaagctacagtagttggtaccaactacatctcatttcagattaatgagcttaactacagaagggaaggaatcgggaaccgaacttatggacacaagatttcagatcatcacagatttggtatccaaaggagatgttgtcctaaacaagatactaaaaacaattgaaccaacagatgttatgactcaagcaatagatggagaggactttcatgcttgctacgatctcctcaacatcgtaaggaggacgacacagctccaggtaactccactatcgatattgtacgctggaaggaagaacagcagagaaacaagtcaactttgggaaaaattgttatgtcgataggaagacttcataagggttaatggagttacctgtaggcgcctggaaatacggtgaggagacttatattccaggtggagctgcagattctgattccatgtggagtttctgtgatgaagattcaagaaatccgagttaggatttcagcggctcaaaggggaaaaagaatcagcagcaagagaggagatgattcatggttaagagagtacctgaagtcatcaaggagaaaaagaacaccagttcatcaaaggagctgctgtgaaaattcaaagttagaatgttatgtaatctatgaaaatcgaaagagacctaatgaaggaagatcaggttaagaagagttaccggagctcatcttaacagatgaaggcttcgttgttcattggagaaacagtcctagtgtttgtgacttgatcttgcaggactgtgaagaagctacctcggaatattttggagccgtgttagaaagtgataggttccatgaaagtttcagcgagaaaacttggtggatcaagaaacaaaaaaaaaggagggaattagggttctcgggcaaaatccagaaattgagatggagcagctacagcctaaaggcaatagaaattggggggataaaattgctcacctttggatttctggaagtgacagtggaagatggagctcgtcggaagaaacctaccgtggtaacaaaattgaaatttgtcaactttcaaaaattttgaattctcagaagatcttaatctctaagtgtgaagaagagacaagagagagattagatttacctgagatttgcagaggaatcaatggtcggattcgcgggaaaagaggtggagctcaccaatggagactgaaattgaatttgaagtgtctcaaaatttcagaagagatactctctaatcatcacaacaacgagaaaatgagagattggagagtaccatgagttgtgcggtgatggtggcggtccgattcggcggagttaaacgcagccggagttaattgatggtgaagatgattgtgatgttgtgatgtgtcacggacgagaggcctggatgagagacgaagagaagtctcttgtttcaccagaacggagagcaaccaagaaaaggtgaaggtttgcagttgctttcgccggaggtagccatcaaagtagtcagaatctgagtttgattttgtcatcgaaaggcaagctccatcttctccatgtcgagaaaaagagaactcggtggggaaaggaggagacgatggctgacgggaaaaaagtcctatgttcgtcgaaggaggttggaatccggcagtggtgttgatttcacgagatgacgttggttgtcggagatgtcgatgtcgtcgtggaagtgtgttgttgccaaaaggtggagattgttattgagtttgaccaaaacacaacattgggcttttattgggccaaacggagttgacataaagagaagaagagcaaaagtaacccatcacatatatatatatatatatatatctacgtgggatatgaatcataataatatgataagagtgatagtggtggtaactagatgtcatatttaatgtttagagagaaagagaagaaacgagagactaatataaatgatttaatgtgaatatgaattatttaatgttttttaataaataaatttatatgcattttgctttaatatatgtcatattttcttatgtttatacaatttttctaatataaaactcataaattttaaaaatataattcaataaaatagtccttgtgattaaatggctattgtaattaaatatgaagtactaataaatttagaaagactaatagtatattatttattttagtttataaatttaataaaatagaaatttacattttgataatttttatattatttggttataaaatattagaaatttttccatattttcaaatattttcatattttcttattttattttttttcatttcacaaaaatctaataaaaaagaaaataaaaatagtttcataaaatttaattagcgagattatttgttgtttaaaatcctataaagacgtactaagaagaaaataattttgacttttctataatatagattagttatttttttatttatttaatttctcctaaaaccattaaaagagaggctcttagatctcagtcaaatagtaacaacatgtttttcaaatctaagaaaagaaaattatcttatgggttgtcatattgctgttaaatcaaaatcaaatatttttcttacctaaataaatggtcaaattatcaaaaaaaagaaaatattgaattgtttgacaaattgctaataaattaaatcattttattatggtacataatctgtaagcatttaattttgaaaaacttttcagcctatataaatctcacgtaaattccaaaacacacagaacaagaaaaatggttgcttacgtcgataaaaacttttcattggcttgttttttggttttacttctttttgttgactcatcgtatgcaaggtttaatatgttggttacaaaagatcagatccacacaatatgcaccaaacaagatatcaattcttcatattgttttcaagttctaaacgcaaatcctgaaattgctagattagattttcctagtctcttcaaatttgtgcttaattatcaggctcaaaatatttcggatacgctgaagcagtttaaattatcaggaggttacacgccgggtgttgaatctcaatatagcttatgcataaaattatatggatgggctttcgataatcgtgatagtatcctcagatatttggctgccaaagactataacagcgtaagcactatgatcggtggaacgttggaagatatgtttacgtgtactgatgatttgtcaacaatgaagccagtaccacaattttttatgacggaaagtaatttgattaaagaattatctaagattctcgcagtgattcttgaatgtttcataagtaagagaaaagaattctgtaattgagatctataataataataatattagtatgattgttttcattataataataataatattagtatgtttacatgtggctaactttgacgctttctcttgcttatggctctttgatgatgcttgtctcttgggtcactcgagttgcagaagctcttaaaatcgatctcgatttctggaaatctttgttcccggtaaaggatctaactttcattactgttgtttcttcataaattgtcttgctttaggtgtgtttgattttgaatgggacacatctttagattaagtgtgtaagtagtattgatggaactgtatgatgatgattttgattgttcaggtggctttggcgcatacaattggacatgttgaagcgatagtgagtatgtctaaagtagtagtgtccttcacacacacatcatcaaaagcagtgaggcagcctttggcgtccttgtctcaagcctcttcttgggcgagtcattccctctacatgtttacctctccctcttacccattatttgaggatgtgctcttgctgctgttacggagctcaacttcagtatgataggtacttaacaacatcctattgataccttaagaagctaatgcaattcaatgaaatgttttgagatgttgatatacgggtgtttcttgggggttttcagggtttatgggggcgatgatatcaaatttggcgtttgtgtttcgtaacatattctcaaagaagggaatgaaggggaagtcagtgagtgtgatgaattactatgcttgcttatctatgatgactcttctcattgttactcctttcgccaattatgtggaaggtccccaaatgtgggttgatggttggcaaaacgatgtctccaaatcggaccaaactttgtctagtaagtttatattgatgttgtacaatacaaaagagacaaaaaaaatcaaagaagttgatttaaaaccttgtaaggtatttgattctaaatgtttgaattcaggtgggtagtggcacatagtgttttctaccatttgtataatcaagtctcatacatgtctctcgactagatttcaccactgacatttagcgctggaaacacaatgaagcggatctcattcctcgttgcctctatcatcatcttccaaaccctcttaaacatgtcaatgccctgggtgctgccatcgcgattcttggaactttcatttattctcaggtaaaaaatagagtgaagaaaaatcatattctgcttgttctttgtctaggaatgcttgaacctttagtgataactctatgaattggccaatgtggtatcgcattttgaattcaatcttgaacttaaagctcttcgattcctgagctgatgatgttcttttgttcgttttgaatctttgagcatgctaaggagtgaggaagttggaggataaaagataattcctgtgaagatctcaagaggcttatgtaatcgtaggatatgtgcaaatggagttggaagatcaaacaccttaaaatctttgtctacttctacatgattgtataatatatactttaccttcttccagtaaaatctaaagttcaactagttgactaatctaataaagttgatgatacgagacctactaatatatcatattttctttttcttggaatgtttattataagctt

SEQ ID NO: 35 - DNA, 91566 bp, Arabidopsis thaliana
tgaggagatgcgtatgtttcaggtcatggaagctgcattttcccgggaaggtattgcaagttcttgcattgaactcccttctggaaactcttttatctatatgtttagacgagataaagtcttcattcttttaattggtactcttacctcattttgtgcagcaagaaggtcggaaataggacacagacagtggtgaattcgactgaagttgccgcgggtgaagctacttcaaggagtctctcaagaggcttctgtgtcactattatgattcttgtaacattttccatattgtaacccttttcgtgatttttatttttggcgagttaccaattttaggtcttgaaacattttattttgttataattttgtaatttgttgttgtggcaataaaattaaaagaaatgaagtaaaaacagaaaacgcatcaagatgttatcacagcagcaaatatcccaaataaacatgaaaaagcagaattgttcagaaggagatgaaagtaaatgactgaaacaaaagagagataagaaacataagaaacaatctagtcatctcttgctttccttttacccgtcttgtcgatttgcaatgagactaagcttggaacataagaagtgaagtcttcgggcggagcatctccaacggtaaaagaggtgaagtatccatctcttccaaagatgaaagcatttccgtggttgagatccaactctgtctcttgaccgaaaactacaacgacttgcttctcctcgtcaacgatgaatctcccagctataaatacatccggaaaaccatccagcgtcgccaagtccacttgcaaaaactctctccacgacaccttgttgggctcgatctcagtcgaaatccaaatacctaaagtgtcacgttgatataacacagcaagatgatcatctctaacacaagatataaccataatgccttctccttcatcacccaaagactcaaacggcagagacagaagctttccaaaactctctcttgtgaagtcaaaacagagtaaattatattcccaaactccttcttcaattacctttataacccgaaagtaagcatttcccttcaaagacacgcttcctagtcgccaaagatgtatagatttctcgagatcaacattaagatctttccatgaatcggattttaaactgtagatttcataaccaccagaaacagaattatttctcaagattttgtggttacggtttttgctgctatcatatccgaaagcatacgagcaaaagttctgataactctcgaacaagctacggttttgaatcaacctagtttcccccaagtacatgttacataccatgagcgtgtagttgctgtagtggttattggagatgcaaaacaataagccgtcgcagtgaaagagttgagatatcgcgaatccatcaaatgcacttacttgattcactgatgtgtcaacaaagtcatcgccgccatttaggtccagcttcattgaacagatcttgtcaccaatgaggataaaccctacgtgactgcttttccttgcggttgctttaccacctacaagattggttttcgatgaagcctcccatttcttgcacgttgatcggagtgatctaagagatgtaatgggaaccctagcgagaatctcgtctaccaaaaccactggaagggttgacatcgtcgtcgtcatttctctgaacttcagaaaaaccaaggactgttaggggttgtttcgtttttgggttcagtgtagccactagacaaatgtgttagtttacgatttaagggtaagaaatcttttctaaattggcaataaatgcttaatacagaaggaaatctggaaaagattttaattatttttggtggattttattccatctttgtatccctaatctacaaaggtgattggttaaaatgactaacagtaatcttgttcaaaaggacgttacacgaaacaaaaggagatgatgcaagaagaaaaaaaaaaattattgtaatcagtggaactaatttaataatctctctcgttacttttgcccggttgatagattcttcgtatatgcactaaacttggaacgtaagaagagaacacaagtggatcaaaataatatctaaacattttaggtttcgagatgtgatctgttccgattttcacaacagatttgtccaatgatgttaactgtttcgtatccacagttttcgttcggtctatacttacgagatttggaaaccacaacaactttcttctcctcgtcgatatagaagctctcaacacgaaatttactcgaaaaatcagagagcgatgtcctttccattgtgaagaacttggtccatgcatgatactgcattggactcaattttagtcgttatctccatgaccaagtccaaacataagtcgtagggttgatataacatagcgagctgctcttctctgatacaagatatatagagtcacagtctcttcatcactagagtgaaacggaagaggaagacgcggtccaaacctttctgatgtaaaatcaaaacagagtaaaaaaacaatacgatttgaaactgcatggctatctgacttctttttgtggagcataataataagtatttcccttcaaagacacaccgttgttgttgttgttgttgttgttgtttgtcgtaaccgaaagcatacatgtctaatctgtggaacttatggtatttgcttcttggttggatccacctgaattccccttaataagggttccacaccatgagcctccttctccttttgtgtatgacgcataacaatcaagccgtcacagtgaaatatattagatatatcgtattgatcaactatatatatttcctttaaagatggatcaacgaaatcgttgttgtggattccttggagatcaagtctcagggaacaaaccttagaatacattactacgaaacctagaaattgcttacttgtatctgctttaattaccaaaaacataattttccgacaaaacgttccaggataaagtgttccacgttgtacaagtacattgcacttcactcagagatatcaatggaactctagagaatatctctcccaccaaatctactgaaagatcggacaaagtcgtcattatttgttcgtctccttaaatgatgaagtgagagacgacacttgtatattctttgctaagaaccgtcatttgtgatcaaagaacaacttgaccaaatgatagatacttattgttctggtatttacaacattaagaactaattacaacttaatgaagaacagaacttgctggtctttgtgttagtctgactgtagaccataagtattagagatcttaactcattcattgatctgtaaataattcacagaactaacaactccttataaagcaaacaaaaaaggaccaatccaaaaacttgaacttttcctactatatacatcttcaaaattagctaacaaaagaaattaaaacttcaaacaagaaaaagatctaagaacaaaaatatcagtctcaaagattgcttgcggtgtacgtcaaagagagccagaagaagatatattaggttccaatctcatacttgaaccaaccttggtttcaagctttcattagtaatttcgagagcgagtcaaggtttgatcatccaatgggtggcttagcgattccttgtcctgaagatacctacatcactgcaaatccaacattttgttcttccgagttgaaaaatagacttactcattttaaacgtaggagtttttccccctcttcttcttaaagtttgaagatagaatgacaggtttttgcaatagacatgatcatgttcatgtcaatacatttaggatcgatcttagaaaaagaaagacaatagactaaaactagtcatctaaattttattgccaagagatgtacttcgaaaatgctagtatagattttagtctcttgacaataaaattttgtataaaatttgtctcctaaatagtatgtttttgtttttgttgtattccccaacagctaattctgtcttctggtatatgggtatacttcggttagtttcggtttgattacggttcacctttcaaatttaaacattgaaattgtaaaccatcttctttgtccaaaacgatgtcgtataataataacacgtagccgttaaatgaaaaccgaagcgtcaaaaaatcaaaatcgataaaaactaattagggtaaatgtcaacaacaatccgatttctgagaattgtcacaagtcgagcaatgtcgtcgtcttggtcctgcaacaaatgtactttcctcaattctgcgtctcagaaactcaattgcatgatctgcttggctcctgtatctctcccttctttgtctcctcctccaccttctctctcaatttccgcgaacgatgaagctaaatgggcttgcaaggcctgtacttttttgaacacgtacaagaactcaatctgtgacgtctgtggaacacgatcgccaacgtcttctctcttgggatttcaggatttgactgattcgggtctcgagagtaacgacgctgattcctccgtcgggtctgttttctttcctctgcggcggtgtatcaagcgtaaagctatggatgatgacgtcgtcgaggtcgatggtgcttctgttgtttgctctgaatcgcaaggtgtcatgaagaagaacaaagagattgaaacgaaaggtcggtttttttctactccctagggttttaggtctttgtgaattttggtatactcattgtggctcataccttagatatcagtttgaaagacgagacttattactgtatgattcctgtttcatctaaagcttgttattggtttttgattactgctaaattgtgtgagtttgatttccattgttcctcaatgcagaagtctttactttttttgtcattgtttggtttttgtaggggtagcttctgattcaggaacacctttaacttgcttgaagatcttgagctacaatgtttggtttcgtgaagaccttgagttgaatctaaggatgagagcgattggtcatcttattcagcttcattctcctcatctcatatgttttcaggtcacttttacattttgctatagaatgatttctatctgcaacatttagaaatagctcagctttcttgacaagtggtttttgtgtggtttgtaggaagtcactcctgagatatatgatattttccgcaagtcgaattggtggaaagcgtattcttgttctgtctcagttgatgtggcagtttcgagaggctactactgcatgctggtaaagattgtgcttgcttggcttaggctcttgccgtctgtatctgaataattccctgtggttcttgtaactgacccttatgtgtaatttgcagttgagcaagttgggagtgaaatctttcagcagcaaaagctttgggaactcgataatgggaagagaactatctatcgcagaagttgaagttccagggagaaagccacttgtttttgcaactagccatcttgagagtccctgtccaggtcctccaaaatgggaccaaatgttcagtcgagaacgcgttgaacaagccaaggaggcaattgagattctcagacctaatgccaatgtgatattcgggggagacatgaactggtgcgacaagctagatgggaagtttcctttgccagacaaatgggtggatgtttgggaggttttgaaaccaggtgatttgggttttacatatgacacaaaagcaaacccaatgttgtccggtaaccgggcattgcagaaacggttagaccggattttgtgtcgtctggatgattacaagcttggtggaatcgagatggttgggaaagaggccattcctggtttatcatatgtaaaagagaagaaagtgaggggtgacattaagaagttagagcttccggtgttgcctagtgatcatttcggtctgcttgtaaccctttcgccaaaatgagatcaaactattcagagctcgaagttagtcttccttagtgaagcttttgtgactaggttaaaaaactgtatgaaacaccaaatttggtgcgtagggtttctctgtttcgaactgatgataaacagttcttggtttaagttttttttgttttttggtttgggaacggccttatttcctgattcgaactgaaagatcagtcttattgttcaacaatgcccccaccttttgtaatgaagattctgaaactaatcacatattaatatgatcgttaaaaaccagagagattttggtatcagagggttttgcatcaaacaaccttattcattgatattaactgaaaaaacttgtttaatgtacagaacatattcttaacaaaatgctacatcaattgtatctgtctcaacaatgaagagtttgaagctaaagttctaaaatgagaaaatggtgaaagaagattcttgaagtataccaaagccacaaaccctgttcttctgtttgggtatattcacatgttcttcacggtatggtaacatgaaatcaattgaagagttgctcggttatctgactagatccattggataacacccgaggatacggatgaaacttgcgaattcctgcaaaaccagaaggtaagatctttagaattggtgagccttaagaccagctataaaagctctggggttacaagattgagacctgtagatggccaagagcgtgctgagcacgtgtatcagccatggaggcttcaaaatcaatgtagaataagtaatcaaagtacctgtcatcatcacaaaacaatcactcaactactttgtcaaaaaagatgtctgcatgttgtgtgttagaaatctacttacttagcgcttccattgttagaaccatcaactactcttaacggtcttcttctctgcggacgactttctatctaaagaagagcaaaagttacgtcatatatttctatttttggaatgaattactgataataggatccaacttttccttggaacttaccttagataagttaatgcttcgtaaagcaaaaacagccaaggccttgaacagcacaccaggaccttcttctagcgagaacacgatacttgtctgagagaaacagaagcattactattgggagttataacttacaagtatcagccgaattagttagtacataaagatgtgattaccttatatggtcgatctgttcttggaatcataggctctctcgcaagtatcagaaagcgagtcacattgttaacatcatcctgaaaaccgtcgaaagaacaaaatatcaacttaaagataacggatattgatatgtatcattacattccttctatgtcataaatcattccaccttacccaatgatgtgcattacaatatgttaatatatttccgtaggagacaacattattagtaaagaagaggatggagactaattacttgtatgttctcagcaagaatatctagaccatagatatttgcagcccgtacactcgcgattgctcctacgtcgatcttaccacttgaagaaacagtctgaagaaacgtgtaatgtttagtcaaatccatatgtgaactgaactaaaaaaacactctttctttcgagctatcacctgagcagcagtggcagtatcttttgcagaaattctctgtatgcctaaattgttaagtgaattcacacattgatcaagcgcctggagagaaggaaaaaattaaacgaaatgtactcaaaacaagtgaacttagcagcgcctgaagaagaagggagcaggagaacctgaggatggcttagaacacatttaatatcttcctttttaacaccaggcactcctaagagacaatgattcacaggcaagtggacttcttggacaatgtgaagcctatgacgaagaagcaaatcataattacggtggatactaccacctactgaattctcgatcggtaatactgctttatccaccaaccagagctcaacagcctgaagaatcaatcatataaagacatagtaaagcaccgtacctttttgtgtagggatagaatatattagaagtgaccgataaatcaaaacctggaacgcagcttcgaactgttcacatggaacggtttcacaatttggaaatgcttttagtgctgctgtctcactatatgcacctggtatcccctgcaattggcgagagtttgtaacacaagaaaattaaagaaagagaaaaacagttttgcatgtaagtgaggaagctaatatttcacctgaaacgaaattcgcacttttgaatcatcgccatcagaagagtaaagactgtttgcagttagcggttctgtaatcaactttaaatgttaaggcttgccatgagaagcgattaaaagtaataagatcgataataacgaggatatgacagacaatgcatttgagtttcataatttttctaggggcttgttatgtaaatgttcattaacaacaattggaatagcgagtatcgtctcactcaaaatagatcgataacacgtgtagcagtccctaaggcgcgatgaatatgacaatgattgatccatttatgagactatacgacaagaaagatcgactatgaaacatcaaatgcagctactaatatggaatattaacacaacatattgaatactccattttcaaaacagattgctatacgtgtaacaagccctatgcctcgatgcaaaggacaatggttgatatatttatgagactacatgacaagaaagactaaatctgaaacatcagctgcagcaactaatttggaaaaattggtattaagaaaatatatagagtagtccattcagaacagatcgatactccattttcaaaacagattgctatacgtgtaacaagccctatgcctcgatgcaaaggacaatggttgatatatttatgagactacatgacaagaaagactaaatctgaaacatcagctgcagcaactaatttggaaaaattggtattaagaaaatatatagagtagtccattcagaacagatcgatacacgtgtagaaagccttatgtcgcgatgcaaaggacaatggttagtataattatgagactacacaacaagaaagatcaaatctgaaacatgaaatgaagctactaatatggaaaagagaatctactattaaataaacaaattaagtacaccattttcattaacaatgtttgaaatacaagtatcctagatcgattcacttatagcaaagccctatgtcacaaatcgcagtgcaaatgacagtgatctaatcattcacatgactacatgataagaaaagatcgaatctgaaacatcaagtgcagctactgatatggtaagcagaaggaatctaatgtcaaaggacatttactaatcttggatccaagaacacaacatagccacagacattattaatgtcaaggggcataatttagtactcaatcatttcttaatttcaacaatcaacagaacaaaagttcaagatattttaatacaagtgtaataaactataacagaaatcagcaaagactttctgtaaaaaccatgcaaggacataatcattgtaattcttcacacaaaatctaggctatcagtaagaatctatcagccacattatctctgagcgtatataccccaacaaaggatcctacagatcaaaattcagctaaacaagatccaaaatttacaaatttcgaaagtgaaatgatcgtcagaacacaagaaccaatcagcatttccataaaccaacatgttcgatgaaatcgagaagggaaaggagatgactcactaggaagcatacttaagtctctgtgaaaagaaagagattgagtctcctgagtcaaacccaattcatcagaggactttttgagctcgcggctaaaaggaatctcgccttcaatggcagtgacagctctctgagaagctgaagaagagcactcccagagacagaaacgacggcgtttatcagcgtcgaattcagcgagacccatgagaggagaacgatgatgagtcgtttggggacaaacccaaatgggaaaacacctcagagccatagcaaagcagggagattttttcagaggactgaaatcgagcaatgtgaaggtgagattttggaggaattaggtcaacaaaagtctcaatggggaaatggggttggtgagaaagaatggagagtcatagagataacgtcaagtcacaacaaaaagtctggatttctggaaggtctttcaaagaagagcaaaactcagaatactcttactcagacggaaaggtccacactttgcaagacgttacttacatttcatacacacatatatcatttttttattaattaatttcaccgacaaaaaggtctgttgtttgttttttttctgtcaacaataaatagttttgatgacgcgtggatatttatttgggtgaattagctgtgtagccatatttcgacaaaaaattaagattataaccatataatttacgtaattcagcaagtaaccaaaaactctaactaattacaagtctattcctgtattatttccctattttccaatttgccatgactcatcatcttcttcgttttgttgatcagatattgatctaaaggtaatattccatatgttctaaaggtaatggattgtgaatcagatattgatctaaaggtaatgtttttttaacaaacctttttcattcatcatcttcttcgttgcttcttctcttctctccaatccaacagaaaatttccagaaaatttaactttttttatatcaattcattctaatttaaaacatctattgatttaagaaaactaaaccctaagatactatatatagaacccaaacaaaaataattaaactaaataaaatcatctcaagtttcagtttttagaaatctgacaaaatcatgtttatatacttttaatctcttttctcctttccttaagcgaattgaaatcgattcgattttgggtttaaatttgtgttaggaattttcaattttagatattgatcaaaccagaaaatattcaataagatcttgtgagtctttgttttcatttttcttcgttctaactagcaaatagaatggtacaaaattgaaagtaaaatagaaaactatagttcggttctgttttaattaagttaaagtagaaaaaaaaagatgagaggcgagagagatgaaacaagcaatggaagagaggaagaagtgattaaggtggtggtggtgtgtatggtgtgtatggtgtaggtcgtagtaatatttgtgttggtggttgcagtggtcgtgtgtcaattgcggccgcaataatggtgatggtggtagagatgacagcgtaatggttgtttctatggtggtgacgattgcagtggtgatggtgatgatggtatgacatttgtggaaataatggtggatgcgatgatgacgacggttgcaagggtaatggttgtaatagcatagaagagatggtgattgtgtagataagggtactttagtatatattatagtttatatacaaaatatcatctctgttttttttgttggttagtttcttaattatagttattttgttaatcaattttgcaaatttccctatttattttgttgtaaagtaaatggagtcctttcacaattgtttcaaaggatttgggccaaaagagttcctaaattttttaaaaccttcttgagaaaagttttgtggtaaatttggaaatttgttatagactatggtatatgtaattaatttcttgataaatggtgaatgaaaaaggttcaaaataattatctccaatattgttatcatctctatttatgaaaaaaaatattttgatgtccacatttgctatacatgaattggccaccaagatcaagggtaggtctaaagctgaccattaatcaagtgtaggtcttagataatgtaagcaatgaatttctcttacatatatgatatatttttacaaaaattagcaaattatttagatgactaagtttcacaaattaacaccattgatttaatagcttatgagagtgtttttgcatccttagaattaattaataccattgacatttaattttatcagtttttagatgaaagtgttacaccttagatttttcttttatttttttgtaaactttccaactctgattatgtccaatggccaaaaactagaaatgcagggttcaaatgttcaatttttcaaaataaattattggtctatttatacacaaaaaggtattataggtctaaaaaagaatttaggaaagactagtgatttttattgcaaataaaagaaaataaaaaaataaactcgggttggttgctcccccagccggagaataatcgtcgactggtgaagaagaagatgtacgaatcggcgaacgtctccgacgacgcagatcgtacggctttccggcgagcagagaaaaaatacaaactttactatgaacaggattctaagttctctagaaagtaagccaattttttatcttctctccacttgcgtttgtttgaatccttccacttataatcaatcacttggaactcgcaggaagaagctaccaaaaccaattgatttgtctgagttacttgatttcaatttgatttcacaaaatttcaacaatgacggtgttttgccagacggaattagggtttcgaaagttgattcttctcctgtgttctgcatcgataatcgccctggtaagttaaaatccccaactttcaatcatctgtgttaaattagaatccaagagctcagcttttgaactattattatacaggtttttactttatacctgatgcattgagtttaaaggagcaatgtaaatggattaaagagagcttgacgagttttccgcagcctccgaatagaacaaaccacaatgcaatttacggtcctattgatgatttgtttgattcagctaaagaaaacaaggtattggttcaggatgatcttaccaacaacaagtggaagttctatgaagaagtagatattgaaaaagcaacacgaagtagttgcaaatcagtttcagcttcagttcttttgaggaagcttcgatggagcactctcggtttacagttcgattggtccaaggttgaatctttaacatcttttgatgagttttagtaacctattgcaatgaatctataatgagtgctgattctttcggctttttttcagcgtaactatgatgtttctctccctcataacaacatccctgacgcactctgtcaactagctaagacacatgccgccattgcaatgcctgacggagaggaatttcgtccagagggggctattgtaaactattttggcataggtagagtttaccttaaattttgtattttcttgctttggaaagccttaagatgttgaactctgaaagccttttaactcattctataggtgatacccttggaggccaccttgatgatatggaagctgactggagtaaacccatagtaagcatgaggtatatctcgttgccttctgtttttgctaaacgtaagaccgtatgatgatgtacaatagagtaactgtatgtcctcttacgtagcttgggatgtaaagctattttcctcttaggcggaaaatcaaaagacgatcctcctcatgctatgtatctcagaagtggagatgttgtactaatggctggagaagccagagaatgctttcacggtaatctgcttcactttcaattggatggttactctttcgaagtctctaattgactaattgagacagctaattaacagattggtttgctataatatctgttgttgttgcaggtataccccgtatctttacgggtgaagaaaatgcggatattggtgcacttgaatcagaattgtcccatgagagtggacattttttcgcagagtatatcaaaacttcgaggatcaacataaacatcaggcaagttttctgaattgcctgaattctcctgctttcgagcaaaaaaatttgtattactagtcgcatcgagccagaagatttgagaagcagcaactacttctttcgcactttcttggtttcttatgttcttattgtcatagaatctctttatcatgtaagatatgaccggaactcgagtacaatagcagatcaatttctgctgaaattttgaggttttaggccatttttaaaaagaattgtataattacaaaaaggaaatatcatttttcagatagcatacatattttacattgtggttaaggaaatcaaagggaaccaagtaaggtgactacacaaactaacgcctagctggcttgccaggcaaggtaggtatactctgttcgtctctgaagaaattttgcggatccacagcagttttcactttcaccaaccgatcaaaattttcaccgaaatacatcctcccgaaaacctctgctactctgtaactgtttgggccaggggtattaactccaatatccagatccctgtaattgatataagtgtgtctagggttcttggtcacaaaaggagccatgtagctataaaagcttttcgccttctgcaagaaactggtttccgcttcggttcccggatctttccagttcatcgaatgctggattttgtaaagcttcttcctatgtgggaatggtgtcttcgttgtagccaccgtactcattatccctccgtaaggattaaacactaaccctatcttcccaacttcaatcattttcttgaacaagaaatctaaaccatctttagtgatctctttctcaacgaaatcagatttccttttcccgaaagtcgccatatcagggtttcggtccagtagaatctccggtttaatctgcgtagcgttatcgttgtttgcccaccacatcaccgactgtatccaagtcatctccgtgcagttctccttcttcaaaccaagctccgggaattctttggttagcatagacataacagtgttttggtcccccaagaagagagccacaaccgatgctcgaaccgtttgcattttattcctagtcaccggctgcaacaatagcctcatgaatagacctggatcggtcttgggtgcaacaaattgccatttatgaaccatttcagtagcattttcgactaagtttttctctactctgaaaacggttacggtcggtggaacagggacgagtttgatcttgaaagctaggataacaccgaagctagcaccgcctccaccgttaatggcccaaaacatgtcttctcccattcctttccgatcaagaacctgtccattaacatcaacgattttggcgtcggtgacgtaatcaacggagagtccgtattttcggatcatgtttccgtagccaccaccgctaatgtgacctccggctccaaccgtgggacaaactccggcggggaatccatgacttttggttttttcccaaatcctgtagtaaacttcaccgagtgttgcaccggcaccgacccatgcagactctgtggcggggtcgacggtgatgttacggagatttgacatgtcgaggacgaagaaaggaacgtgagagatgtaggaaacaccttcgtagtcatgaccaccgcttcgagttttcagttggatgtttagcgatttcgtgcagatgacggcagcttggacgtgactctcggaacgcgccgcgattacgatcgcgggtttcggagtcgctgtggtgttgaaacgcgcgttacggatgtaagcgcgtaagacgggggtgaaagcggcagcggtttttggtaaaacgacgtcggctaatgagttaggaggagcttttgtttggtttgtgaaacattggagaaagttttggtagattgtttcaggcggaggttcgacggcaagagaagtagagatgaaggaggagattaagaagagaattaaacaaaagatcttcatttttttttttttgattggattctatttggtgttttctgtagtataaatagttacatgtagtctttaaatttctgttgtgattcttatcgttggccatttttaggatttgttgtattggtcaaggtttctcctgttttttttttttttaatggtttaattgctcaagattttaatatagtcaagttaactatagaaagatcacaagtttcagaagtcaagttaactttagagattttaatatagtcaagttaactatagaaagaacacaatttgtttgaaggcattgtgagaaagataaatttttagaggtattggattaggttgttttgggaagagaataacatgtctttcaacctttatcttccttttttttgagggatcagttatttttgttttcatattagaacttgagatattaatgttctataaaacggtgaataaaagaccaaaaatgttttatactacaaaacaaaattatttttgattcaatctagagaatgaaaaaaaagagttacgaccatgacaagttatttgttattcaaaataaattttgttgaaaataatttaatgttcagaatatttgttctaaaatacatttagaataacaaatcttgaagcgattttacacttcgttctaatgacattaacaaactgaaaagatatacaaatataacgtttagcaatctttttacaaaaacataaggttatacttttcagctaataagagtagaagttattgtaatgatttgagaacaacatgtattttcgtgatgctactaaattaatatgttttgagagtttatgaattttgagagtagtgttgttatatgggatctgaagcatccaacatagcgaaacatcattcgttccatttttttcggtggcattctttcgaatttgcgtcgagtgtcacttttctatctacataaaccaaaattctaggcactgaatgtcaaaaaaaaaaaaaaaaaaatctaggcactataataaatgcaaggaggatgtatagctgatatatgatcttacaaacaaaaacacttcgaacaaaggcgagaacaagtaattaagcaatgtcaagagcttgtggcgcaaacgtaatgtttttttaataatggcatgttattttttgttcttgacgaattccttaaattgacatgaggataacatgcacataaacaaattgtccttctttgaatcattctgaaacttctcccttacacttttctttgaatgtaaagagtgattcttacatgaaaacaaagagtaataataatactttacaactatatcaaatcaaagatttgaataagcattttataaatattggataaacataggagagttttatcaacatccctaattccaatcatacatcttccgcatacggtgtatcaaagtactgtgatagatcccatcttcttgagcaacataattatacgagccaccatgaggcattctcttgtcttgaacatatgcgtcaaacttcttttgtaccttgtaatcagctcctttatacattgtacaccagaaaagtgtttctcccataacgtcatcgtggaaactaaaaccccaatcttctccaggtttcatatatctttcacgaacatcattgtccccagatttacaacgtaccttgagccatttgttgtgagaaagactgttcctgaataacaacgacgtcttttttcctttaaatggattcgaatggccatatgcattgctaatcatgcatagggcaaagacaactagaaagattgaagtatttttcattttttctttctagatgcttagaggttttgtcatcggagtaattttttatttacggtattgtatatatagacatatatgtatgctatttttgaatttacgttcttattatatattgctctcttattattagtattttctattaatgatttgcggtatcaaatcgtttcaaacacaacaatagatatggatggttgagtggagaacaatatatggatttagatctttgagtaaatatttccaaagaacatttgttttcaacacggacagtaatttgacgtgatacatttaccaaatactacctattatattctgccaattcgttacaaacagataaataattcgattagtatatacatatctatcgtttaattgtgataactttattattatattaacactaaagttgattaaaatcgtcttgatttcgattagatgttttattttataacattaaacacacatatttaaaagatgagaaattaaattgtatgtatatggaattttaacattaaaaaaaaaatccaaatgaccaatccggtttatgtcggtccggtttgtattaaccaatcttaatttcaatttttaccatataaacctaaccagactattacaatgaagaagaagaagaaagaaagtgacacaaatcggactctccgttcatcgccggtaagtttctcctctttatctccggcggttttgggctgatttttttagattctgtctaaaactgctctaatgattcaattccttcacgagtttacggattctatgccgtgaatttgaaccctaggtttgcgaaagcaatcgcgagttttgcaatttcgttaaatttctgtctcaaagatgtaatctttttgatcatttagcttccattgctaccgtagcatcttattctttccctgaggttttgagttctctcattctatgtgtagcgttaacgagaacgaattaagattttttgaggtttttagggtttcttatttccagatacttttgctgggatcttacttgattccttttgcagttttttcttgtttaacttgaaatctcatgattgatacttggtttgagcagttatttgaaggggagggatcaaatggataacattgtggactcattgaacaaagcttatgagaagtttgttcttgcttcagctggtgttcttgagtctaaagagagtgcaggtggacaaaaagctttgctcactgatactgcgttggagaatttcaaggagaaatgggaactgttccgtgtggcttgtgatcaagcagaggagtttgtggagtcagttaagcagagaattggatctgagtgtttagttgatgaggctactggtttaactactactgcagcaggtggccaagcaccagcagcggtgactggtgctgcgactagtctccctcccattagtgcagtaaggcttgaacagatgagtagagcggttcgatggcttgttcttgagctgcaacgtggctctggtgtagctcctggttctgttcattcatcctctaccgggtttgattctagattctctgaagactcgactcaatagcgtgcctagttagtgttaagttcgacaaccgcagctccataactctcgagtcagtcgttgtgatgggaagagtggcctaatcagtgttatgttctgttatttcatgggattgagccaagctagaagcaacactgggggtatcatttaggacttatgactcttactaaatattgggctttttattctgaatctcaagtaaagaagctgttctttttttgtgtgattcttcatatgttattatgtttctgttgtttcaaaaagaatactaattttgatcttgtacatgatgtgtttttggttttgtattaaccatgattatcaagagtttaaaaatgtaaacgaactagtataattttgagttttgattacctcacgttcacagcaaaatcgtgataaacgtaacaaaaacatgaacactcacaacaaaaccgtgacaagaaaagttagaaacacacttaagacttaagttatagggtttgaacccgagacgtctcacactcctctcagataacagagttagtttcgcaaactagagtgattttttgctaaggtttaagcaaacgaatcgccaaaaccaggatacagaggctaataagatcatcttcaaaagtgtctcactttttctaacctcgcctccaaagattcttccttttccgattccgatgaaaaggaattttgggttttaggaaagttcgattggttggtttggaaacatctccctaacacacgcagcaaacaccttcgttgtttacggagacagtcactttttgtgtacgtctctcttctctttgttaattctgatttctgacaacccttttgttcaaatttcttctgattctgttgtgtgttttctgatttttcagatatatggattcgaatcaatcgatgcggctcctcagtgcttggattggtcaagtgagatttttttttgtattccttgatcattgacaggctttagctcattaatgcttcaacaaggcctatggaattaagtgtttaagaacaatttggtgttgccaatttgagtcttcaagccataactttgtttctgttgaatttttgtattccacagattggtgatcttggtcttaatttgctatggcgttttatacacattgttgtgagcttatggtacattgtctctggcatatttgaggcaatagaaagctatgccataacgttaggattgaataaaaagtacggttccatcgatcttgagaaactccggtgtctagctgttgtagtggacatcgaagcagctcaagatgttgccaatgttgttgagcttttgcaatggctaaccaccattggggttaaacaagttggtctatttgactctcaaggtacatgctttagctacttatctcgttttttcacgttcattaaatgattgctgatgttggcttctttaggtttattgaagaaatccaaggatttgatccttgaaaccgttccaggttccatgttgttagaggtatattaatctcatacctttcatttagtttgctgctttacttgtgaatcaaatctttagcttatgttgttagttatgtagctcatgatataaactttaccttgtcaatgtttttgtttttctttcccaggagattgaaaaggatgttgcgcctgacggaaagcgcattgcattagaattcatttcatcttcagacaataaagaagctgttatgaaagcagccaacatacttcttcagagatacttgaaatccagccatcctgaggacgacaaaggggaagacttttttacagagtctcatttgaatgacgcattaagagttgttggtttgtgttgactctctcatattggattcaagtcattattaagtttatttccaagaatctgatcatcaatactatggcaggtgagaatgtgcatgtacccgatctgttactggtttatggacctataaggagccacctcggtttccctgcttggagacttcgatacactgagatagtgtacgtgcttttaactctttttctcttatatctttagagctaaatctcatagagtttgtcttttttctcggtatttgtttgttgatagacatatgggaactttgaagtatatgagatatggttcccttttgaaggcaattcacaagttcacaggagtccaccaaaactatggtaagtctctcatctcccactactttatatgctcttctcacacacacagtttagatactaaagtttctacctctgagctggactgagtcacctttttgccttttgagtctcaaatctttactccaaatgtttccacctatgaatttgattgagccacccacccctaattattttatgttgcttgactgggatggttctggttgttcttgacaggaacttaacggtgactagagagcagagtttcagagatcgatttttggtttgtgattcacatatttgcaatgaattctaaaggagagattattggagagcttttgagtcagtgcagccactactgttcccaatttccggcaattctatgtaccaaagcaacatatgcattggcattgtataggattaagtagtaacaagctggacctaaccaatccggtttttccataaagttccggtttgcttggttatcgtgtgtaaacaaaaatagaacacaactttcagatttttcagtaaaaaaataaacagtttagttttctcattctgtttagtagacaataaaaccaagaaaaccaaactgatttatgcacaaatatcagttacaaccgttcatattcaaatgaaaatggaagctttgaacattgcaatgagctgttgttgtgcattgtcctgtatgctgcttcagtattctgtttccaatagaccatcaatgagcccgaactcaagcgcctgcataaaaaataaccaagaaaatatcatatgcagaattcaacatcgttacagaatgatcatgaggaacataagaaagacaaagtccacgagatatggcgagacctcttaattcctaactatcagtgagccatgtctcgttgaaaaggaattcgcgttaatgtttcagataccagaggcaaattacctcagatgctgataagaaacgatctctttcagtgtattgctgcactttctccagaggttgtccagtgaaagctgcatacatcctgtcaattttctgcatgtacaaccaaagagatcaatcagtcaaaggttcaagttttggctccaaaaactcgatcttccatattcttaaagcaagaagcatgagaataaagagagagaaagagagagagagacttacttgtcgggcttcgatggcttcattgacctgtctcctcacgtcctctacatgtccctgcaaaattatgttagcatgaaatcaatgaagttcatatgcatataagatttccaacgagaatggtatattggtattgacaaggagaattcaagagccatactccgcatccagtttgtggttgatgtatcatgacacgagtatttggcattgcatagcgcattcctttttcacctccagcaagaagaagtgctccttggcttgcagctactccaaacgccactgttccaactttaggctttatctgaagatcattttcaagaaaattcaataggttaatatatcacagtttctaggagatgaaaacgttactaggaaaagaaaacctacccaagacatacagtcataaattgctaggacggagtaagtactgccaccgggacaattcaagtacatctgaaacaaggattacttccaagtaaatatgagactttacagaattgaaaaatgattgggaaaacaatgagctttcagctaaccaggatgtcggatttatcatcaatagatgcaagggttacaagctgagatatgactcgctgagcaacctgtgcgttaattggttgcccgatgaagattatgcggttacggaataacacagaagagaggtctaaaggtcctccaggggtcatcactgaaggcattactggggggtttccctttttcgcctctatcactccaaatctaaaacattgcaacatagaaacaaaaccagctaaatacattgaaattagaaaggttcagcgatctatcaaccaatttacaaccgtattgtcatcggttgacattagtactaagaactctaacaatcaatccagctaagagaaacagataaaactggatacataaagtacactgttgacgacttaagaatgttcaagataggaagaggcagtgagctattgcaatttctatggtgagaacataaaatggacacataatcaagaggcaaaacagaaaagagctgaccttggagccttgttgtcaatctttattggggatccagaaacattactagaaagtcctgaaaacatcaaacacaacccaatctcagaaacgaatcaatcaatccggaaactcttcagcatcaaagagcagcaagcagcttaattccaacatttaaaaaaacctaaaacccaaatgctttagagctagtagcagcaagcaaatgatttaaagttaccagctttcagagaatctccatatggactctgtagagcagaaactatacgtcttataggattcctacacaaatcaaaattcataaatttaaggtcagcataatcatttgagagtgtgtgattgcgtttagaaaagttagtagtacctttgattgtgagatagaaaggaagtgggtttagggtttcgagttcgagaagagaaggaaagaccgagaggaggtgaaattgctaaacccgccattaccagagctcagctttcagagtttttcgggttcaggcgtggatagatgacagaggacggcaagactcaaggttactgtttggccacgaactttaaaccgaacccaaccaaggcaacagcaacagtgacacaggtcccagagactcaggtgcactcagaaggtttcaaaccaaattataagcccaaatccatgattcaataagcccaaattacaaacttaatatttttaacatgattcaaaataggcccactgtatctgttaattttgtaaaattagagacggttttgcatttgtgaaaggaaacaaaaaaagagaggttgtgcatgttgttcaaactcttaattagtcattatgattcattagtcattgcttgaccacaacacttaattcacatagaatacatcacttatacttaattagcctttttgcattgactgattattttttgatgcaaatatatttctgttcctcatatgaatcccattgctttatctacaaattcatgcaccatttctctgtgcttttgaattgtgaaaggatcttctttgaatttgaataacaatctaaggtttagtcatttgttgccaaaacaaagatctaggatactcaattttaaaaggaatttaaacaatggtcaaaactgtgaacaaaaagattatggagttttaattttgtatttacgttgactgttgtcagagataaatatgaaacataaactttttattaaaaagaagttattcaactctctcctttagagttttaataacagtcgccggggaaaacatggcaaggtcttcgccggcaaatattccggccactactatagatgattatgctcacagtcccgtccactacgccgtcgttgtaggagatcacgccggtttgactcgtctggtttcgtctttgcctaaactaaccgacccggaacaaatccacaccgagtccgactcaatgagccaagagcgagtcgcggagaaaatctccaccgtcatcgaccgccgtgacgttccctttggagagacgcctctccatttagccgtacgtctcggcgacgttttcgcggcaaagactatatcttccgccggtgctgatatcacgctccaaaacgccgccgggtggaactccttgcatgaggctttgtgtcgtcggaactcagagatcacggaggcaattctccgggaccatcaccgttcggcgtggtgcaaatggagacggagacttcctcatctcatcgccgtactcagccgcatgagagatttctacatggagatatcatttcacttcgagagctccgtgattccattcgtcggaaaaatcgctccttccgatacttacaagatatggaaacgcggtggagatttacgcgccgatacttcattagccggattcgacggtttcaagatacgccgcgccaatcagagctttctctttcttagtgatggagatgagtttcttgatgtgtctcctggtacgttgcttgtgttaaacagagacgataaaacgatcttgaacgctttcgaaaacgctaaagatccgattagcgatagcgatatagctggcttttgtggtcaatctagcttgtaccgtccggggatggatgttactaaagcaaagctcgttgagattacgaattggcgacggcaagcgaagattgaaactgtcggagagtggaaagctaaagcttacgatgtcgaaaacgttagttttagttttaaatcaagaaaagtcggaaaagagcagggtttgcgtttggacgagactcgtcggagtgtgtcagaaccgttacggccgcagaggcgggagcagaggaggagatcggtttctttaccggaagcggcgattctggtggcgaattcttctgtggggcggatcaaagaaaaggagattgtgaagagtttgcgtccttcggtttggttaacggatcagtttcctttgaaaacagaggagttgcttccgttgcttgatattttagccaaccatgtcaaggctgttcggagaatgcgagagctgcttaccaccaagttcccggcgggaacttttccggtcaaggtaagaaggggcattcttggacattactcaaatttattttaagcgttttgcatgagaaattttaagtatcatgaacattctatcagacgtgtcgtaatttcattggttgatgtttagagttgcactaatgtgacattcctcataaagtcagaggaacaaaatgaatcgtttacgatttggtttaggcttttaggttatcaaatttatatggtttggtttggttcggatttgagattcggtattttactaacagtaaaagattacagtttgttgggacgtaaaaaatccaaaaccggtttagattttgctttttcacatcaattttttttccatctttttggtatttagttgtccataccggtgatcccaacagtaaaagtagtcatgacattcagcaagttcgtggctcttccaccgttggatgaattctacacaccgctctcaagtccaaaacatctattagctgcaatggaagaccaacatgacgtgcacgatgatgaaaaattagatagaagaatctcaagttcacgtccatcgttttcaacgccttcttggttgagactgaacatcaatgccaccggcaagagctcacggcggcgtttggtggatgaggaacaagtggtggatccattcacgataccaacagggtataagtggactagtaactcagataattcaggtaattgtaacattaattagagatctattgagtctactagaagtcatttagatgttgatagttctgatcaatacatagataggacaatttcatgcacattctttcaatctttctaatcaaggatagatcctctatttccttttcaacatatttcactaaactccttttaaacaatagaatactacatttctctacgcttatcttattaatctttcctaactagaaaggaacacaaatacaagtatttcatcacatttcataacaataatatgtctcatgatgctattttattcatttattttgtaggtaaaaagaaaataacactatcatgtggatgcgctaaagtaaattttccaaaaagataaatatcttgggaccatgcatacgtagttagtagtatgtgatagtattgtcattgtgttgttgttattcggatttaaatttggcaaaatacatattgttgaggaacaaaatatggggcgagtgttataagccgatattttaagcgttagacttagatcattaacatatctatgtgatttatttttgtgtttgttgtaaaacaaagtactcgtcactcatgaataattaatctaaacattttacacagatgattttgatgtctattaaccacagtttaggggctacaagtccttcgctattttaacttgtttagacggttttgtaaatgcatattttatcatatatatccgatcgatttttcatataaaaattgcgatatttccagtgactggtgtttgagacattttgataccctaaacattgatttatgtttaaactttacatttcttccatgattatagaaagtggaattaggacttttagagttataaaaatagaacaagttttgtggagtaaattatggaactacaaaataaaaaatgatttcgtatgattaggttcttcttatgcgttataaataaagttgaaagattccaaaacaacgtttgctttgcaagttggaaacgaactaacttgagttggcaagtccattccatgacaacccaaaaatcatatttaaacattttgtatcaaacaataaaagctttagataaaaagacgacaagcaaatagggaatatatagtataattatattacattaaaaacaaaagattgacaacccatccactattagtctacattctccacatttccacttatcttgctcatccaaaatcggtcattctctctttagtctttaccaagaagagctccaagaatcagaggtatttgtttgtttggtcatgcttatatattcatagattattcgatttcaactaatatgttctgataggtacataagatattgggatcattataaaatggcgagtgaagcacctagttgggcggatcaatgggggaccggaggaattggggtgatggctgcggaggagacaactgacggcaaaaaagacgtcaccgggaaaaagtccggcaagaccaaagcagggattaacaaagccaagattgttgtatttattggtgtcaattggatgaagaatcttgtgcagaggaagaagaaggattctacttcttcatagatataaaacatgctattgcttcttctatttgaaatgtcacaatcttctatgctattattattcttaattcttttaaatggtatcttggagttccaatggtgtgcatcccacgaatggattgaaattttttcaatgttcacaatataaaaattgtctgatggatcccgtataatatccctatccaaaggaagcaaaagaatataaagttgtatactatattactgttacttattgatttttcagtgtttttgggtacttgtttcaattttgtcttcatattatgttattagtaattagctatagcatacatgttacgaatgagacatgtatcatgataagaaaattaaaatgcgtaaggaaaattacaaccttaacaggattagacacattctcttggttgaccaaggaaaaataaaaacgctcttcagaggtttggttagaagtctttaaggtttagttgtaaaggaccatgaacatatatctaaattttttggagccatattttttctaaactaaaagtagttaatacttcagatgattgaaagagtagttatatgataatcttttgtgcaaagtcaattatttctttaagcatatctttccaattggttgcaatatctattaaaaatgataagaattcctaaatattaagttgaccctactattgatatgaaagcattgaaaattaggaaaattctattatgtatgcatttactttgtaagcattttttaaatatgaatacacttttcaataagtacacaaaacacattataaacttttgagatgtatatgttgattacccatatactttgctagcggccgaaatgatcactttcatgatttttttttgcataggttcataaaacatatatttacttttttttaaggaaatattaaataaatgataggaacttaacaagagaagaaataaatagggagggagaatatttggaaagttgagccatattaatttcgaaattcaaatgtatattgggagtggcacaaccccaccaacatgccttgctctctcttacaaacctcataaatactaaattgaaagctcgtgggaaccttgtgttcctttaatttatcgttatctagcaatctagcatatactagtttacatatattgatttggttagaatagcttctataataatatcagcatagcaaaccagtctacgtaaaatgcgtattctaacgtaaaaaccagattatagttatttggttagaacttatatatatgatgattagaccatcttttacatggttttagagaacaaactaaatttgttaggccactgccacagccacagccactgcgacaacaaagacaaactcttgttcttgaaaattcatttgagagtatacctgataatttgatatcatcggttgtaaaaacgaatatgtaatgttacattactaatgtataaagtataaacaaatattattatcttttgaaaaaagtttttcatagaaacaattcaaatttaataaaccaacctcctttttggtatggggttgttggtctaatttaatgcttgtctcttgcttgcctctcttcttcaaccatcttcgtatttatatcttcttcttcactatgcatactcataaactttgctactggccgcatttctattttctccttcgattcttctaattcgtactttggtttctgacgtccctaaaatttttagacagtaagagtttctccaggatccgatggttctctccggtaaattaacattttagtgtcaatagtcatttatacatatttttatttcactttttgttttgtttattggttttctggagctaagtggagattatagtcgaacaagagtggttttatgcaaggtaacgcgagatattagtgcggttcaatcaaatagtcgtcctcttaactcatggagaacggtgttgttcgattgagccgtgccaatatcacgcggtaaaccaaaaatggcaaagatagttattataaccttaaaggtatgtatcattatcgttttattgtttcaattttgattaatggctttgatatttcattttttttttataatgtttttactctacaggcactcgatcggtagccttagaggggacaagcaacacaaaacccaaaatccaagtacaactgcgatttgcagttctatttttagcaagtatttaagggagtaaaagtactaacaagaacgtaaaacatttgtaattactatctgaaacttttgtccataagttagctgtggaatgatttatcttatttgttatttaaagaaaagtgtatatgtttattcgcttgttgttgttaatctaacgaaaacgaggaagtctgtttttggacttattctatcagataaggttaaatctatgaaatttcatcaagtcggtccacatttccggaagtatgtttgtgacaaatcaaattataatatttctagtttagtgaaaaaagtaaacatgtcagtttttttgtttacattttccccagacaaatgtccaaccaatgttagacgataagagaattaccagctaaataaaataaatgctcgaacttaagaaaacacatgtaaaaaacatccacaacatagaaaagtcaagaccgaataaagaaattatgatatcgatctgaaatccaaagatgcgatcgatttaatccaaatcatttgaataaacttaggagttttgtacctatattgatactcctgtttcacatatatgtcgtttgaggttattacacttgttctgaaacgaaattgagttctaaaacgagagagtataagtccaaaagtaacttaatatatatatatatatatatatatatatatatggtcccatagaaaggtaagaaaaaacacacaaaggagtgcaatgagaagcaaaaaggacatgtggaaatttaataaaaaggcacaacaataaggactctctgtctgtcataggacaaaccaaatgtgaccaaaacattatttcttgtctctcattaaaccacttcactaactattttttgcatacatttattcattttctgaccaaaaaccctactaactatataaccccacccaaaaaaaaacaaaaaaaaaaaacagaattgttttgaaatcttttcgctctcttttttttttttaatcattctaaattattagcaagttatagcattgtagtagtagtaagatataaattttgttttctataaatattttcaggaatttgacgtccataatgcattttgaggttcaccacaacgttcgtgaacgtcggccatcctctcagccgaccgacagattccgctgcatttccagtcgaacgacgccgcgcaaacatgtcccatcattgcttttagttcacaatctgtaaagaaacaataatgctttagaatatgattttcttagagaaatttctaaaaccttgatatatttcataccagtataaaagcttttctgttgtaaaatactaaaatcaacttagagtaaaaccggtaacatctatggattaaaccaaaccaggattgttaagctctttaccttgagaagtactgcaacaaagtcttttttcatcaacatgttctacattcaatccgatgaaccaagatcccaacgaaacatcttcattcgcatacttatgcagtaaatcccttatttcaacaaaataaatagagatcgttagaggtttttcccaagcattctggctgcattaaaccgctggctaaaaccaagttaggaaaaaaacttactggtttatcagtatgtaagtagctagatctttagatatagcataaaactgtccagtggcgtggcggaaatacttgttcccgacttctccaaacttccaatactctggctcatggtacttcacactcctgtttttttttttgccagaagtatagaaagtccggaaaggttgatgctcttacgctgtttaagtacctaaaaaatgctcaccttagtagggtttttacttactttctggctaggacgggaccagacttcatgcaaccaacataaacccgaggcttgttttggtgtgcggataaagccttcttgagggaggctgcaaaaaatcggatcaaggcatcaaaacaaaatggatggatgatatataagacataaatgaaacattttgattttcttaccaagattcacatgaacgtcatcgtcaactttgatgtagaattctgcatcccacaaggaaacagcggtagcgaaaaacgtctttgtcttggcagataacttcatgtatccctccgtatgttcctgttttgttttctaaagctttgaataaatgtagcacgaaaataccaaacacagaaaattttgtgagaattgctcagagttttaccagtctcaagaaatcaccatgtgttttctcttctgcttcaatagctttatcaagaatcccgtgggacaacacactgaaatcagaacattccaagaacataaaaatgtcggtatacacaaagtaaagtatagttataaatgcttagtttctcactacagaacatgacttctcctttgtacctatgtcctataacaaagcgaacaatgatgcctttctcttcttcaagtttcttaagattctctcctgaatgatagtttaaaaaccgtaaaagttacaatttctgactaatttaaactagaaatcaagaaaagtagaaacagacttaccttgtggcatccatgttgaccggacagagtcacgtctcttacgactactaaaggccgtgttaataccgataaccatgaagtattttcttttcttagcttcattggatatgttaaatttcccggacaatgactcacgttcagctctagcagctactagtttcatctctaaatttgaaatggatttatctaagatcctgcaatttgttttgagttctacaacatcatcatcaactaaacatacatagtaattgttcatagatacatctagtcaaatttctaaatggttttacccgatagtgttgttaccatagtccaaaacctgcaaagaaacacaagttcaaacaatgtatcatcgaatttccaagtgaattgatgatgcaaaaacgtagaaatcttacattctttttatcgcaatcactggaacttaagcttagtttggagagtcttgatatgcctctagcttcaggtactatattccacatcctgatataatgatgatcattatcccatgagatcaaaacaaacacaaatccgaaccaaaattcagatcaagtcactatctatctcagtgatacagatttttgaaacaaaaagaagtaatctctatgttattttcatactttgtggacaatgtgccattcaaattattcaattgttcctcttccgacgatacattaagcaaagagattgatcaaatactacaaaagttacaatgttccactatttgatcaaatctatctgataagcagtataagatatagttttttttgtgtgtgtctcttgattcctcctcactaaagctacaaggacacaaatagaccagtagtcttgataaaaaacaaaaacatgccttcaccgacaaaactcaaagcttaagaaatctacttaaattttgagaaacacaagatagattcagtcccaagaagatgaaattagaaacaacaaaatacttaaaaatccagaaagaaaaagaagctagaatcaaacacgaacagtgagatatccaaactttaataagaaatcgtcgaacataataaaaatggggctcatgtaatagatttacctgttagtgaagaacattccaaggcagaaacttgcgaggcacatgaaaaatacagagtttctagaaactacatttcttggagtaaaattgtaatctcctctgttcttgaatgacatttggatttggtttcaggactcaaatccaaaaaaagcagagaatggtcaatgcaaaatcaaagatttgttaatttggaagtcaaaagattcaagctttttttgtgggtctatttacagtacttttctgcacactctctttctcccactctctctccgcatgaagagagaacaaacccactaattgaatcactttttatataacttacaagtttggtaacgttttggcatatacaataatgacgtttcagattatagattttgaagttactaaaatattttaaactgatgatttttgctactaatgtaatgataactgcagctgcagatctagtaccggagaaaagagttacgtactgttctgtttccgggtcagatttggaattgtgaaaaagtactaatttagttagaaactggaacaatgtgagaaaagtactaacagtgtgtgtataaactttgcttaacttttgatttattcagaattacaaaagcagaatccatagacctatcacgttttttatattgctttgggaatgtaaaagaagaagaaaggatcaaactctctaagttgtctcataagctaatttctgtacatacaaagagaattcatcttagagcttccattttatttggtcttacttgcgtgcagagtgatagagctcaagatactcaagtgcaggacggttccatgaccagtcttgctccatcaccgtcttgcacagcgagttaaaccactctctaccatcgtaccacgccgatatcgccctgggaacaaaaggaaacaagaaacatcggttcataatgctcgaatcaaaagagagtcttagtttagattttggttggtttacctattgagagcataatcaacaccaggagcatcagctccgtcgaagctgaaaccattaggttctagaacttgagcttgtgccctttctttatcgtggtcaacatcaaaaaccgtatcaaagagtcctgttggacaaagataaaccattaccgtaaagtcagcttggtcttgagtgaaatgggtaaagcttaagattctaaccatagccaaaaacagttacctccagtttttctaacaacaggaacagcgccgtatctcatggctatgagctgtgtcagtccacatggctcaaatatcgacggtacaagaataaagtcagccccagcataaatctggagagtaaaacacaaaaagacttaaaagagtaataccgacagcaaataaaggaacgaactacaactaaaggtttgttattgtctttctaccaaatgggaaagaggttcatcgtaggttagaacaagccgagcccggtcaccatgagaagaatgtaattggtttgccaagtttacaaaatcattttggatccgaggatctggagctgaacctaataagacaacctgctttcaagaaaaccggtaaggattgtgaaaagttcatgacaggacttttcaaaggtcgataaggctcgaaaggacctgtccattccgttccaaggtacgccaaatagcgtgcttgatcaaatgtattcccttctggtgtgttaagcgcgtaataattcctactactggaaaatcggcactctttagtccaagcctgttttgcaattcttccttggctgctcttttgccttctacaacgttctctgaagtataaggtacctaagaaacacacaaagtgttcaaacatcacaagatgtagaaagaaatctaaagacaggaaaggagaggatgtgatgaagcttacgggaataaagttatcgttatatggatcccatatatctgggtcaatcccgtttataattccgtgaaatttgtataaatgtgcagagattacagagtttccagcaacttccttagcataagttggtgaaacctagtataacgttaagagcagaccgagtcatgctcattttcagattcttcagagaaaaagcacaaatgatatttctgaaattacagatctcttaaatggagcatgctttcagaaattaccgttgtggctttgtctgcaaatgtcattgctttaccaatggcattcgctccaaattccaaattatgaattgtgaagacaatacgggttttaattaaaccgtactgtgtgtaatgatccttgaataaccatgaaaccggagcactagaccagtcatgacagtgaagaatgtcctgtagatggtgagaccatgggttagagccgctagttagagcatactagtaagactttccactgagaattctccatttttctacaagagcaggacttgtaaacttactggatggaaacctccttggagaagaaattcaagagccgcatgacagaagaaaccgaatcttcctgcatcatctgcacaaccgtaaacacatcctcgctgaaacaatctgcaacagtcaagcaacgacaacaacttcttcatgccctcaagagatgatgaatgaaatgtggaaagagcttaaagagcaatatgcataaagctaacccattttgtggatctaagaagtaaaccgaaaggccttctacttttccatgccaaacttttatttcagttcctccccagtgatagcttctgttaaattgcaagtccttcacctattttcacaaagtttaagaacaaagagagagaagcagcaaaaaagggaaatgaaagcggaagatatgagaagatattgatcttacaaaattgtgctttatgcaatcatactttggaaaaactatatccacattatggtttaattcttgaacagcgcgagatagactagtgacaacatcacctaggccaccaacctgcatgtaatagatatacaaaaacttaggatatatttatacaatgcttttaaaggccaacctcacatcttacggttacctttgcgatgggtgccatttcaacagcaatatgaacaatgtgcaatggtggttcctttgaaatacctcccacgactggtaaatggtaatccagaccatttttgttatcaaatattccgccatcctctttctcagagaacacaaagtccatcatgtaagcatccaatgggaccttagctggaaaaaagaagaagagaaacattagtcacatatcatgtaacagtctccagaatggaaacctgtacaactgaaatcgtacccgtagtcttcacatgtgagctttcatcatctgttgcttccattttctgaggtggcaaagggcccaagcggtgagtccaacgattaaaagagcctctaaaccaaacttcaggttttccattcaaaaccgtgtttgcaggattgtacaatacagtcacagggtttcctgcttgaatctctagaggctcggtgtaaaccacgtctttctgggatagcagaaactttttcagtgttctttccttagtttcagctttcaagcgagctgttttttccatctgccaataaaaattgaggatgaagacatgtaaaccaatgtagtcaagaaagagatttgacaggaatgcaaataatatagtaaagaggataagctggtatttcttttacatgcattgaacactgaccttggcacgcataacttcctcttttaaccgcctatcctcctgaagttttctaaaaatcatattttcttcctctaaccagtaaagttcttcaggaagtttttgaggaacaagtgcgtggaagtcttggtaaccattattgtcatacagaaacgctcctttaggtggtccatcagcaaagacccagtcaatgactagtgcaccgccaggcactacaactgcatattgaaatgaaaaagatcaataaatcaaatggcagttaaaggatatgttaccacaaaaatgtataaaaaaaaagcaggttcgttcaaaaagataaaaaagcttcacatatataccttcagcgaaccaccaatttccgctctttggatcaacatcctttaactcagcattaacaagctttacaacgatagataatccatcaacccaattattaaaccctccatgtaaccacagttctttggaattagtcagaggacctgaccttttattgtaatatagcttcactgtatcttcagccttgaaatcactcggctcaatgtaccaaacattctcagccgagactacagctttcttaatagccggttgaagcaattcacgtctcttctgagtctccgcctttgcttgtgctctatcagcttcaattgcagccttttgagcttcgattcttctcttctcttctttttgcctctccctctcagcttcttccttggctaacttctcttgctctcgcagtttctcttctagaagaaaattctcaaagtcaactttatccatcccaccttttatctctacacaaaaatcttttgagtcattgttgtcatatacactttgcccattgaaaaacacgaagtccatcttatacgcttctttggggatatgaaggagacatgacaaccaatcttcatggatccaggtcttttccaatctccttgtgaaagacttccatctccattcgttaaacgcccccatgatcaaaacatcgggttcgttattcagagtcgacagattcctgttgagaaacacttctatgtcttcatcaggtttcacaataacgggatacacaaacattctatcacctctcgccaaattttccgctgcaagcgtttctatttccttcctacgaagattctctctttcaagttttaacttttgttctaacaaatcatcatcatcggttgttttcttgtccaaacgatcacttccatcctcaatatccgacctatctaacacatttctctcattcaaaacaacagagctttgcttctgtacatccactttagctgcgggcaacttactaatccctgaaacctcgtttgttgctgtagaagtggcattactatctttttcaccattcttcttctgagttcttttctgagcacttcctactgttgttcgtcgcccaaaacctctgggacctgagctttttggtcctgaagcagccattcttccttgcttcttccttgaaaagtcttggttaagaaaataagaaatcatcaaaaggactgaatcagtaatcacaatgaaaggttatcacagattcttaacctgcacttgccgtgatctgatgcagaaacccatttgatttgtattgactttccaatgaagcaatctgaaagccaaacatgtctgatggttagaaatcgattataaaactgttcagtcacctggttcacaagctctaacaaatacataaactagccacaccagcaataaacaagaagaatattagccatttataaatcaaaaccatattgaatgagacattttcatctccaagaacacctaaactaatcacactataagtaaaacaaggtggatattaaaatcaaactataaaagatgagacattttcattctactgtgaatcttcagctgactcttacttctagctcatagtccccaaaatcatttctctcccctcgagttggtattctcaatgaggtgacgattttgaccagaagaaattgaacatttcctagagaaattaagtcaattcctatactcttaccaatttcaaacgaggttctaacatgagaatcccaatccagagaccctaccagagttgaatcttatttaaaaatagtacattgattcaattaaagatatactaatcgaaaaggcgatctcactatgaaaaagtagaacactttacacttaaattcccgataagtagaatctaaagagatatacaaacatatcagcgaaaaaaattgagacgagaagaaacaaaagagatttacactagaaatggagcgaggaaaaaacccaacagaaaaagtattgatcttgacccgacccttttcctgaaaacccggtctgagactcgctggtctctgtatctgccaacacacttccatagctgccgaagaaagaagaagacagaaagagagacgagatggagaaagaaagtggtcgtgtacttcaggtatatatcttatatgggttgctttgcttagacaagagagagagaatgtttgttgttgaagcagccccctgactccactgcctcaccacaccacacttctcaatcaccgaagtctgaaactcatctcattcattattttattccaatttattcagagaatacatgtgttgattaatattattatatttatcataacagtggcttttattcatgaaattaaaccaatggtgctctgatttgttgacatctagcaaaataacaacaccagattttacaatcgcagtctctcacacgcagccatttgtttgtataatgtggaaaataatattcgtctgcttctcagattatattccttacggtgtctaccaacattacataatctggacggctaatcttaaacaaatcacgtggaaagtatcgtaatagctcgtgacaaccaaattgtttggccggtgcattagcgccacgtgtcagacaatccccgctttacaggtccacgtcaagcgatcctgtttccaacactgaccgttgattacaaagaatcgtccaagggtccacgtgtacgaacaggatacgaatctgatccgtaccgtacctccaaaacaaaccctctggacagttcagtagtttcttcctaaaactgaaacaagctttcattggctttgttgactaaggccttccattttctctatcaagaagaggacgaactatagatagatatatatgttcatgaggtgtaactccttgaagaatcaagtaatcatgaagctcaacgactttttcttgactgcgatgcttactaaacgatgtaatcaaagttccatatgttatagaatccggaacaacacctctttcaaccataaacttcaaaacttccttcgctttctcataagaaccaaacttgcataagtgattgatcataatgttgaaagtcacaagactaaccgatttctcaccgtcctgtttctgcattttagataagatatcgtcagcttcttcgacattcccggttttgagagactcgttcaacagcgtgttgtaagttacaatgtccttgatttccatagcgttcacaactgcttcagctgcaccagccattcctcttttacttaatccattcacaattgaattgtaaatcacaagattcgatgttttattcatcttgatcataccatcatatatctcgagagctctttccaacttaccttcctttaggtatccatcaatcaaagtaccaaacgaaatcgcatcgagactcaaaccttgaaccaacatactccctagaatctgatcagcacacgccagctttttatcccttacaaaatggtgcataagcgtgttgtgacaaactatatcttccacgagcttcttctctgaaatctgtctctgaaactcaacagcttcctttacatatccgtttctgcatagacctctgacaacaatggcttgagtaaatcgatcaatttgcatatttttactattcatatcacgcaacacagacatagctccttctatgtcaccttccataaacagccaataaacaatagagttatagataactgtatttaccacaagtcccttactcgtcatctcatcacacaaccttaaggcttcatctgagcttccagctctaccatacgcatccaccaaagctccataggttctttcattgcaatcaacacctgatttgaccatgtcaccacggattctttccgccaaatccaatctcccggccttgcaaaacccgttgataacagaattgtacgtcacagcattaggtgaaacaaagtttccagacatcattcccatcttccctaaaagctgcaaggcaaatctcatatcacccgtcttacaagctccatcaatcatcatattaaagctaacaacattaggccaaaccccacatttcaacatccggtaaaacacagataacgcttcaaacaacttactctccttacaaaacgaatatataaccagattaaatgtattcacattctcaacataccctaaagaatccatttccttgtaaaccttccaaaacctatcaatctcattcacattcaataaacaacccataaaattattcaacgcatgaacagaaacacaaaaaccttctgctctcgtctgctcaatcacttcataagctccttgcgcatcaccattctgtgtacaagctctaaccaatgaatcaaacacatcaggactcgaaccacaagcttggtaacttcgaatcaaacccgacaaaacatgtaaaggactcaacttttcaccttctacagacatcaaattcgccattattgataaagcatcatcaaatcttctcgaaccaaccagcaaatgaatcatcacacaagaggcttcgaatcgattctcagacttagccacagtgttactccttaaaacccaattgtagaactctagagctaacttcggcgagcttcgaaactcgcgaagaactcgacttatcaacggatttgtgagactcgaggagaattgatgaagagtgttccatcttctctgtcttaaattcaaacagagagcactaaagagaatatcttccggctcaggattcgagaatttcttagcaacgtgaaagcaacgtaccaggaagctcgttcttctggagaaaacgtgaccgaacatacggtacacagaaaaacctcagataacgataaaccctagaagcaaaacccctaaatctagacagaggtctttaaacgtagaattcgaaggcatgatcgtccgatacatgagcctcgctagcgtttgacaaaccacgatgagtaactctggtgacggcgacggcggcagagagaaaaacggttaaaaagacaaaagggcttaaatacccaactagaggaccggttaaggattaaccgaaattggtttcgagggatagtataatttaaggcttttagcatagttttacgaagttgggtctaagtccaattgggcgccatgacatccaccccctataatattatgagcccattacgtatccagtagtgaaatcacttaaactagtcacgtacttgttgagccatcattagtagcagcaatgaaatcacttgtttcgcaaagttatgtgaaatggaatatgcaaggtttagttattccgatcctctttttcttaattaggaattttggatcgaagtttacgcaatctgaagatacaccggtgaatcaaaagatgtatcaatcatcaaaattgttttttagtgaaagtgtccactaacctcatcacatagtaccatatttgaactaccacaagacttacatgctttcatttgtcctttattgcaggattatatttttcacaaaaagacaattatattatgtaactttcgctgacaaatattgttaattagttagaattttgagcattcttatagttttccatatcaaacaatgattttggaattgtatatataaatgcaaggaatcaattaattaaaggaatcaaattattgagagagagagagagtgtatggtgaatggtgaagagagagtttgagataagagtggaaagagatgtgttgagcccacatatatgaattaggtcatgatattatagacttctcgatcgatcaaattcactttcaaaggtcctttcttgaaaaaggcaaaggcataactcacaaagtgatcaaaaacatatttgacaaacttccccctcttatgctttaacactctctaacttgtgtcactttcttttgaccccaaccataccctaccccctccataacctcatgtccatatattacatatctatctctctagtgtagtagatacatcattacttaagtatatgttgggattgttaattagatcgaaacatgtatcctaatctcgttatacttgaaaccacacatgattcccctcggctaattctaacgaccatttttcaacgattcgatcaagtcgccaatcatattttctagtttgttcatgaatttcttaaggatttgtttcttatttatgcatgttatattgttcttattgctcgtaagtttaattcgtgtagactgtcttaaagttgttttcccactagatgactccatatgtatatatcattaatctatatctgcacagaagtatttatatcattaatctttttccatgttataactttcagtgacgcccttatatatatataagaagatgccatttcatgagcaatcatgattttatttgggaaaatgaattgaaaatagtgtctttttctagctcgtgagtgcccccactttgaagtggattctttggacagtttacctgtggacacaataatgttgcgaggacacatctgttctcattaattatacaaactttccctttcattttatatcaaattatcacttaattaataactagacctaattacattgtcactaatttaatcttatataccggtgctcaatcattaatatccttcttacgtgatacatgacatacgaattgagttttgacgttttaatatatatatacaccacatacaactaaaaatgaacactacgaggaagagcattatataacttattttcatagcttaatttttgtatttgtttgctgctaattcaaagattcagttatattccattatgttttataattataaatattcaaactcgaaagcaagaattcaatcaagttcctgtcaggaaactattgcttagcatcgtaagctatacattagccttgtattaacaaatatttattgaattttaatcatacttatattattaatctacattttatgccttttgggatgttataaagacattaaaatattgatttttttttaattaaatcaatacaacagcaaaaagagagaaaattatacgcatagcaggttcttgaaaattttcccacaattagtttatggatctaaaaataagaaaagaaaaagcgtttgcatgggaagcaatatataaatcttatacatctcaagcttgggattcaagaaagttgcaaaattaactctaaactgacaaaataagcaaaatattttccaaagtttttatgttgaagttttatattgttttttttttctttcaaattttatattactaacttagccgtagaaccctgtttggctccaaatcgcgtctcgaacgcgccttaattctcgtcctttaagagttcttccaactccttcaaacaccgagccaccgccgccagattttctgctccgtcgctgttggctcttcgccaagtactcatgcggcggcatcatcatcccggaatcttcctcctcctcttcatcagactcgtgtatcgactcaaccgagttgactcggtatatcttactccaatccggcacgttcaccggagccgacgacgccaactgcctctcaactcttcctcctcctccaccacctcctcctccttctcctccgccacgtatctggtgcacgatcctcggcgaagatgacgcgtcctcaaacgccagcgacaaaccaccacccacgcgcccattcctcaccacagcatcgcgtgtgttccacgctccatgagattccagcatctccgggctgtgatcgacggcgtgtgaccagatgtcctcctccgtgagctctgattcgtcggtggcggagtttccgttactgtcaccgtaactatagctgcttcctaggtacctctcgctctggctcatcgtcagctttcgacctcttgccattgaagcttcacttttaacctcaacaaatttaaccacttatcgtttaattaattactcttagattatagttattatcttaagcattcagagattaagtaattagagatttcgctataagttttaaacgaagggaaatggacgactatatatagcatttttgtaagcagaagagtccaaaagaatgtgaaatgacaaataaaatctcaactataccactcattatgaatttcttacaaaaacaccccataatatattatcaatatctaataaaccctaattttaatttctgaaatctagtggtccttgtttgatagagtttctttccaccgttggatttaatatataaaaccaacttttggatggaaaaagtttgcacgaaaggtagtacgtaatttcgtgaatgtgtttaatattctgccatctaataagcgcaaacgaatttttaatttagaccatctcttttgtctttcgtcaaatcaagtaagaatctctgtgatctcatatctgggaatctgaatagtgaaggggtctatttagaaataaataaaataaggaggtggtaaatgtaaatgtttgagggtctgattaatgtggataaactaaatcatagagttcccacacgtaacagttaacagataaacaatttggatacgctgtaataagacgagacatgccacgtgacgcgctaccgagatgcgcgtgtgaatcactcgaggccagtctgataaaagtttaattttactcgagaaagtctagggaaacacttattgtcaacttgccaaattggggggggaaagaaattgcaaactttaggtcgcttgttttggtaagaaataattgttcacgagaagttttttcctgtgcacagaatttttgtagcacgatcaaaagtttagtcaaattgtttgtgtgcaacgaagtttgcgataagatgataccaatttatggatttgtaatagtgtcataatcgtatagtaatatatatccatatgttgtagaaaataaatctatgtataatttatgttaatgtttacattacgttaaaaatattaataactaattttatcttcattcaatattttaattagatttcgccatttttaaatatggtgatcacaaccacaatatacaatacgtgacgtggccagtctgataaaagtttttaagtgctaccaaaggtttttgtgtaatggcgatggagaagacgatgcggtaaaaaacgataaaaatggttaactgaaaaagtaaaaaagtaattgttaaaggtatatatctgttttgttgtaacaaagagtataaacttaatttggtcaagttcaagggaatcatacgtcagtatttaaatccaaagtggaacccaaaagaactcgagtatatttcacaacaccaaaaccataattaactgatttgttgattggtaatcaaatggtgtcgcatgcatttcaattcaataataacttttaattaataatttaaagtaggttttccacttgacacttgtgacgaacttagtacaaagaaagagaaggaccccactgtgtccacattgaacggctgagaataagagacagaagagtatcgtacatacttcgtaaacatagcaccagctacgttttgttttaaaaatgtatacatcttatttttcgttttttttccatcttttgatccaatattttgaaaataatataggagaatagagtagcaaagtagtccatctttaataaaactttaaaaacaaattatatattgaggaaaaaaaatatatatatagttggtagagaatattaaaacgttttttcatctcttaaatattcgatttatgcgtgttcttatacgtacgtaaactcgacttttttttcttcaagtgtttgtcatttcaattgaagtatcagaattcttcatatgccatgtttgccgtaaacaaatacaatttcaattacgaataaaatcgataattaagatatacataaaactctttttaatttgtctacttttctcaatttagatcataggaataacatatgagcaaacattttagtgtttgatttatcaacgtatatagttaaactaatatgtgagaaaatatattcaaatattagtgtcttcaaattcaaatagtatgttatacactgaaagaatattcttacgtttgtaaatccatcacagtcacatatatgattacactatagatgagtcatgagtggttccacaaaaatattccactcaataatgctagaaaaagaaagaaagaaagaaaatacctaaaactaaaacatacaagtagaaatagtgaaaaagatgatacaataatgaggaaaaaattacaaatttcgatataactatactgtacgtcttaatcaatgtagggatacaattttaatttgacgagattattgatatataataagtcaggtagttgtctttttgagagacgaacaagtcattctattgttctcattcagtaccccacaatagacccctacctcctctagctagggcaattgtaccttactgtatttataataatctacaaacattaaatatttgtcaccatatggtacaaatgatccaatcttctgcaagaaaagatttacatgtatttgttgtgaaatgcaccaaacaatagaatccatcagtcttgtctatcgtgagtatcctcgaggaggctggtatattacaagattagagtttttatgacaatggctatgaaactttctcatgtgggatatctaatttttaagttcaattcttataaatgtagctagagacattacaaatcttctgaaccagcagaatcgggacaaagttagattcttctaatttttaattagtattcaattgaaaaatagaatttttggagttggaaaataatatgattggccatgtgcaaagccgtaacgctggccaaagattggatctctagattccatggatcatttagcaaccaaaaaataagatagacagattatatgatatttattatatactttttatttttatagagaaacaaacaaaacaagtgacatagaaaaagaaactaaaaaaatatatacataaaaattacaaatatgtttgcgatgcagagttcaacaattaataaaatatattagaggttgacattgataaatgacaaatgcttggtttatattaaaatgacaaattcttatcaaaatgcttgattcattttgcactacttttctaaaaactaaagatgcaatgatttttattaaaaaaatatctttgaagatgcaataattaaaggcgtaaggtaaatttatacatgtaaccatgtcccaaaaatcatggggacactttgacctaatgattggtctaaagatacaaatgtttctttactttatatttgaggttcaaattccaagctatgaaaaagttgttgcaaatggtcgtcttcgttggttcccacactagaccaaaatcatatcaaattacatatgttgcccgttaatacttctatcgtgaatttatgtaattgttccaaatgttgcgaattgatggaaaaaataaatttgttacaacggttacaatctaaaaattacgcttttgtaatttgtaaggaaaaaaacttggacatcaaacaaattcatctcctcatacttttcttgcaagacattagcgtcgttaaacattaccttcatcagacacaaactcaaatctctcaaaatcaatcttactgtctacaacttccatagatttcgccatctttatcaaaccttcaccatgtcttaacctcttctcctcaattccccctacttctctagccgtctccaaacacttctctaactcgaccacaaacaaattcatctcctcatacttttcttgcaaggcaagttttgcatccatgaacttaaccctaaccctttcctccctccacatctcagccatctgcaacatctgcctctcctcctccgtttcgtcccacaccctccttgtattcaccttcaattcatcgatcctcgtcaccagttcctcgcacaccttctccattgtatctctttctcttctcaaccgatttactgatgactccatatccaaaatcttcttctttaacctagaattctcagctttaactcttttcttttcttccctctctttgcttaacttttccttcaagtaatcaacaaatggattagtggtttcttctttctcatttctttggtttctgatgagacatcttatagtttcctctgatttaaacttttcagcctcaagctctttgattctcgtttgagccttccatagctccgtttgaagacaaggaacgaggttaaagtctaaaaactcgtcttcttgaaagttctcactaggttcaacggagtaatacgttcgaagtgatcccaagtcccactccgttatgctctccatctgcaatttatcgtgttagataatcgagttaaccaagagaaatctcagaaaccaaacaaaatgatcaagccaaggaaccttgaccttggaaaggaggccttgaagcctagacgcaagcttcctggccgatactttggatctttctgattttgattgtcgagagagattatgacggaacaaaggtggccgttgttgtctctggtgggaggagatgtgttcttttgggcgatgaagagagagttgatccgtaacgttggcaatgcgagagaagaaaacgttcataagggacacgataataatcaagatttaaccattttttgggggcatataaatcgaatacataacatacatctgcatttacattgaatcataatgtagagtattaagaaagaaatttcgaaaccagctaagacaatgatttggtaccagatttagtctctttaccgcatctgtatagtttaaagcacattatgaaccttttctcttgtaataatcagataattttgggtatactgaacaaaaataaaagtatttgatagatatcttcctatataattatatgtaattttagtaactgttttgcaccggttgttgtccaaaatatagggcacaatcaaatattttcttcctaaaatagaattttaccaatttaacatattgcctactagaagtttgagcctaaaccaaagaagttccgtataaatgagcacatttgcagaaccaacaaacttaggaagcttaaaaataaatgtcaattaaagagtaacaacagtttataaaaacagaagaattattcaacaacaaaactaaaaccagagagggacaaaagcaaagcagaaaccagagagaaaaatccaaagctgcaataaccttaaacttgtctttaagaaagctggcgcctcttgtaacgcaccatcacattgcctttaactccaaccaccatagcgttccagtcaatctcagggaacggtgaaactagctcaagctcgaagttcctcaacaaatgactccatatggctttgatctgcaggtaagcaaacggctctccaaggcacccgtgccttccccctccgaatgcaatgtacgagaatgcccctgcggctttgtcctcttctcttccaggggagaatctttctgggtcgtaggtgtcggggtctttgaagatgtgcggtaagcggttggcaaatgcaggggaggttgcaacgatgtgaccctttgggatatcgtaagtttttccatcccgagctgtcacgctgaaatcactgtgcgaggctctcattaacatgatgagtggagggtgaagcctcaacgcttccttaatgcagcggtagagaacatccatctcggataagatatcatgatcgatcttgtctccatgtttcgcaatcaggttcttctgctcatcaagagcagctgagaagtactctttgtatcgcatcagataagcaccggtccaggtggaagtgatagagctcgtgtgttgtcctgcaaacagagcagcaatgagcaaaccagtgacttcagattcggttgtctgtctaccatctttgtactttgattcgatgaaacactgcagcatgtcgttctctgtttttccagagcgttttctcgacccaatgatttttgcgaaaatctccgaaagcttttctcgggcacggtcacgacggcggtgagctggaattgggagatatgggaagagaacactgatgggaagcattccattgtcaaggtcatggaacaaagcagagacatcatcaaaaagctgatcacgaacttctcgacccagtaaacatctacttgcagtcaagatgatgagcctctctagctcaaccttaatatcaacttcaccactctctccccatttagagaagtaatcctgccaagaacaaggacaagtatttataaatgaaactaccaataaatgcacacaacacctactcactggaagattataccgttaaagatcaatcagagtatatgttgtatgtgagtataacgaagcagaagcatgaaaagtgaacctaaactcatacatcacaagtacaagctaaaaagtccaaatttctttacctcagcttcagtaaccatcatatccacataacccttcaacttgttaactctaagtgcctcagtgaagaaccgaaactgctcctgacgaacagaataatcaacatcgaaaacaactccaggaccaaaagtagggacattgaactgatacacttcctgctgactaagatcagattcagaagctttgaaaaaatgagcagagacttcaggaccaataagaaaagtaatctttttgtgaacaagattaacagtaaacacacttccaagcttagggtattcctctctaagcataataataggtcctttcaagaatttgataagacttccaaccaatggaggccaagctttaagagtaggaggaagacgcttcttcttagaatcagaagtgaagaaagagaagatgagtttggctataacaagtgtcgccactataaccaaacccgtcttcaacaatttgttctccgaatccaattccattgtttttcaactgtcacacacacacaaaaaaacacaaattttgaatcacgatgcgtaattagattcagatccagattgattatgattgaatcgtgagtgatctaatctatagtttaagagtttctacgataatagaacgagaaaagctatgtggagattgatacaaaacttagaaaacagaggataagagagaagcacactactactatgattggttgagaatcgaaaagaagcttactttggaggaggaagcaatttgattgatacgatgatggagtttcagagacggcgcgaggaggaagaagaagaagagaaaacggctctggagatttgctctcacgatggagaagaaatcgtcgctttcgctttcgaagctctcttaagcttgaagctgatttctctcacctgaatttactcttttaactctgattttgttttcgatttactatttcatttcgactttttccttaatataaaattcaactgtaaaaagtaaaaagtaaaaagtgaaaacacacccatgtggcaattttgtttttttctagtaatatgattggattatttcaacaaaagtaaaaccaacggcgttgatggtataattacggaaaagcttcatattcattaaccagccaacgacgtcgttacaacaaaagtaaaaccaacggcgttgatggtatatgctttgacacaaaaattaaaatttatgttcagttgtagtatatgttattgcacaatagtattattcatgtaaaaatccaacataactcaaattttgacgaatgtaaattcccattttctgcgtaaaatcacaacatatattcggattgattccactacgaaccaaatttatgtctatgtgggtttttaaactcaagagttgatccggacaatgatgcgatttatatggctaatgccttaagacggagaaaacaaagtaactcgacttttttactaaattaaagaaagaacaaagtgactgagtcgtagtgagctcgtgatcacaacacatgcgatcgagtattttaaagattgttttgtctcattatagttcccagacttcgaatattcttgtttcttgagattgatctctcaccataccttatagtagtgccgagttgggttaaaagctaagctttaaactaaagtaattgtgtgcatgtcgaggaaccactagtagtaatctctttagataacatttatgtttacgcacacggtattcttacaatattcaattagaatagttttttttttctgttttcaacataaataaacaattagtttttttctcagttagtgtctcacaagtcgcacaactcagatgttgacactttctttgggcttagcgtctgctctggcaattctctcccttcccttcactaagcagccaaggccaagagcaagcaggagtggtccttcactaacgcccaccagtttctgattctgttctttgggcttgttttaattttcaggcccgcttatcttattgagcctgttacgttttggattatcatgttgagaattttcaacaaatctagagtttctcttcttctataccaaaactcatcgaatctctgaactgatccgtcggatttgtgtaaaaacagagatagataacatgtaagataccagatattaatcaccatcggcctagacacaacgactctctcagaccggttatgagttatgacaattgacaagacatgtttttgggtttatacgaagacatgtttattagtcaattggtattttttttagatcgcaccggtaccaagatgtgaagatttttttatattaattagttaattttctttttaaaaagttctcttatgagttcatgattcttggaaatcttttattgtaaaaatatgttcgtgtggagacatatcatatctttgtttgtcaatgtatgtttttaaatttttaattttggttttatattcactgccaattagtttaaatatatatatagtttggtaaactgtttctttgctactctttttgataaatagtttggtaatctaacgtcataatatatgcttatctaatataaattgatacgctgaaacaaatttttaggatgacaaacaaagatatggtaatatggaagataatgagatcacatggaccgtctattaaaaatcgataaatttaagtggataattaatttaatgataacaatcatggagtacgattaatgtatcctaacgccctaacaataggatatactgtatatatacagagaattaagaaaagtgcttggaaatagttagacgaaaaatagctgtcatggtgtcgctcttatcaattaatccagtaacccttacaaaaagattcggcagtatcaaaattaacatttgtgttaattaatctatttagctcaatagaaatactagtatttaacgcaaattcttaagcttttcgagtttcgagaatgaaaaaaaaaagagattaaattttggtctctctcttacattattaaatatacgattacaataataaaaattaatagtataagcttttagattacgtagcgtatgaaacaaaaaataataattccaaatctctagaaatcgttacattcatcaaaatatgtgtaatacgcattaatctaatagttaatgttatttaatactaattgcagatatgtactatgcaatccaatagaatatctactagtaatatacactaaatactatccttataatttttatcaattagatatttatttagtttaagatatagtttaacaaagctaattcttaccaaactaactagacctaaaatattatccttatataaattttttatcatttgattcaccaaaactcacgttctttttaataatatatctatcgaattaccatgtaggatcccacgagatcctcgagttatagtcgtcttacatagacatcaaggtggtctacaattatttaccacgagattctcgagttgtaatattggtttaccctgatttcccgcaagaagttcgacttctatgctgatatgcatcagatgcgttgacatataaagcaatatggtcacatccatttacacatgtgtttttgtagatcattctcgaacggttattataatcttgctgaaatcattatagggacattacttaatgcgttataagaagacgataatttgtttttatcaagattttggataaaatatttgaagttaaaatgtttgaatgccccattttacgcacccttgtggctctcacaacttcccgtcgtttgatttatttagaaatgcagaaaacaaaagtttaaagttaaaatgtcaatgtacatatgtgtgtatacaagtatgtcaatgtcattttcatttaagaattttcccaacaaccatggcccaagggaatttgtgttcatattaaagagcctacaacactactcgtctcaatgtatgatatattatttatacatgtataagatttggggttacacacttgcgtcattacatgcatcatttatctactgtattaatcttaattaagacatttaaactagaaaacagctgcaaattcataatgtgcagatttatacatgttaagtgttaacatcaataatccatagtgcacacattctcaactaattttataattatgactaaagaataaaaatacacgaaaaatatataaggattaattatgacttgtaaaagttgttagagaatcaacattagttgaaaataaatttcttacaatttaaaatgaaaataaactaaaaattatatggcatattcgttggtcaactaattaccgcgattattcggatttcttaaataccttgatgatatcttattctgaaaatgacttgtcaaatattctacataataattgtagttaagtaaatctatgcattaaatgttattcataaacaaaattattaaagagaacatatatagtttcagtctacacaacgagtccgtgtgtgtatgctaaaaagaccgactcttcttatatcatttactgccgcgtttacgactcaatggtcaacgtagtttgaccttttaatcaaagttgatttgtgaatgtttaaagcacgagtttggcatgtccaacgtggcactttttgtacgtcacatctttcgtaaacatggttttttttgtttttttttttctcttctctacgttaaattatactgcaatatatattaacaaaaaatcagacctagtcatgtagtaatagtaaaatactaaatgttgggtatatatgccttcgaacttcgacggtctctcacacaagttataaaaagatttcaaaaatactatgtttgtaaattgagttatctgttaatagttatctatcgtgaattattagaatttgcttaaaggtatgatgtaaaatagatattctgatctggaatttaggactattgttgattgaatttttgtgtagtaactagtaacgagagcaggaaatttaaaagtaaattaatggtttctgttagagttcgattgcagaaaggttgatagaaataaagattcatataaaaggcatcggaaaattatttgattaacgtttgtttcgatacgagtatactataagtttgatagaaatgtgccaattgatttaaactcattagtttcattttcatactaaaagtaaaagcattattagttaacataatttttgctttacaactttagttgatgtgacgctcttcttaaatcttaagcatgtaccaagagttgtcaatttcctcttttaacatgtttcaattttgatcttgtagttggagttggtatttctataggatacacatattggataaaataagagatacaaattgcaagttacgtgctgtgcaaaccatatccacatactaatctttgtaataaccagaatcttatgttggtagtcagtagtctatattttttctcgatctcatccatattcggtcaaagaacactcaataaatcatttacttgcatataaagatcaatgatttccctttttcaaattagatattaacagaaattattattgttatattattacaagcttaatattttggtatgcttacgtatgtattattatgtacctaatcggctaagatctttgtaagaaaattagttgagtacgtatattctttttcttcaaaatattaaatatatccatgtcaccatgtgacatcgcagacgaaatgactcgttgtttttcataattgccacgatacgactgccatatttccaacatatcttaactgttagcattggcacgaatttaatgcaatatcttcaaaatctgtaaacaaaaaaaaaaactacatactataatgtagtgttctttatctacgccaacaaacccaaaagatatctttgatttttatttttttggttggtttcccatccgtttatcttcaaatgaaactcgtaagagatttaatttaaaagtagtattgtgatagattcttgttgagatttaaagaagggttaaattgtaaattagtcactttttcaaacttaattagaaaagtagtcactttactattcataatttgcaaaatagtcatttttcactgtttgatttgtaaatttagattgtacatcacttttagtgtacaaatatatataaaaatacacagtgtacactttacatttgtacactaaaagtgatgtacaatccaagtgtacgaatcaaacagtgaaaagtgattgttttgcaaattatgaatagtaaagtgactactttcctaattaagtttgaaaaagtgactattttgccaacacaccctttcaaaaatcggggaggtttataataaaataaaatatatctaagagacataattaataactacagttgctttaagaatacataatgatacacgtacgtcgaccaaaaataagagcttttttacccacacagtcgcagaagatacttagaacgaaactaaaatattaaacgtaacaaagtgtcaaaattggaaaggttacttttaattgctctgtgattgtgtagtagtgtctggacttaatttccgggaggaagtacgttaaactcacgtgttctgctttgatttccgcgttcggcgtttcattccacaagtgttgtcaaaaaaaagacaagatgtaaatttttcaattatcattatcattattgttatcgttactaatttatgactagttttctattttctaattaatatttttgttgagaaaattttgcgacaaacaattgtcaaaagaacataattagtaaactgtgacaacgaactttttcaataataaaaaaaaaactgtgacaaccaagagtgaaatgctgtgattagaacttgtatgattgttgatcaaaaagaacttgtatgaaaactgttgcttaattagagaaaaagaactgaaatatctgttttggcaaaaaaaaaaataaaaaaaaaattgaaatatacttctctgtttctttttatttgatttttcagaaaaaaaaattgttccaaaagattgtttttttaggtttttaatgcaatacttattagttataattgataaattataaaattcaatacaaattattgaatattattggtttatagttattgaaaattgtaaaccagaaagaataatatatttaaaagtaatatttaatatgatttcttaatatttctgtttttcctaaaagatcaaacaaaaaataacaaaggaagtatatcatttgttgtgtgaatacttaacaagacctatatttaaggaaaagagaagtttgtgtaaaaaatttataaatatgtaatatctttatacgttatatatatatatatatagatatgtatgtatttataactagttttatagttgcattaaagtatatgctacaccatacgtttttaattaagtttatgatttaaggataaatgattaatttgtgtatttgttgaagttcgtggatatcaagccggtggtcctgataaataaggttatgaatttataatcgcactttgcaaattatcgggtacaatctgctaaatgattcaatccggcacatcccatcacaaggcttatctggagtaacttgtttccatgtacgtactagctagtcatatcggtaggactcatatgactctatatatatattgatccaactattcaattttagttactttttagcctaaagagtaagatacgattaggatcggttcaccacatgccaaacatgcaaacgcctattttgtgtaaacattttatataattttcacgaaacggatgttatgattaaaaaaagaaacaaggcttattttcctctttttcagctttgttttttcttcaataatttaaaaaatagcagacacggcaaaatcgcctttatattacacctactctctgagccaagtcgcagaaagatacagacttaaacgaagatagagatagagagagagacgaagttttgtttttattttttcataaatatttgttttctttttggatatttaaaaaaaaaatgggttcggaagcgaccaccgccgtgaacaaccttcagcaaccgttactggagtcaacaaaatcagaagctgacttcaggatggagagtgtattaacggacacacacttgtcatattttcggcggatctaccttgcgtcgttgatcgagatgaagtaccttttccacttggcggctccggcgatctttgtctacgtcatcaacaatggcatgtctatgctcactcgtatcttcgctggtcgtttgggaagtatgcaactcgctgccgcttctctaggaaacagcggtttcaatatgttcactcttggtctcatggtactttacattttcatttctcttaaaaaaactaatttcagctatacaaaacttcaaatcacatcaaaaatatccataaaacacaaatactactaaacggatccgatgaaatgatcaaatacaagttgatgtttatgttcttcagaatctagtctaatctttaaaatgaataaagtcttctatttcataccaaaaaaaataaagtcttctctttggtcttcagaatctaatctttgtttttttaatggccggtgacatagcttggaatgggaagtgcagtggagacattatgtgggcaagcgcatggagctcatagatacgacatgcttggagtctacttacaaagatccacgattgttcttgtcataaccggacttccaatgactttactcttcatcttctcaaaacctctcctcatttccttaggcgagccagctgacgtagcatcagtggcatcagtattcgtctacggtatgatcccaatgatcttcgcttacgccgtcaacttccccatccaaaagtttctccagtcgcaaagcatcgtcacgccgagtgcttatatctcagccgcaacactagtcatccacttaatcctctcttggctctctgtctttaagtttggttggggcttacttggtctctccgttgttcatagtctctcgtggtggatcattgtcctcgctcagattatttacattaagataagtccaagatgtcgccggacttgggatggttttagttggaaagcttttgatggtctttgggactttttccagttatccgcagcttccgccgtcatgctctgccttgaatcttggtactctcagattcttgttctcctcgccggacttcttaaagaccctgaacttgctttggattctctagcaatctggtaattttccttttacattttactcggtcaatattttaccttatgaagtactaatacccatcatatgccaagaaaaaaagaaaagtaaaaatattacacatgaaaacactaacagccgaaaatagataaccttcttttttggtaagtaatattaaaatctttgaatagttccaaaactttagtttcttccatgaaatgtagctttgattgtgaaattagaaaaaccaaaaaagtggatgatttgttcatttttaatataaaattgaagaacagtgaatctgaacatgaacacatgattaataatggtactgtactgtttatcatttgtccgatcaaaacctttcgacttttggctagttttcgggaatctcctttttgataaacgaaagtcacgttactcagcagcaataatttgtcgtcgtactatgactagtaagcaggaattataactcgccacgtttttcctttttaacctttccgttaaagtcaaattgcagtgtttttttgacgtttcttgtaagcgcaaactgcgcgtcgttttccttgataatcaacggcatgcacttctgtgcctgggaaaactcatgaagtgttgattactccgagaccacaagttattagtttatttaagcgacttgttttacaaccatgattattaaagtgtgcattattgactctttcactagagacaaaaagtttattactaactagttcttacgacttggccataatatataatttcttattctaacttatcttacttaatttgtttttatttgcagcatgtcaatctctgcaatgtcgttcatggtgtcagttggattcaacgcagctgccaggttggtaataaataaatgaaaacgttttaagaacatttttttttatgctagaggtaataatataatagcataagctaaacattaattttatttttactacagtgtgagagttagtaacgaattaggtgctggaaatccaagatcagcagcattttcaaccgcggtaactacaggagtgtcatttttactgtcattgtttgaagccatcgtgatcctctcgtggcgacatgtcatcagttacatttttacggatagtccagcggttgcggaagccgtcgccgagctctctcctttcttagccattaccatagttctcaatggagttcaacctgttttatctggtagaaattaataacaaaaactaatacaaaaaaaatgcaataattgattagttgtgaataaatgattaatgacaaaatttattaaatcaggtgtggccgttggatgtggatggcaagcatatgtagcttacgttaacattggatgttattacattgtggggattccgattggttatgttcttggtttcacctatgatatgggagctagggtaaatttcatcttacatgatttatattctaatcaacgattaataattggttggtgtataaagatgagacttataaaatgaatggtttgatttggtgcagggaatatggacagggatgattggtggcacactcatgcaaactattatcttggtcattgtcacattccgaaccgattgggataaagaggtatattactaattatcatttatattttttttttaaaatacgacaattatatgttttatttttgggtaatatttttttattgatgattttcatttttattttggttttcaaattcaggtggagaaggcttcgagacgattggaccagtgggaggacacatctccgcttcttaagcaataaaataaataaattgatttttttttcaaaaaaaagaaaaaattagcttggggagattcaaagatcaattatataaataatttttggttttccccaaaatgatttttaaatggataaaaccctagttagttattcaagagatatgcgaatctcttgattaatgaattggaaaatcgattgttttctgagggggttagagtgaagagaaggatgccaatgtacatctatttttgtaagagaaaatattgagaagtgagaatgatatattgaaaaaaatgttgtattgtatggaagagtgaatttgttgtaatcgtttcttgtatgaaataaatcagataatgaaaaatgggtgttatggtccacaaaagttttttcttcgtaaccctgtaggaactttttaaggttttacatttttttgtcagtttcttacttagtatatgattttatttcgcatattcgtccattttcagtgatactgtcgttctgtggtgttacgaatcggaaacatgaatcttttctttttagaaactttttttatagttcatataatatcagtataagtagtaatggtcacataatcttatttgtaatatgtagaactatatctataggtataataatcccatcaatgatttatagaactcattattttttttccatattatcaattatgtaatctgtaaaactgtatactccaataatatataaaactgtaaaactagtactctgtaattctggaaactttgctgtgatttatgattatttatgcttgtacaaagcccgtttctataatacaaaacatgttagggtatactatagtcaatggtcaatgcaagtctttgtaggatcagttcacgttcaccggcgacaaagaataacaatattcttttttctgttagtggatcaacgtcaaacaaaactttttaaaatgtaataattttggttattatcatctgttaataatgtcaacaaaaataaaacgagtaatcctatagactttttcagtgcagaaatactatttgtatgacttatcaaccgtaaactaagataacttgctagtaagaaattgaaatctatattgagtatacatcttagacttagaactatattcttgtagaaacttaataaagcgctttatttaagtttctacaagaatatagttctaagtctaagatgtatactagatattcagtaattttatatgagaaaaaccttatggtaatcaaagtttagtttgttgatttttcttgatctaatgatgacgaaattgttataacttattaactttttaatgattgttgtaatagttgatgaaatcaaaagtcaagatgatttttttaatcttgctagttaattgtttttgttcttatagcattttagtacacattgatataaaaagaaggttcataactaagtctagtatgactgccttcacacgaatgttgaaatcgtcaaaatctggtttggtagatactgaaagggtttaaattttcctttttcatgtaaagttagtaaaataaatttatatttcttttttgatcgtagagactgtctatagctaagttaagcatcaatgattttgataagaaagattaaaattaaaatatgaattaatgattggttaagcaaagccaagctagtttgaacttgtctatactatactggacaaaccattaatctacaaggcaaagaaaatgtaatccgttcacagaatgatggatatataaatcatcatataaataaaattgtgtttttgttatatgtagcaattttaaggtccatcatgttaaggtccatcatacaaatgaaacataaatccatttatgatatcatacctctatatgaatacaatagattgaaagacctcggtcctaaatccaaaagtgatgcgatgaatcatttatttcaactattaatcccaaatcctaagcaaaaaaaatatgagaatttataaccttagcataacatagagaacaaattctaccaaacagccaccaatctgcgtagaagaaatgaattcttatcttttaacaatttcctctagtttcttccatcagcgtataaaaattctattagcaattagagaaacagcacacgagtcaactcacgagtcaacaagtcgattaaaacgatttagagaagaatttagcttggatgacaaaaaaagaaaagaatgtagctttaaacgagagattcgtaggctgagggaatggagaaatgttttctatttttcttatttttatatatattaaaaaaaagataatggcaacaatcatactaatattattatttaagtgtgttttggaaagcgccaatgaaaagtttttatctacgtaagcaaccattgttcttgttctgtgtgttttggaatttacgtgagatttatataggctgaaaagtttttcaaaattaaatgcttatagattaatagattatataccataagaaaatgatttaatttattagcaatatgtcaaattgttcaatgttttctttttttataatttgactgtttttttaggtaagaaaaatatttgatttaacagcaatatgacaacacataagataattttcctttcttagatttgaaatacatattgttactatttgattgagatctaaggacatctcttttaatgaatttaggagaaattaaataaataaaaaataattaattatttaaagagccgaactctttagaattgataaagcttttggaatttgatagagttacgtgccaaccggttattggatgtgattgtaaaaaaaaaaagtagctttcaatgagagattcgtaaacaaagggagtggagaactttttatattttatgactttttataaattaaaaaggataatgacaataatcatactattattattattatagatcacgagaattacataatctttatagattcgtaaacgatttagagaagaatttagtttggatggcaaaaaaagaaaaaaaatatagtttaaataagaaattcgtaaaaagagggagtaaaaaattgttattttattttcaatatataaaaaagaataataacaacaatcatactaatattattattattatagatcacgagaattatagaattcttttctcttatttataaaacattccagaattataaaataatagtaaacaaatctttaataacattacttttcgtcacaaaatattactaacggtttaatttgttcatttaggttttttaagtttacaattcgtaaaaaaacttatattcgtattcgagttgaatataaacagaaagttctaaataaaacaaatcttatatagcgaagattgcgatgtgatataggttaagagttttgagcatccccagcccccagtactcgttttcctcaatggtccttgtcaagattcagttaaatgtttattctgacataagtccatcttgttgttgacgttattaaatattgccgttggaaattattcacctcatttattatttttttaatttttgatttcatatacttattccttaaaaagaacccatactgtatataagattatgattcgcatgatatacacatactatagataatagatttaaggaccaaattaatatggtttcgctattattgtattgtataggtttgttcttacgtgacatgagtttggtctatcttcaactaaatcggcaaattttgtctcgtgacttgacgaaaaagataaataaatgattcttcaacttggtccggcaattttaaatgtttatggttggatacgtctgagattcgagctcgtacgatctgagaaattgaacagatgatagaaactggaaatcatttccatatgagtttacggatccactcacgatcatgcgtaaccgatacggtgttctctcactcattccactttttatttgtactgttttgtgtacgattggtctaaattggttggcacatgtcacaacaatctatctatccaacaaagcattttaaatataaaagtggttaaagattaaataaaaagggattcaccataggaaaaaaaaacaaaatctgaaaaatcaacctcgagaataatcgtttcaaatcacccatcatgagagatacacagtgagattgtttattgtttttttttttgtttgccccatgtagaataaaagattcaaaatttagactataagagaaagaagaacaatcaatcaagctccatatcatctgattttctacttccgtatgatccgttatgttccggtttcgcggggggagagtttgatttcccaatgtacttgcatgtcctgaaacacattcacaatcctttcatcagtttatatccggataggtttcatcaattatgaccaaagtttttgcagtagaaatgtgaagaatgaagatggcttgaagagtagaaagagagggaaagattagatttacgcgtttagagcatcagcttttctcctgatttcagcagattgcagctctggattagcgtctttgggtaaagattcctgttctgtggttttctcgtggagccacctctcagctttatggcattcatcgagaacctgaaaacgaaaaaaacatcatggttatataatctcaattatatagccaactagacaacaaactttgtccatcttataagatatattattgccaacagagtgagacttatgttagtagtttagaaccaaaccgcattctttcttggaggaggaagagactctgcagccattcggttatctgcaatagttttcagaagatcttttgatgcttgaactcgctcttctccatctttgaaccggttttcaataggatcgatgagctgctcagaaacataagccatcaattaggacaatgttatccacatagacttaacctttatattgcaaactttgagagagtaacctttttgacatcattcaacttctcgatgtacgcattttcagattcatcatcaccatcttcatatagccattcctctgtttcctgaagatttctagctatgcattcccgttctgactcggttgcagtgttccgatatgtatttaacatctgctcgtatacacattgttaattcttggaagtgattaaatattgaagagggaacaaacattttttactgaaatctaaagggaaagctttgagtctactaaacccagatgagtaccttatcacgcatctcatagacaaaagattcaagagcatttttcttatcctttgtcgattccatcttcagatcttgctccactaaagagttctctctctgtttggcctccgataactcatccttcgtcaatgcaccagacacgttcgcaacaactggaatttccattcttttgatagccttaggctcattaccctacacaagagaaactattgtcaggactttttctttggagaatcctcagatcaatcatttcattgtttcagaatttaatcacagctttttctatctcggccttgcagcctttttgctatgcaactgtatttctttataaggtgttaaactatacttacaatagaacctgacgaagggtccaaagagccatccttcatagcagaagattgatgattctcttcagatatcatctcttcagaagttatattctccttatgatattctattagctgttcagaaacggaaagtttagactcaagctagcgagacacacaaaggaaatcatatctggagaggactgatgagattgtactcaccgtagctgaatcaatcgtgacaatcccgtggagatttagctgaactcttactttgacacgtgccgcttctccgtgcgatatatgaaaaggcccaatctaacaaaacatacacagcaaaattaactttccataaaatatgcagtgcccaatagtggcataaccatccaatgcgtaatcagaactctaaagactgaatatatatctgaataagggaagcctgaaagatatcataccataaaactgcttatctgtgttggtatatctggtgatagttcattatggtttgcataaaaggcttccaactggaaagtgttttccctatgtagagtaagaacctttacacttgggaagatctggcctttcggaaagagcaattcattcgatggtgtgtttatgggacctttatcagatgaaaagccgattgcgaaagggtaagaatcttgaacctggaaatagggaagcataaacaaaagacacatcaccatttatagaaaataaatccgtaaatgtataactgccatcatgtatttaatacacacgatactcaaaaagaaatgagaagtaagcaagagtattttcacatatagagaagagcgtacctcataatctctaactcgaaaaactggactgagcattgcacattgaagcgcacatcctcgagctacgcactcacttgcattcacagtcctgcctagctccctcttaaacaacgagcttagcatcttagatatagctggaatgcgggaccctgaaccaactagctccacagagtggatttgatccaaacttagaccagagtcagccaaagccttttgacacggtacaattaatctctccaacaagcctgctgacaactgctcaaactcttctctcttgatgaagctcctcacgtccttctcctccatcagacattcaatattcagctgtgcctcagcatttgcactcaagacctttttaactttctcacacgatgcccttaacctaacacacgccttggtatttgtatatacatctatgttgtatttctccttaaattcaagggcaaagtggttgaagagaacctcatcaaaatctctcccgcccaagtttctatcaaaagcatgagaacggactctcatgcttccagactcaaacgatgccacacacacttgtgtatcacagtgaccgatatcgataaacacaatgtaagtagggctcgagttagctaccaaatctgtcttgtatataccatatccaagtgcagtggcggtagaatcatgcatcaatctcaatggcctcaggccagcaatggctgcagcatccaaataggcaagtctttgtgagtttgtaaagtaggatggaatcccaatgacacagtctgaaacaggcgttttgagactcttctctgcaatctgcttcaaatgtgaaagcaacatgcctaatatctgcaccggactgaagctctgtatctcacccatataccgaagccgaatttgaattccaccatcagagtcttcagaagtttcaaaaggaaacaacctcagatcattctgaacatcaggctccctgaatttcctaccgatcaatctctttaactgagaaatggttgacttgggatgcatagtagcagaggcagcagcagcagcacccatgaatctctgcttctcaccaaaggaaaccatagcaggattttctcggttcgattcatcgttcaacaaaacgtcgatccctcgttgctttgcaactgcgataacacagttctcattcccaacatcaaatcccactacactcattttaacaaacctcaattacctgatttcgtctagctcaaaggaagaaaagaatctctgcatatgggaaaccagaaccacaattaaatcaaccaatctcaaacagtaagagaatctactgattaaaaaggaatcgaaacaatgcaccatagatttttaatccatgtatccatagaaagtaagaacacgacccgaaacaatctgagaaacaacgcaaacattcaacaaatttgatacaaccaagatcaacttcacaagaatgcgcactaaaatcctaacaggatcgttaacactaaacgaaatcagaaatttcttctctatggtttagatttttctagcaaatcaacaataagagatcttaggtatatatatatacgcattatgaattttgtgctcgttaaggataaatctaatcaaacaataagaagaagaaaatgatgaagaagactataccgatgatcagaaacttcgaaggacctccgatgacttctcgaacgaggaacgaagaagatgagagaaagggctagaaattagaaaaataagagacaagggaaaggctaacgaaaagaaaaatgtatttgcatttaagtccttattaattccttttaattgatattatatcccagagatatttttggacaacctagcgcaagattgattcacgatgtcgcacgaatgcccccacatgtttcaaactttcaatcgagtaggatcggattttcggattcaataactttttgacttgagattttatttcgctttaaaaggtaggtcgtttgaacttacatattgctaacatgcatgaattacttgatttgtatccatatatgtggtactaatttgaaatttgaaaaaagctatccaaccatgctttttatgactatccaaaatatccaaactcaaatttgatctctaaccattttgatgagcgtttgaataataagtttaggttcataagcaaaaaaaaaaagtttaggtacaaaaattacgtaaacgtaactcacatttacatcaaacttaaatttgatctctaaccactttgatgagcgtttgaaaagtttaggttctttagcaaaaaaaaaaaaaaaaaaaagtttaggtacaaaaattaagtaaacataactcacatttacactaatctgtgtgtcttatatatattttagcatcatcatataattaaaatttgacaaaataaaaatagatcatcatatagttaaatgattatttcaagatttttttttacctttttgaaagaaacaaaactcatgatctcttcatattacatttcttgataaacttttgtaatagagatcaaaagaaactccggaaacaaaagaaaaaaaaattacacaaaacaagaaatataaataaatgaaatttcaaacttcaagggagaaaataggcctaggtagtccagttgttgcaccaccttggaacatcttcttcaacgctctcacgccattatgagaatgctttcgaattccgccaaatctaacggcggatactacactccggcgtagcttagccaacctctttccgatcttgaccttcaacagataaagcttcagccgtataaacgacgaatgaggatcacgccgagaaatcaagtcggcttcttgaagtgttttgtaaatcaagaacttggctcgtcggctaagtacctcttctggatcttccttgtccatctttgagtaaagacatggcctcttgaatagggtcattttcgtctttttgtgttttcccggcgacgacttttggaagagaaggtagtgtgatcagagagagatgaggagaggagttgaaatgaccaagtatttgtagtcattgcattgagcagtgctggtgcactaacttgtagcttgtatacgtgtttcttattttctttttctcaagttatgtaatttcttattagaaactaaactttttggccaaaaaaaaagagaggacaattaaacttaattataagtcaaatcattaagataatatataagatagtatgaattttccagctaacaatcttatagttaatgcctgtatataaaaatcattgttcatatttaattatgcaaaatgaggtcatatagtttatatatttgtaagataacatcttagactgtaaacatttaaatttaagagcttgccgtccaaatatcttaatttatttgtttgcaaaaatgaggtcatatatatatagtacttacatgtataagataacatttactactttagcattttaatttacgagtttgcagcccaaaaatacatatgtggaatttggttttaacctttgtgtccatgtcggaaaaaccattaatcaatagttttgttgagttcttaattttttgatagatttcttataattaatgaataatgatttcaattaatggacataatttaggaatattactgatctagcaggggaaaaatcgctgacttttctttttattgtaatgaaagaattctaatttcctcggttatgaaaaagctataagtctataacgttatgaacttgagaaaataataatattgtttcggagccaacaatttttggtctcagatataagacaacgatttgcaagatctactaaattaatcaagattctccttattatgtgtcctttggttaggacaacgggtcaagacaattattttaaatatatttttcaaagcttggagctgttgatatgagtccatacatacatgactccaagattcatagtatgtaaaatgttcaacttgagatttgagagacgtataccacactgcctctacatagacctctaaagactccaactgttctaaagctggagcctagttgtgctcaagatctctggtgattatcattcatcgaccactcttttaacattcaaaaataaacacataaccctaaaatataatcaacgcttacgttctttcaaaaggtgatgaaaacattaaaaacagaagcatcgcagaaacattattaagagttaaaaactcaacacacacctagagaaaagcaaagacaaataaactgtgtttgggaaaatattcataacaaggcacgcagaaacaagttcataacaaagtacgcaaacaacaagcagagtgacattaactcaagcaatactctcggggttagtagctaaacccgacttgttgctgctgtggtggctgttgtggtggttgctgtcctgcctgtggtgtctgctggtaaccaccgctgtatcctccaccagagtagcctccgtaatatgcattagggtcttgaggcatcgtgtacccatactgctcctgtccttgtccatacccaccgtagtaaaactggctcggatcccccgactggaaaccaatatcaaaaaagcatttcagattataaaaagctacttgaactcaactattttaagcgattctgctatcatctaaaacaatagcctggactacatagttcttagaacaaaagccgatacacggtgagagaagctgcgatagttcttagacaaaaggcgatacactgtgagctgtttctttctatcatctaatgtcaatgtaaagattatcaattacctgtttgttcgaaggacttcggccccatgagagcctgacggttgttccgcctaattgcactccattcagcattctaagagcttcctctgcacagctcctgaaaagtgagggttggtcacaaaacacatgataaaaaaaactattagaattctattccaaagactattttagggttaaatgaaagacagagcttccagtagtagcagcagacttacttctcggaaaactgaacgaatccacagcgctttccagcgggtattttcacatgcacaatctcaccatattggctaaagacattcttcagatgatcatccgtgacagatgcatctaatccaccaacaaaaacctgtacagtaaattaaaatgcgtcagatataaccgctttggaagataaccgagagggacaaatatataataggagcttaagacccacagttgtgttatttggatcattatcagttgttacccctgcagcagagctctggtatgaatctgcatttacacgaaaaaacacaggtataatggaagtagtaagtcactgtaaattacacatgcaacaaagtgattggaaaactatgagggagccttttgcagcctcatctagatattcacatcaaaatgaaagcaaatgcaaagaaggcattcacacatatacaacacaccgcccaaactccaaaaggagaatagtattcaaagaaggcatcagtgatgttaacatcaatcataaactatacgtataggatcattccatcaacaagcattgagaaaggatctgaggagctgcaaccgcaagaaaacgagcaagtagagagcaacaattacatttgcatcacatttcacccaaggtttttgactactcaagggtagataaaggtggtaaactaaatgaaatgcctatagagaggaatatagaggattataaaggtcaatactgaaaaaattagaaacaatgtatagactatttctctggccactccagaaactgtcacatctgaccaaatctcataacttaaggatagaacttctatcatctagactcacaaaaacagtaaaaaagagcttgatgtactaaagatataagtaaatcaagtgaaagataagaactttaagtagagcggaatgaaatagaaaagtaattacataagaatcgacttataaaagtaagtaactgaccaagaactggaataaaggtttgtatagaaaagataaatggaaattaaagtagggctgaatcgaaggaaagggctaataaaggacaacacatgaactttaaaactgacctaagcatgggcactcaataaggagataaccatttcagctgaatatcagttccaggcctcaagatgatagagagcctcttgactcccctgctttgaaacaaacaggatacaacaagtgttctataagatttctatctttttaagttttttaacagaattgactgcggcctcagcggtaaatgtaggatgcggctttagaaaaagtaatggagtcatacttagcacaaggcagttaactagttcttacttaaggcaacctaatcacatagatactacaacacacaaatcaagagaatgcaagatcaaatcagttctaatgtgacatatactttactttacctctttgaccagttacacctttcttgctagcagcgggaccaattctcataggtctagtagaacaaggaacgccattcatctccgtcatagcacggatctgttcactttcatcagaaaacctaacaaacccatatccttttgtacgtccagtgactctgtcaataacaacctttgcacccttcactgacggataagaggctctgaacgtctcaagtaagatataatccgtaacatcagcagccagatcaccgacaaatatcgtgtagtccggtgaatcgtctcgtttatctcctgaactcaatgatgcccagttcagtctaaagagctgatcaggaaagctcgggataggagcgttgttgaatgtttgtagaactctttcagcagcagcatgagatgcgaattcaatgaaaccgtatccttcaacttgaccggtttgcttgttacgaatcactttagcagaaaccatctgcaaaataaatactgatagtgttaaaccaactagtcattatataactagacagaacactcattaactcattgtcggaaagagattacatattaaaaaaaattcaaacatctaaagttaatctttttacacatcaaaatcaaatctttcaaatataaaagcgaggaaacaattaacactaacaagtacttatcaaattaaccttaatctccttcgaacaaacaattaagcgcgaacgataaagcgaaaacagagagatctgagaatattacctctccggtatgagcaaagcaaccgtagaggaaattctcatccatccaatactgtaagtccccgatccaaagagtccggatctcgtcagcggtcgtaggctgaactgatggcggcgccgccgcttgaggattccacatctgtggtggtggtggagcagctccagcaatcccgtaaggttgttggtaaccgtactgttgttgcgcagaaggaggaggagcgtgatgtggaaggatacctccgggtggtggctgctgcatcatgatgatcggagaataagatagagagaaagaactcttttgaatctctgaccgtagaaaaattgtgatgaagaagaagataacaaaacaatgctaaagatgagagattgttgataaccctttgagaaggcggcggtttgtaataaaacgatatgtgttttactatataaatatcctttggtgcttgtaatcacaagggatccgtggcgcaatggtagcgcgtctgactccagatcagaaggttgcgtgttcgattcacgtcgggttcaaacccccggtttaaacatgatccttaactttttatttaactttttaaaaaatatcctagattcaatcggaaccgtccaagttgctgactagtcataaaatcaacggatgatatgaattatgtatatgatttaagtaaaccattgaaattaaaaattttattttgtcaaacccctaaaccggtttaaacctcttctctctcagccgtcgtctccatttcttcggggaaatcatgaaccctagtaatggcgttcctcttccgcattcgaacatcggaatttatactccagaaagcgactcaattccgattgaagtcttcttcttcatctatcttcacactaaaatctctcactagcaagcagaagaagagccgagatactctctcccttctcaaatccgagaataatcctgatcgaatcctcgaaatctgccgatccacttcactctcacctgattatcacgtcgaccgtatcatcttctccgttgcggtggtgacactagcgagagagaaacacttcgtcgctgtatcgcagcttctcgacggtttcatccaaaaccaacccgatccaaaatccgagagtttcgcagtccgtgccattatcctatacggcagagcgaatatgcttgatcgatctatacaaacatttcgcaacctcgagcaatacgagatcccaaggacggtgaagtctctaaatgctcttcttttcgcttgtttaatggctaaggattacaaagaagcgaatcgtgtctacctcgaaatgccgaagatgtatggcattgaacctgatctcgaaacttacaatagaatgattagagtcttgtgtgaatcaggttcaacgagttcatcatactccattgttgcagagatggagaggaaatggataaagccaacagctgctagctttggtttaatgattgatggtttttacaaggaggagaagtttgatgaagtgaggaaagtgatgagaatgatggatgaatttggtgttcatgttggtgtagctacatacaacattatgattcaatgtttgtgtaaaaggaagaaatctgcagaagcaaaggcgttgattgatggggttatgtcttgtaggatgagaccaaactctgtgacgtattcgcttttgattcatgggttttgcagtgaggagaatttggatgaagctatgaatttgtttgaggttatggtgtgtaatggatacaagcctgatagtgaatgttacttcactttgatacattgtttgtgtaaaggaggggactttgagacagctttgatcctttgtagagagagtatggagaagaattgggttccgagttttagtgtcatgaagtggcttgttaatggactagcaagtcgttcaaaggtcgatgaagcaaaggagctcattgcggtagttaaagagaagtttaccagaaatgtggacttgtggaatgaagtcgaagctgcattgcctttgcctcagtgaacaaaggtacacatagaagaagtcattcatcttcgatttgacatgaggatttgaagtttttgagattggttagtttagctgaaatcatctgtcaaaattgaaatgaaaggggatatagtttgaagagaatcttgtcgttgagattaagaagctatctctctaaggattggtgctggtgaattatcaattttcttactgaatttttttgaacatgttgtatataaatggaatgtaacatttttcaatatatcggaaacgatgagcctaatcgcttcatggccttgctgatgaattgaatctcgaatgtcttttgttggcatgggaccatgttagcttcatgaaaatgtccatcaggttaagcttatgtaagaccaaaactcttcattataatgatatttacattcttctccaaaacaaaaaaataaaagcatcatatctagccattccaaatactggaaccagcttcttcttctacctatacccacctctgaaaagcccggaagccaaagcaagctaggaacataacagcaaccaccgagtgtacgacccatatcagtgttgtattcaactttttggcaatcttgcttatatccctcaatgtagatgctaatatacccgctttcgataaataccacaagcttaccattcttctcattgaagaaacttaaatatctacaaccatatatcggaagccgatctgttatagcaactgccaccagccagctccaatgcagcttcttcttcttcttcttcacccataagtgtatgttacttgttaagccgcattcaagtaacaaagagagttgatctcttctgaaaatccctaaagaaagattattcatcaaataagataactcactcgaaagataaaaaggaggacgaaccaagggctcaaatctctcttttgagaaatcaaaactctgtactgaaacgggtttatgatttgacttattgtaagctatccaataaggagttccttgtaaacacacactcgactatggttatcaatataaaccattagaggtcttatcaacagccgtcttccaagaatcagatttgaatgagtaaacttcaaccgttgaacttaaatcagattcaaactcataaaatgtaattcctatctgtttcttgaatttgaaagtaaaaaaaaaacataaaatatccaaagatagaaactgagaaatccttaaaagaaaaaccgaaaatgttccaaacaatggagccagcttctttgttcttattctcatctcgaaaagcctggaatctgaagcaagctctgaatatagcagcaatcactgagcatgggaccaagaccagtgaagtattcaaatcttttgaattcttgattctctcccccaatgtagatgctaatattcctgcttttgatcaataatgcaagcctaccatttctctcaatgaaggaactgaaatattttccatatatcgcatcttgaggtacatcaactgtcatcagcctgctccaatgctgcttcttcatcacccataagtgtaacttacatgtttcgtggcattcaagtaacaaagaaagttgatctcctctgaaaatccctaaagagatatactttaccaaattacgtgacccaatggattgaggaggaagaaacaagggctcaaatctctcttttgagaaatcgaaactctgtatcgacatgagttcattaccagatttattgtaacctagccaataaggagttcctcgcaaacaaacacttgacaatggcaatccatcgaatccaccaaagtttgtatcaacaacaaccttccaagaatcagacttgaatgcgtagacttctacccttgatgaatttttaattccacaacgaaatcttacaactttgtaatcataaaaacctgatgattggttaaaaaggtatccaagaccatacgcgtccatggaatggtcaaacccttcgctacatttaatccatctcttttgactcaacaacggattcgcaaccaaaagcatacttttagtgacgtatagcaatagaccgtcacaatgagatatattgatcgctggtgaaagagctattggaaaaggcaatttcacaccacaattttctggtttgttgaaatcgatacctacataagaagttgtggaaccgaacaaaggagaaactatgtgttcgttgttaaagactgtgaattgttgctcacggtaacgcatgtgagacaagtgcttgttgacgaatctcggctctgcgattagggcttcccactgcttgcatgtggatctcaatcgtacaagagatctcgctggaacccgtgagagtatctcctctaccaaatcagacgaaagatccattgtagccatcgtgatcagtagttttttattcttctttaaaagggagtttgatgggatcggccatacgaagatctaggagattatgatatttgttaatatcttcgtttatgaatcatgattattcatatttatctctaatttttttatttttatattatgtttattttaattagtaaaatgatttgacatttaaatatgtaaagtcttggataaatccaaaatttaacaacaagtacaatgatcctactatattatttgggaagtacattttaaatataaccttaatttttgtaagtaattacataggtatgccattagaaataaaattttaaagagtaaattaatttatctctttaaagattaaaaagtcaaatactaatttaattaatgaaatttaattaaaaacgaaatacattattaattttcaaaaataataaccaatcaaaatcaacatataagatttgatatctaaatttaattctaaaactaacttcagtatattattattttcttacagaagtacaatccaattcattattactacattatcattatcatctaaactgattctaataaaactgatggttcttattcataaatacaaaagtcaaaaggtatatatcaaattagtaaaactttacgattttaatattctaatacgagttgttaaaaagaacgtctagttccaaacactatagtttgtatactattttctaagtaaacaaaaatacagtcaaaattataactactatcatatgtcagctagctaaacttattctcatgattataatgaaacaattaaatatgatttttttttttttttttttgtcgtaacagttaaatatgaattaacaaaaaataactgtagtgttatatattactaacgtacacaaacattttttttccccattaaaaaggggtaattgcaaggccgaatggcttatgacggctacaagcccaaacacaaaagaaataatccagagcaaaaatcagaaaaggcctcaggcccaacaagctaaggtaagagcagagaataaaatgaagaaatgaaatgaccaaaatgcaaggattagttgttcaaaaaagacgactagatatagttgcccactggcactgagccactgactatagtacttttttactcttcaacgtatggacaattcctatttgaaaagtagccactgacgatagccactgactataggaatcatactatggacaatttctcactattcatgctttgtttgttcacaaaaaacgatgagttccaataaaccctattaaataacaagtagaactagttccaataaacccaaaatgcaaggacaagttgttcaaaagagacgactagatatagttacagaaaactgactataatatttttcacgtttcaaatattttttgtttcaagtattttttacttttcaacgtacacaattatgcaatcaaactattcacgctccaataaaccctataaataaccagcagaagatgagttaaaaatcacaaatcatacactttcattttcatacatgagcaatattcaagaaatggaaatgacattgatggtttctctgtgcttaacgaccctcttaacccttctcttacttaaaaaattcctcaaacgaaccgccaaaaaagtgaacttaccaccatctccatggcgaattccagtgattggaaacctccaccagctcagcctccaccctcaccgctccctccactccctcagcctcaggtatggcccactgatgctgcttcattttggccgtgtccccatactcgtagtctcctccagcgaagcagctcatgagatattgaaaacacacgatcttaagtttgccaaccgcccgaaatcaaaagccgttcatggacttatgaatggtgggcgtgatgtggtttttggtccctatggagaatattggagacagatgaaggtatttcattactaagccctctttcatatatatgtatatttatcttttttataacttgcacccacacatatatatgtaccacaaattctcatatatagtatatatatcctttaatcaactgataatgattttttgttgtggctttggatgaagagtgtctgcattctcaatctactcaccaacaaaatggttgcatcctttgagaaggtaagagaggaagaggtaaatgcaatgatggagaagctagagaaagcaagttgttcttcttcagcagaaaatctgagtgaactctttgttactctaacaagtgatgtcacgagtagagtttccttggggaaaaaatattgggaggacgaaaccgcagggggtctcaagaagcgagtgaggcagatcatggagcttttacgcgagttcccaatcggggactatgtcccggctttggcatggatagacaggatcaacggtttcaattctaagattgtggaagtgagtcgagcgtatagtgatcttatggaaaaagtggtgcaagaacatttagaggcgggcgaacataaagcggatttcgtcaatatactgttatcaatcgaaaaagaaaagaataatggattcaaagttcaaagaaacgacataaaatttatgatcttggtaggatcattataagctaattcattgataactaacctagagttttcaagtttgagtaatgacatgcaacttttcatgacttgatatcaggatatgtttataggaggtatttcaacaagttcaactctactagaatggataatgacggagctgatcagaaatccagagtgtatgaagaaactccaaaacgagattcggtcaaccattaggccacatggttcatacataaaagaaaaagaagttgaaaatatgagatacttgaaagcagtgattaaagaggtgtttcgggtgcatcctcctcttccactaatacttcccagactattaactgaagatgttaaagtaaagggatatgacatagccgcagggaccgaggtattcaattataacaattgaataattgaccatcatcttattccaatatatataacaaacgatttggctaaacttgtaatggaaacatttccaggtgttaatcaatgcttggtcaatccatagagaccccgcgatatggggaccggatgcagaagaattcaaaccagagagacacttagattcaactttggattatcatggacaagatttgaaatacatcccattcggatcaggtagaagaatttgtcccgggataaatcttgctatgggtttggtagaggttacattggccaaccttgtaggccgatttgactggagtgtcgatcctggaccaaatggggatcaacctgatctagctgaagattttggtctcgatgtttgtcgcaagaaccctctcattgcatttccatcttccgttgcatgaaatgtttcttttaccctattatgaaattcactaataagaagagttttttttttcttcttcttgtgtgtgcaaggaataagaagagttgtaagaaagaaataatccttcaattaataaacatggttttttgttgacatgctttttttctgcttctttatcacccataagtgtaacttacctgtttcgtggcattcaagtaacaaagaaagttgatttcctctgaaaatccctaaagaatgacacgtttccaaattacatgacccaatggcttgaggaggaagaaacaaggactcaaatctctcttttacgaaatcaaatctgtatctacatgagttgattatcattcttattgtaacctagccaataaggagatcctcgcaaacacacacttgacaatggtaatccatagatcccaaaaaaggttttcatcaacaaccttccaagaatcagatttgaatgtatagacttcaagatttgatgaatcttttcttttcttttgataatgatatgatggatctttaattctgacatcacaacaaaaacttaccacttggtaatcataatgacttgatgattggttataaatgtatccaagaccgtccacatccacagaatggtcaatagaccgtcacaatgagaaatattgaccgccaaggaattagcttttgaaaactgcaatatccaaccagatttttcaggtttgtggaaatcaatacccacacaagaaactgtggaactacaacacgcaggggtactaccgcatgaaggacaaacagtctcgatgaaagctgcatactctttcttcgttaaaaagttaaaataacacagtttcaaatgtagtgacaaaacccaacaacaacaagaaaaaccatgacatcattctttgagtcaatctttctttttgtttccatagtcataacctgacctttcttcttcccgcctagagaaaaccgggaaccggaagcaagctcggaacatagtagcaaccagaaccaccaactgaacgatccatagaagaatatttaactttttgacattcttgatcctctccaacaatgtagatactaatagaccctaagtgatgaatagatagcacaattttaccatgattctcaatgaagtaacttgaatacttcggacacatgggaaattcaggtagaccaactgtcatcaacctactccaatgcttcttcatcacccacaagtgtatcttacttgttactcgggacttatgtaacaacgaaagtcgatctcctctgaaaacccctaaagaaagagaattctccaacttctcagacacaacgcatgaaggagtaagaaacaaagacttaaatctctgtttatagaaatcgaaactctgtatcgtcccataaggtacaccatttagataacctaaccaataaggagttcctctcaaacacacactagaatctggtaactctaagaacccattaaagctttcatcaacaacaacccactaaagttttttggttctcataacaataaatcatcacaatgatacatgttctgtaccaaacaatttaatgtcgaaattggttgaaaaacctgcaaattcaaacaagggttttcgagttcgtcgaaatcgataccgacacaagaatctgtggaaccagacaagttgttagaaacttcggaactggaaacgttgttgaagacagtgaattgttgctcacggccacgcatgtgttacaagtgcttcttcatgaatcttgaatctgtgattagggtttcccaaggtttgcagatggattttaatcgtggaagagatctagatgaaacccatgagagtatatcctctatcatatcaaaggaaagctccaacgctgtcgtcgtctgatttttgaggggggttttagacttcaaaaaaaaaaaaaaggcgatgtattgttcatactttatatagtctttgcctctacggacttcgcaggtagaagcaaaactgaaatgttaaagcccatttatctggtttaggtccaatataaatccaaagatccacatatctcactgtctattttttttttgttcagaatcactttcttacaaattaatttcttcttcgattataacttattaatgaattttctattcaaacaaaaaaattcgtgtaattttggaaatatatgattctgaaatgtttttaaaatatatataatttatgataaataaacacagacaatgcgacgcaagtttattagcaaaatcagatgttacaaaaaaaagtaaacttatgatgagtataatattatctatagatcttgcaccgagaccaagaagatagccgatgtgggtctcgatgtccttgatcagaattttaattgtaaaattctgagttcattcaaggtctagacatttctgcccaccatgtattaaataagtttcttcttgaaccaaaaaaaaaacaactttctgaaatttcaaacatttagggccgaccatttttcaaaatttaattattgttaaaaaaggaaagaaacaatgtttccattttatcacctatgtttgcctatgtaagtcaagctaaatgtggcatggttaaaggttaagggaatttactttgatatattcatattatgaaatgggatttgcttttcttaagacttaatatttcagaactgttgttaatattgaaccaaaattactacttttaaaataaaacaaaaacacatatgaaaagaaaaaacaaactctcgtacatataaaattaagtgaaagaatcaaagacttgtcggtaagaaaaaaaaaaaaggtttatctttggcatatgattttgccctaaaattaatgcacggttggcccaatgacaggcttggaaggttagaaattcactgctactcattcaccaagtgaggccaacacacaaacttcacttacttttcaccttcgtttttgtacattcatatttagaaactttagatccatcattccttaattttctaaaacataagatgacttttttaatggtcagtgactcggacactcggtgtgaatgttttgcaattttaagttaatcggttgacctactattatttgttcgtttatcatattataatctagatcttacaaacatatagtagtttctttataaggacaactaataattgaagcgagtgattcacatatgataagtaagaattcatcttttaagtttactgtagttgtcgccttgtcggtggccaaaaaataatttcaacttctcgcaatgatatatctattttttatttacttttcgtttgtttcattgtaaaattatatatgtatttttaacgaatattagtgacagtgtacatacattacggtttaagaagtatgttttatttttctgataaagaaaaaattttcttttgatcgaagttaatgttgttcaccgtactacttggctagctagccccaacatacttggggtggaatttaaatgtccaccttactactgacaagttcatttaaatttgaatacgtctgcgtcagatttacccacatttcgtcgtggtacaagatatacttataattgaaataaatcgaaaatagaatctaaatattaaatcgcttttgactagacttgactagactgtccacacaaatatctacaactatatactattgtggcattaatacttaaagtaattgatgaacaattatacctacaaagtacaaacacatgaaggaacagaaactgcatatgattatatatattttacactccttgagaatagataaagatagacataaacaacattaaaaatagcaaagattaatgtgacgtactaaggaattataacttttaattaccccacacgcttacaaaaactaaacatatccgttaggtccttgacctgatttgcgctttgagagaatttttcataacgaccgtgaaggcgtacgtctcagtcgggtcgggtggagaatccggaaccgggatccatttaaacgaatggatcatccttgcaagcatcaagttgatgtgcagaatccctaaagaccaagccgggcagatcctacgacccgcaccaaaaggcaacattgtaacaccacgtgtccccgtccagtcagcatcaaccccgtccccaccggttaaaaacctctcgggtcgaaacttaccaggatccgaccaaatatccgggttctcagtaacccaagcagtgtaaatttccacatacgcccctgccggaatatcataccctcctagctccgtgtctttcacggcggcgtgagagagaagaaaatgtcccggaggatgtcgtcggagagtctctttcacgatggcttctaaataaggcattttcgccacgtcatcctcttcaacgacgccgtttttgccaacaactccaacaacttcctcatataacttctcttgaatgttttggtcagtcactagatgaaataacgcccattcaagcgtcgttgcactcgtgtccgtaccggcagagacaatctccgagcacaaagtcacaatctcttcatctccaagctcaccacctctctcgatcaagttcaaacgaaacaaagaatccacataagctgcaccaatcggactaaccatctcttcgttaggattctcctttgcatcaacgaacttacgacggtttcttatcaacggcacgagacactcgagctgcgtcttcctcagctctctagcttctctaacttgacgccgaaacaacggagtgaaaaccggcaaaaagtcaggtaacgtcggagaagttataagcataacgtccttaagaacattctcaatgttcttaatcttttcctcgctgatcttggcaccgaaacaaagacagatcaagatactacaaatcgttagcctacattggctcataacctccacgaaacctttctcaacattctccgttttaatcctcttcatatgattctgcatagcccaactccttatccacgagcactgcttcactctcggcgcggtcactagctctgtcacaaagttcctcctcagagtcctccacaaagatccgtactccgccgagtttatagcgcatttcccaacactaaacatgagccggatcggcgagtccggaggccgggaagcgaatgtagggccgcgttggactagtgcctcgtggatgagtttttcgtccgtgatgataatcatcgtacgttgtcccatctgcatggtgaatattggaccatactttttacgtaggtcacgcattaagaagacgaaatggcgacgttggaatatgacttggagtaggtttccgactagtggccatccttttggtcccggtggaatgttcaagctacactggctgcttccggcggaaaagtaccggcgccaccataggttgatgaaatagagagcgaacaagaatatgattacgtcggtgagatccatgtttattattattgaagagagaaagatgggagataagtgaagaagaatgttagtcagagttttgaacaagtttagagtgaatagagatttagggttcttatatagagaaagtatatgtatgggtactgaagtgaatctgtcaactagtaattggtctcaccaaccatctgtcatctgtgtgcatttacttcatactgtatataattggtatatgttttactactatataattagattttagcctaattacagtagtatacttaattttcagtatgacagtattaaagatctgggttttttttttttgtgaaatattgatctagttaaattccagtttccataatgatatattttaaggtatgtgttcataggggacacattaggcatcgcatattttcttcggcaacattaattaaggggatgcataattattttgtcttacatttgcaagcgtcaagtcttcttcttagctatagacttttttgttgtttagttaagggtttagctttttgagaagaaaataaacacaaatatagaagctactttatttctctgtttatttgatctatcctagtgaagttcctatttaaagaagataattaattgcaaagaatgatgatagaagttaatcgttaaaaattaaaaaattatcttttatttttcatagtaacaaaaattaaatttacatcggaaacttataacatgcaattttgtgaaagaatacaaaagtctaaaacatgaatctttaagaggaagtatgaatttaaagttatcgacgatagctaattacaaaacttaaaagttactatgagtaaccgattccaacaaatgttcaaatactgaaacattcactattcgaatattggcaaaacccatatcttagacaatatagatagtcagatagacagaagcctctgagtcttaattactctctgtagaattaacagagacgggtggaggttggttggccaattgttaatgtctttattggctcaatttcctttttttatttattttaactttcactttacttttcaagtcactgtaaaaatacagcgagatcttataaaataaactcaatttattatagtattgtattttacatgtagcatgtcaaaattaatgtttgtaaggtacgtggcactggatacgtccccaatttacaatgattcgttccgagaaaatcagaattcgcctacttttattgttatacgaagaactatattcatgaaaataacgttcaaaggactatatacaaaggctttgattgacaaaaaataaaacgttcaatgattataggctttgatagaattcttaacatttttgatatacaaaataataatgaaatattagagggcttttaacaaaagaaaaagtgtatcaaaaatctcttaattaaaacctattttttctcttttaagagttttttttttaaacttttttaattcatattttgttttatataatattttaaaagattttctaaagttgcttgttaagaatctatagatggtgtgatgctataatattcaacaatgtacgaaaatgatagacataaaccctgacgaaaacagagcaagccaaaacataggaaaacagaggaatcacacgctattcatcttccttccatcgttgattgtgttgctagtactaaccctgattgcagtttaaaacatttgtgaacattgcttgtttcgaaactgggagatcacgatcgtaactcaacatatatttgagaaattgtgggcctgccagaaatttgtatagcaactccacaataaattagccatattgacccacgagtcagctcatcacttcaccaagacacataagaagaagaacaaaaacgagcaaacttccaatgaaaagaataaggaagcttataataaacattccaagaaaaagaaaatatgatatattagtaggtctcgtatcatcaactttattagattagtcaactagttgaactttagattttactggaagaaggtaaagtatatattatacaatcatgtagaagtagacaaagattttaaggtgtttgatcttccaactccatttgcacatatcctacgattacataagcctcttgagatcttcacaggaattatcttttatcctccaacttcctcactccttagcatgctcaaagattcaaaacgaacaaaagaacatcatcagctcaggaatcgaagagctttaagttcaagattgaattc

SEQ ID NO: 36 - DNA, 123386 bp, Arabidopsis thaliana
gaattctttggttatcttcatgaatgttttgggtcataaacggtttaagcccaaacccaagaccaacacttaacaatagatgatgaaagtttaaataggcttatatgtttatctatctcggcccacgtttaagccccaaggccaatgagatagcaacccaatcaacttattttatctaattaagttcatatcaagaaaattttcattatataaaaatgcaagcccataattgttacaataacacagatattatatataaaaatgtggaaataaatattcatttgaggcttgagtaagcaaaatatacattcagaaatgttcggatttctgagtgtatatttatatggatttatagaataccaacttatacaacttaaaaagtatattcattaaattaacgctttaaaatttactcccgatttttaagggttgttgaatcgtcgatgtcaccagtgaccctatgatagttcgatctccgatggtgaagtcaaagaagttgtggtcgtcaatgtcactagtgaccctatgatagttcgatcaccgatggtgaagttaaaaaaagttgtggtctttttgtgaccagtagacaaaaagaagaaagacaaaccaatgaaaagatactctgctaaaaagaaaacgttaattctccccctttcatttcttttctaagtcaaataaagacacataaaactaaagttgctaaactagaattctttaaaccaaaagttcattactaatcgttgtgattcgctcatgtagttcccagatccaaaaagtctcatttcatcattattgctgttccaccaatcattacagtaaatcatattcatatgtttacttctcaagatatttctaattttgttctttaatcaatattttcaccactaattttgttctttacttgtcgcgaatgtagtggagtatatgcaaattacagtatattatattgctggcaatcaatttatatataatgtgtgtttgggccaaccaatattagtaaaatatatatgactactctttaatatgtgtgtgtatacatatattcagaatgaaaagagagataaaaatagaaggctttctagtataatttcctacaaatattaactaaataaaaattctaaaatgaaaaatagttgaactaattatgctacaaattattaaattcaggtacctattcctctgtcccacagctccaatacgataaattaagagagttgttgaaaaaatatcacaagcatatatatggttagactagtattaagtttttagttcatgaatcgatggatttgattaattaatgtccatatgcaggattaatggatttaattgatctatctagcatccgtgccagaagggatcaatctatataaactcacagattttaaatctacatgattgggtgcgagatatttgagaaattattattttgtagctgaaaactagataagaattgggagacaacagtacgacaaagaaacgtgcacagaacattccttagtagtagtattttatactcgtaagtgcaaaacaaatcaatctccctatatttaacttattttctagagagatttgcaaaagtatcatttttttactacctttttgcaataatacttttttatattgttcatttttgaaaatatcctttcttttgaacaaaatgaccaaattaccctcatctaataagaacatgtaactggaaacttcaagttttccgccaaatttatttttcccgccaaaaaaaaaattcccgccaaaattttttctcgtaaattttttttcccagccaaaaaaatgcttttaaaaatccttgtaaattttttagaaaaccttgtaaagttttttaaaagctttggtagttgctaaaaactcttgtaaatcattttaaaacctcttaaaatctttataaaatctttaaaaacatagataaatactttaaaaccccctttttaaacctttgtaaatcattttaaaactttttacaatagttttacaagatttacaatcgttttttaaacataaataagtggcattgaatgatttacaagggattttaaaaacttataaaagggtaaaacatgatttacaatcgttttaaagcataagtaagtggcatagaatgatttacaagggatttaaaaagggttagcatggtttacaatcgttttttagcataagtaaatagcattaaatgatttataagggattttaaaaacttataaaagggtaaaacatgatttacaatcgtttttaaagcataagtaagtggcatagaatgatttacaaggatttttaaaaagggttagcatggtttacaatgtttttttaagtataagtaagtggtattggaatgatttacaagagattttaaaagcttataaaagggtaaaacatgatttacaatcgttttaaaagcataagtaagtggcatagaatgatttacaagagattttaaaagtgtttgtatggtttacaatcgttttatagcataagtaagtgacattaaatgatttacaagagatttaaaaaggggttaacatgatttataatcgtttttaaagcataagtaagtgttaacgaatgatttacaagggatttttaaaaaggtttgcatagtttacaatcgtttttaaaagataaataagtagtatacaatgatttataaggattttaaaagcttataaaagggtaaaacatgatttacaagagtttttaaagagttttaaaaaaaattacaaggattttaaacatttgtaaatctttttaaaactcttataaagtctttacaagcattgtttaactcttagaaaaagaattgtaagtatttaaaacatttacaactctttttgaactattttaaaactcttgtgaacctttacaaaaggttttaaaaagatttacaagagtttttaaagggttttcttataatttcttttaaaatcttttaaaaactcttgtacatattttaaaaccctttaaaaatctcttgtaaatcttttaaaacacttttaaaccctttaaaaaaattttaaaaactcttgtaagtcttttaaagccctttaaaattccttgtaaatattttaaaaaccttttaaaatctcttgtaaatcttttaatcccttttaaaatctcttgtaaatcttttaaaatattttaaaacccttttaaaattccttgtaaacctatttcccgccaaaaaaaaaaaaatacgggaaaattgttttcgaaattttttttggcgggaaattttttttcgaaattttttggcgagaaaatttttccgaaattttttggcgggaaacttttttcgaaaatttttggcaggaaaattttggcgagaaattttattttggaatattttaggcgaaaaatattaatatttcattttgttaacctaaatcaatttacaaataggggtaaaatggtcattaaaaattgaaataggatataaatgaaaatggtaaatagaaaagggtagaattgaaaaggggtagtatgaaaagggcattagaaaaaaaaattctattctactaataattggaacaaatggaaaaaaaaattggaacaactgcatgaggggtttaactttgtccggaatataaacaagggaatttaatgaaaaaaaccctcaactttggccagatccatttttaaaccctaaactatgtttttagtaaaacaaaccctgaactaaaacctgttaataaacttaaccccacagtaattaaatattaatgggatattaatttctaaaaaaaaaaacaacgagacatttgtatttagcgcaaaaaccacatgatgttctttaaaactgttttgaatttattacaaaaaaacgttctaaatgattttgaattgcttaattagtttggattttagaagctgaaagaaagacacaacaacttaaaataatctaaagagtcatgcttaaataaatccaaccaacataactatcgaacctgttgcaacacaacaatatttgtcacaaaaaaaaacaatcgtttcagagggacaagatattctaaagtaaagacttgtcaagcattaactttgaagagaagattgtattggctgagtgatagggttctcttcatccattgttttctgttttttccttggtcgtccttgaggtttcttgggtggttttggcactgctttacgcttgcatgaacgtttgttgtgtccgacttgttgacagttgctgcaagtctaaatatgcaaagattaaattaaataatttgaaaaagaagatcttgtgaaacataattcattgttttctattttaccatttgaactttttcacgtgtataaggaactttttgaggtggacgatcttcagttggatcacggattctgtcattgttctttggtcgatttttggaaattaatatcccattaatatttaattactgtagggttaagtttattaacaggttttagttcagggtttgttttactaaaaacatagttcagggtttaaaaatggatctggccaaaattgagggtttttttcattaaattccctataaacaattcgatagtaattcatcgaaattatagctaataattggtatttatctgattgaaaaataattgaaaaaaaaaactggattgttgatcagtttagactttagactgatgattctttatccaattagctacatagttgaaagatataaaagtatatatccaaaaaataaaagtaacaagtgtaaacaaataaaagtaatattcatcatttgtcatatttaatttgtattcatcatgattatatatgttttggacttaatcatgcagctccttgataattcaaattaatcacttgaccagtagtcatcgagagacaattgagccagtaaattcacagagctcggtcataattcaattatagttttaaagacaactttttttgtttaccaatattacaaaagaaaggtgtgatagtccactaggcactagctagtggcctagacgcctagttctggtccaaattattcacatattcgaaaacaaacgataccaaaacaagtgagaaaacaaacgttgaatggtatgataatttactgggaaaaaatgaaaaatggaaattgaagacaaaaagacgttaattgcgtcaaatcttaagaaatgttacaatttctgcttttatacagaacctgatgggaaaactttaacttttatcccttatcggtcggtccattatttgtcgactcggaaacaagaggtaattaagaaaagcatcataaaatatacaaacaaaactcaaaatcaaattcaaacatatcaacatagacatgcataatgttcatcatcatgatcatgatcatgaattcatgatcaatgacccattggaatactcggctcatcatccaactcaatccccacctcagctagtcttttttccttgtaaacgtaccacttggagaaaactaggaaaatgaggaagttcaaggcaacaagtacggccacaagccagtagaaattgtaaagacggcccttgttgagatcatcggcaatccatggatgagctttcccggtgaatttctcgacgattgtcacgagaaccgagctgaagaaaaagcctaatgccaatgtgctcaacaatagacccgtgctcatccctttcatacctttagggcactctctcaagaagaaatctaactgtcctgtgtagattaacgcttcgccgataccgacaataagatattgtgggatgagtagataaaaccctagaggaagcgttttgactgttggaccatgagcgtgtgcagttctaagacgtttgagctcgaccaaagcagccacagccatagccattgatccgaagaaaagccccaaaccgatccgttgaagcggtcttagaccatgggggtagttgaatagctttttgcatagacgaatggcgacgcggtcatagacggcggtggttaggaggaggccaccgacgtagaagactgccatcgatgctggagggatctcgaagctcccgatggaacggtccaatgtctcggattgtgcgactgataatgtcgttaattgagcgtggacggtccagaagaggatgcatgttgcccaaattggtaacattcgcacgatttgtttcacttcctcaacatctgttagtgttgagagtgtccacttgttgaatacattcgaggtaactcccgcttcctgatcccttattgctgccttatctaatgaactgtggcatcaaaaatgatataaggaataattagaatataatagtaaattatgtaaaatggagataaaatattttacatatattggattaaagataagtatctgatttttcaaaccaaagatcttttgtgtgtttcttagaaaattatgaagtgtccctatttattgaaatttcatatcaataatacattgtttctttttttggaatatagcttacgcattgaatatttgaatcaacatgttgtggagatagttacgtggaatcttttcaagatgatatatccttcacacacatgcatgacaaatacgtaattgcttttaaaatagtgtaggcaaaaaaaagttaagagtttgaatttatggaaaagtgtaaaaggttttttctttagttttcaactaccttttagagagacccaaacgaaagagaaatttaatgaagcaccgagcacgcaaagcacgtgtcgtgcatgtgacgctagggttcttaattatgcctaactttgggtctgtcccggtgaaggtgtaaagtagtggaggtgctacgacacgatatttgatcgttttcactacagacaaaacacctgcctccctaccctaacttctcgtctcttcttctttattagttttatttccgagaaagggattccaatatctagagatgctaaatagattttccataaattatctggtataaagaaaaattgattcctttggattcttttatttctatgtaggtatgcatagggattgatggataaaagatactgtacttaagttagcaaaaataaaagataccgtacttaaagggggaaaactcacgagtcaggggaatataaatatagatatatgtgtgtcagtgtatgtgtatttaaagttataaggcattagaatcataatcataattataatactataataaagataaaatagcaaattggtgtatttaattttccgcaatgatgaagatactctttctgtaaaaaccaaatattctacgagtgggtgtgaaattttttataggcaaaaagtaaagatggagaattttaccccacttgatatcacttgcatatacttattcatttgtttatctgaattactttatctttccgactaattccgagagactacttttattttcctacctattctatgaaccgaacttaacgtgttatctaacaaagatatacacatgcacacacacataggattttaaggaaaaaatatacaatataaaatgccaaagtagggactttgaacccaaaaatccaaaaatgttgtaattagctgtataattcgtatcctggaccagtttcgctgtatggtcgagtaataatattatgaaaataatttattttccccgtaacaaaagacaaagaaagatattcaacaccttttaattaatttataatggctgtcaaaaaaaaatgatttctaatgccaagtaggcatataatgagaaatatttacggtcccactataattaaaggacacgagcatttcgagttatttctcacccacacaaccccacttttaatttcacatttttaaagtctactgatactatcacatttaattaagggaaccagtacctcaattatttcaattaacccttaaatggaaaagaaaaagaaaaattttaaaacttttatcttaaaatttaaatcattgtaagttttgaggatcgtacgtggaaagcaaatgatgagttaattaaaagaatcgtaccggaattgttcagtgtgtggcagcttttgtttacccttcatcgaaccttccgccgcaataatatcatccacatcgtagagataggacggatctgccggcagctcgagcttcctattcctccacgccgccacgataaccgcagcaacctgcgtcatcgggctaccgatcaacttcttgaaacggtagcggtttgttccggccaagaaaacgctgagtgcaagcacgatcgcaaacgcgcaaattccatagccccatttgcgtccaacatcgtcttgtacgtagacaaggaccgtcacagctaaaagagagccaacgttgatacaaaagaagaaacggttgaagaaatatgtcattttcgatcgttcttttggttcggtctcatcgaattggtccgacccgaaacccgagacactagccttcacgcctcccgttcctagagcggtgaggtataaggctaagtataggaccgtcagttgtattccacttgcttgttcgcagtgagacgacgttgttggattgcatcttggtggtcgaagtcccggtatgattgttgatagagttaagattgaaacaccctgatagcatcatagttcataacacggatattatttttcggaaaactataacaaaaataacgacttatgctgtttactatttcgatttgtttattgactagacaatatttttattttcttcgttttcttgggtataagttttggtaaggagaaagggacttttgaggtccttaccgtggcttggattgcggcgaatatagcaatcgttaggtacctatacaaaacaaaatgaatgaactcaaattaatattttaaaaagaatctgaatgattttagttaagtaaatataaatatatttatagacaaacctgccgagaaaggtatcggcgatgaagccaccgaggagacagagcatgaaagaagttccgaggaaattggtaacggtgttagccgcagttgcattgcctaaatgcatagttcccgtcaaatacgtcaccagattaactccgatacctaacgtcgtcagcctctccacggcctcaataccttcacacaataaaattttgttaatgataaagttggatacatcgagaatacataaaagaataagaatgatagccataagaaacttataacttagtaaatgccattaaaaagtttcaattcttgtcttcagcatgtatattgttggtagcttttctctagaacttttattatgtgattatacttacaaagaatcatggcggcgctggcccagccgccggtttttgagcgatcggcgggacggccttggaagtcccaagcatcaagaaggatatcatcagatttagtttcaggaagagacatcttgaagatggattaatgatctctctcttttttttgcagtttttgggggtgtttgttcttatgtaaaaggctgttttgtttgagagctcttggtttcttttgtggtcttaaatgtgttcgttgatacatctatttatactgggaaactagccaagttaaaaaagtttttattgttttattttgattttttattcataaaactaaaatattgaagaaaaaagtgacacatgtgtgactctgatgagtgttgtttgattggggagagaataattaataataataactactactgtaactgtagtatatatttgtagaaagagaaaattgagagagagagaaagagaccatacctaaattttaccacttcctctacctttggaactgtgggcttgaacttttaagttgaagtcatcggtcattttgtcagtgattcaatggcattagccattaaaagcaccagttttagccaccacctgttttacatttgttctatttcttggaaaattattttacttccatgaaagataatacagtatgttttttacgtctgtactatatatggaaaataattcaaaataattgatttctgtgttacaaacgcattttcatcaatattgttcatttgagattttgtagtattgtcgaggcatatctatttcgttttttgagtttgcccaaaagaaaaaaaaaatctatttcgttttttgtttgctcaatatcaactttacttctaggcccattcagttgttctgcagcacagccatatcacaaaaatttattgataatcgactcatattaatttgagagtcatgttttctttcacatgtaattatcaaattataattttattgcatatagtttgaggaaactattaaattatatgaaatttcaatcaaaacatctttatagaagtcaataaaagtccttttaggtatttgctttttgtttgtcaacaatctaggtctttgttacaaaattgaaaccaaagatttgtagatgttggtatgattacgtaccaattttttcttcttttgtgttaatgggaaagtctaccttgagatttaatggctcaaaatgaatgcttcttagacgccactaaaatgaatcatgctgcaatatgattattaccctactttccatttatttaacgtatagtgaaataaaataaataaagagcatggtcacaggactttcatgaactatatatataattggaagtctcgcaacttcaatggttctctttctctctggagaaaacatatataggagtataaagaagaagaacaaaggtcattttcattttatagagccaacagaaaaataaaaataatttattccaacaatttgtaagagatggttagttagttttattaataagtctcaaagtctatgtaaaatatccaatataaaaaacgagtcaattttcaagaaaagcaagaaattgtatgttacagaagtaaaacatacatttgaatcagttttttatttatttattaagtaattgatgaatttctatcctcaattagttaattttcgaaatttataaaatttattgtatactatgtgtcatgatccatctctttccgagttattgatatgcagatcgatgaaattttgaacccatcaataaacactttcttcgttgctagtttcatattgctaaatttactataatatccccaacaatcgattattttgtacacatccaaagattgtggaagagcgagaacaaaaaagtcacaatgaagagtcccatccaaaaagaaaaagagaacgagtggtgaacccaaatatattatcttctattgaaattaaattaataaacacatcctccgaaaaggaataagaaaataaattaatggaaacttataaaaataaaccctaacttcaaaattggaaaataaaaatgaaaatggatggatcaaatgttttgggcggagctggcttttgcttataggtatatctcagggcccagatttttggcacgtgatagttggtaggaccacgtgagattctccctcagcgttgactcggtcatttcaagaggatgaatcttaatcgacattagcagttagcacgaacaaggaaactaccttttgcttcaattttaatttttgagttttacattcaaaatgaagatttacagtttataacaaacgtataattcattaacgaataatcttctgacaaaccatcagagtaaaaaaaaaaaaaaggcctttacaataagcgttaaatcctttagtagaaaaaatgatgatagcgcatgtaaaccatttttaatattgttaggatagatcagaatagtttcaattcagataaggtatcgatcaaagttttttactaaactatatgtatatcctcaattttaatttcattaactggttagtaccttattttgttagcttgatagataaaattaaataaagttgtagggtctaaatgtgtaacattgacaaaacttaatgatttattactaattatatgatattaatattccagcaggtgacgaaggaagaaaaaaaatacagattcaattttttaaaaggattgattgaatcatgtagaagaagggtatcgaattaaataattgggtatggaatccttctgagtatcccaaaggccatagttgaccaaacacaggaatgacaacttgttcaataatacaatcttaaataatattgtaaatattagtatgttctttgaaattgtatccttcttattataaaagggattatgttagaattatcggttacggcgtcttgatttcgtcactaataatgaaactaattaacaatgtgtttaggagaaatagatggctaacttggatgagaaagaagacgtccacttgtcacaaaaaggtgaaacagattattgttttaatttgcttaattgacgtcaaatttgaattttgtttaatgcatcccactccctcgtatccgcgtataaatcatagtttttcccttttagaaaattaaactaagcattaagaaaatgtaacttaagtaaaagtaaaatttaaacacaaagtaaatcaggaaaaaaaaacgattgatttgaaagtttgaaccaacaacctccccattaaatcattgtagacacttgcatgtacaaacgaaattcataatagtttcaaggggtagttgtgatagtgattttaaccaagttggtgtacggatgataagagactgactccacagttaaaatttagaactctgcaaaactattgcatccctcttatttgatttttcataagtttacaaggctgtttacaaacttttaaatgtctttaaagtgaaaatggatagaccctaaaccgttagactctctgattacttttcaatattaatacgtgttacatgcctttgctaaacacaagtaaattgacatatgtttttttttacatatacatgtcattttctttttgacatatgttattgaaatcataaataagtatataagtatattggtataatatgatcatctctacgagataccaaactttacaaacactaacctatgtttcgtctgtactgtaatatttttgatcaaagttgtttctttttcaaaaagagtagaatcatttcaaactcaaaactcatgatatatttaaacgaaattcatctaactaggtaacataatcacatttcataagtatggactaacacaactgtggttttcagatcacgaagatagaattagcttcgaactcaaatttaacaatattaaacgatactcatctggttaacttaaccgtagttgagttatttaataacttgggtgtctctagtcggaaaagaaataattagatgaccaatgggcggcacaagctctctctcctgataaaaaagtcaaatcctaaataactaaataattgaaataattgtttttgacttacggggacaaaaccatattatcacgttttattacgaggacaggacatatgagaactagatgtgtatataccaaaagaaggtgatatctcgggtagcttttgcggaatcatgaccggatcctgggtacaagttttactaacagcggaaaaaaccattaatacttattatgatccattatttattggttatttttttaatatgaatattacgaatttagatatccatgcattttccagaatcgaaataagattttgataatcatttttaacgataatcgaactcatgttctcctaaataccttacatataatatgtggaagtgaattcgaatgatgacattttatcgattatgctacataaatagagactttttttttttgttaacctaatgagattttaaaacaatgtttatgtacatagtaacatatatttattagtgtacgttttaaaaaaaagttaaaacaattactgaaagacaatttattagaaaaagacttacgaatagataatgcgaagaggggaatcgaaaatgaaagacaccttacatcactgcaaaagaaaatgatattgttaagtacgtcctgatatttggaaatgaaccaaacatctaaatatatggtctttttggtgttctcaaaagacatcatttgtatatacctaattttaattaagcaaagacaacttacttagagtcgtttgtcctgtctaaacgttcacaatgtcctaaaacgaaaacacaagttcgcagtttgtttacttttgaaaaataaactataataaatcttgttcgattaatgtgtatacaagatgtcgatattcaacagctagcgtttcagtttaaattatttgattcctatctgagcagctgaactgtatactagcatttttttttggcataaaaatgtaaaaaaaagcagtttaactgtgagaaatctgttggaagtattgatcttattgaataaagcttaagaacttattaacctttatgattgtttagtaatgacgacatgatcatattaaaggatatatattaaaaacttggtagtaccactccgaatggttgacttaataataaataataatattgctgccaaaaacacaacaaaataatattctgattatttattccattctttatgatgaagctgatgtaattattctgtacaccaaatgggaatttgaatctcctgttttagtataaggtaaagtaatgccgacctattttattagttgattgctaatataatgaggaagctaaagctaagttattcaagttgtaaaacggtaacaatatgccccagtcttttattaatgtcatataaaatttcaaaattatttcaaaaaatcgccgttcataaaaacgtgttaacatatatataaaattagaaatatcggtcaaacctaaagtagaacataaaattattcggattaaaacaatgttttaagtaatacttcttatgatttgttttcttgatttttttaaaaattgtagttgaaaaaggttaattaaactgaaagatgttgcatgttcataaattgtattatctaatatatggagtgactaaatgcttcattcaagggttgcttacaaaaaggtaagcaaataacgccttaactggtatagaagattctctatcattatccagatatcaccaggcaggaaacaacttattatgtggccaacacattctatcaaatgagcttcttttaaactttatattatttaatcctaaaaggttggatctcaccctcttcaaaacttatcattgctcatgttgtgaatatgcattgcttttcctcttttttttccccctgagaatctcagctttatagtaaaactagtagcatttcctcatttttcaaggattttccagacgtacacatatcttccaagaagatgaaactcacgattagcattaatgattacatatatattgaaaaacagatgatatctctaattaacagaattaataagactaacagtagattataactttcgttgtcaaatatttttgaaactgaaattcataaaggttcagaaattagatgggagaatgcctatgctcgattttatatattctcaagaatacctacttcagaaagggaaaatatacctatgcttttttgcatgccgttaatttactaaagtgttgcgaataattagctttttcgtatgtataaatagtttaatatcttaaaatgttaagatttttatatttgttacttacaattgatgcgttagatcgatgtaacctagcccacgtcaaaaagggagatataatctataacctataagttcctatagctggatttcatgtcgactaggttgcaatgaagtttgcacgtcttggatacttagaaacaaatatataaatgtgctaaaagttatgctagaaacttattacaagattccatcgatcatattgcctcgtcttggttctagtatttgcatacacacaaacctgtatgcatatacataaaaattaaaaactagaaaaatcacccttgacaaatcactcgcggatataaaataaaatgtttaccttgcaattggattgaaagacgtccatttgtaaacaaaacaattattatgactttccattgtaaaaatttgtagataattatagctttttttgtggagtagttttcagtttactaaaatgcaaattcttgtacgtacatcatgggtattccagcgacataccatactctgaggaattccgtcatgcctattagattatttatttaaatatctatgttcgaccataacaagtggtagataagttatttgtaagatgcaatttatctgttttaagataactgtgacatttcaaaaatttaaattttgtcatttcaatttatattattgaaacgtttatatatatattagaattatgttaaatatattattaattaaatttgtagtttatagattttacaaaatttagacggtctcacttaaaatgatattgtatgtgttactaaaatactgacatttaaatatgtgtataaaacttgaatgcatacttatataaatgaagtaaaaataataataattatggtgtagataaatgagaaaatctaggatttttctggtcattataaaatagaattcaaaagaatgtggtggattgtattattttttccatggtaaagtgtatttttaatgagatgtattaactaactagtaaaagcagcaagtagacttgttgaacccaaaacaatggcaattatagttttgctaaggtttttcaagataggcatctaagtagtgaactaaactcatttcctggaaactaagatatatttttctgtccaacaattactttcgttcgatcttttgtttacatttagttacatttacattgttttgctttcaaaattacaatatgcatgttaatactttataacataaaataaaagttgtaaacctaaagcaagtggctgcatggtgaattccttttacgtttttaattttattgttttatagaacataaaaatgctgtgtttgtttaaaataagtttttaccttttagtcttaccagatcgaagatttacactaataataaattttcactcgagaaaaatataagaacactattcaaacatttttcaaactataagcattattcaaacactaaacattcggcaactattctcattcatattataacgttgaaattgatcacaagttatgagtcaaaatttcatacccaagttttcgcgtctcgcatctctcaatttgcgcttcgaggagttacccaagagacactagctagaagctctcattacatcgacatttcaacgttataacattaattaataagtttctacaattacataaatatttcaatgccgttgaattattagattttccgcttcacaatgacgctcaagaaaataaatgtcgtcaatgaaacatgtatgaacttgataataattacttatagtattaaagaaaaattaatgttggaattcatatttaggatattctattgcagtttcttaatctttaatgtgaaaacgtaaaatctcgatcgagttttcgcatcttatatttgataataatttgccgaacgctctttactaatgggctacacaatatattagttgttaaagtgtttgttaatgggttcaatatttgatgggccaaatctgtctagttcttatggtaattgcagtttgaatatttgtttgatcatttgaaacggggttcgatccactaaaattatgatccatcaggcacataataggccgatataccagttttaccttcagatacaaaatttttggtccactgcttggttagttcttgtaaggtagtagtacgatcgaactatactctctagatcttggatttatgaatatacaattttgaaaatgttgaatttgcaacttgcattatcagtttatcataaccagcatcatcttagctttttttttgtatttttgacaatcacatcatcttagccttttaaaagacatcttatttatgttttctcaccttgacaaaaaaataaaataaaaaaaattatgttttctcaaagaattttatttatagaacaaggggtaaatatccagccatgcacgtatatgtacaaattactttcattttcttttacttctttaggtggtggcatgcgcagattggtcgtgtcacgggttcccattttcctattttaatgtcaaattacaataattttaaagctccattatataagttttttaaaagattgttaatataaaaagtatgtctggtcctgctttggcagtatttttttgtcagggtctctactgatccttttaaccccactcaaaagaacttggagtggaacaccctacacagagaccagcacaagtggcctaaaatatttgtccaaaggtgaacgtgtaattagatataataagctataaattcaaactaattataaaatctacaaataccagatattaaccgcaaagaatataagtaaatcggaacagttaagggtcttgaccaacatgattttatacttttaggtcagaaccaagatgattaaatcttttaattcttgtatattttacgccaggatctgatgggttaattcctaaccctaaccccatatatcagcaagacagcaaccctacgtacatgagagtatttgatgtatattttaactatatgttacaagttggaatctacattattatctggtaatctagctaatacacgttttctaaatttacttttttataaaccgagatatttgacttgaaatccatttctttcctcgaaatttaatataattggatgatctttgctatttaaaatatctacaataacatattttagataaatcatggaaaaacatcaaaaattgttatcggatcattatattgtcattgtatgtgtttttagtggtaatacccttaagacttgtcaactaaacgcatgaaacagaaaaaaacttaccccaacaaaagtaggaaccaatagattgtcagacatggctaaaacaagaatacatgcggatgagttagacgagaaccgaccaaacaaagagaagcataacatacgaaaaaaataaaactacttgatagattcatccatatacaacttatcaggcgcaaatgcaatcagagggaagctttttgccgcaagtattgatgagcaaactcaacgagatgggaaggtcgatgttaatcccgagaatgttagctttaatggtggtgcaaagacatacggcagcatcaagatcgacaagcccttgaagaactgagcagcaaagcgtgtcggatgggtttccaatgacagttccgactgcaacgtctagtattttggcgcaaactccaagttttatggcgtctcttgagcaactaggcgttgtaggattgctgatagggttaaggttaggaattggggtaggtggaaagcaagtgttgcagccactaacatgcgcaaaaaacatgagattaaaagatatgaagagagctgtggaaaaattctgttggattccattgatctctagttaaaccctaataaaggttgcttaatgtgactagaggtaaggatatgattagcattggggctaagtgtgaaagccagttagggctcccgttctccggtgaaccacaagactcgcatatgtcaccaagttgataattttcttctagggatcatatgaattacaaccttcagagttttttttgtaaaacgtcattaattaggcaaagaccgcttgatgataaacaatatttttcgttaccttttttgttatataaaaataaaccgataattttatagatccattacccgaataaaacataatttaatatcatttgccatccaatggatcacaagatgaaccaatgggcgatttagaattcttatgtaatcccgtgaagtgaataataataagaattgtttttaaagaagaataataataagaaatactttgttttcttatgaacaataacaaaaatcatgtgtgggggtggaaagccaagttgcaattgttttatactacagtttgatttgtgattcgtaatcagtgtgtatgactcaactggttcaactaagatccttaatctttttccgggtttgattgttcgattgttaaaattttaacttaacagggcctattccgccttattcggctcctagttgttcttttaaaatcttattatgcttcttcatcacatcaagcatgttatgttataattaatttctatatataaaaagattattatgggtaagtagttaccaattttgggtataggatagatcatgcatgtgaagtctatggattggtatttgattttaatgcttatgattgcactcgcctgattatagaattcaaggcattacatgcccaatagtatagtaaacttaggctagccaatgagaattagttttatgagcttaactagtgaacggttaatacagtttctcactaattacttaattagtacttcctccgttcatttttgtttgattgtttagaaaaacacacatattaagaaaacatattaaatgttgattataaatgtattatttttagtgttttacagttttctataactctaaactaggggtgtcaaaatgggtcaaaattcatggtcaactcaactcaactcaatccatgaaccctaatgagttaaaatttttgactcaaatgagttgatgggtcaaatgagttgatgagtcaattggtttgatgagtaaaatgagttgggttgtaatggttaatggttttaatggtttacccaattaacccaataagttttgtaaaattgaattaaaccaactaaaatctctaaaccaatgtcaatttaagtttaaccaacacatctaaaccaatttaataaaattaatatttttccaaatttcttaaatatacaatcgatgaaattgagaaaaagtaaactcgtaatttttccaccaaaaaacataaacccgtgattttcccgccaaaaaagtaaacccgtgattttcctgcaaaaaacgtaaacccaagattttctcgccaaaaacgtaaacccaagattttcccgccaaaaatgtaaatcctgtgattttcccgccaaaaacgtaaacccgtgattttcccgccaaaaacgtaaattcgtaattttcccgccaaaaacgttaactcgtaattttcccgccaaaaaacaaaaaaccgtgattttcccgccaaaaacgtaaatccgtgattttcccgccaaaaacgtaaatccgtgatttttccgccaaaaacgtaaacccgagattttcccgccaaaaacgtaaacccatgattttctcgtcaaaaacgtaaatccgtaaaaagtggaatccgtaaatatcctaagtttgatgataatgaatcattattaatttattatttttataataataattaattaaattattatttaaatgggttaacccatattaaatgagttataggtagacccaacctatttaacaaaatgagttgggtcaacccataactcatttaaccttaaactcatttgattatgagttgagttgggttacccattttgacatccctactctaaaccaatgagaattaactatttttcttgaaaattacaattcaccaatactaaccaataaatattacatagaaaacttaaaaaatcaatcttttagaaacaaattttttttataaacaatcaaacaaaaaggaacagagggagttattacgaagattatcaataggattttagtagctttaggtgattttatttatttgacagtaataaatattgaggagctctatataatctcataattaatgatcatgtttaggaaaatcagttgcttactttctttcttttttctgtcaaatcatttgcttactttattgcattgatttcattgtaagctggtgatctatggttgattgattgattgcaagttacttttttctagttcccataattctattttacattttagttgcttctttggtataattctattttacatttggcgtgtttctttccattggttgttattatcatgtatatgcttattcaaaaagaaattaccttagtcttaactcttaacttaatagttcaattttcgcatttttagtgtgtagcaatttgttcttttaataaatactacatctacatgccatataaaggttattgggttaaaactcggtaccatcaatggtaggataatcttttatcaacatatcttttgatagtgatggcatactacgttttaattaatacgtatttatgatcaaatttgatatcaagtcatctatattgtgtacaaagatcttaatatatacacatttcgaatcattcagtgacagctagacgaatgtaagtagatgaagatttctttggtatatgtgtctgcagtgaggcgcttcgttgtactctcatgatcaatcttatcttgttttacatttgtttgtgaagggcacaagagaaccagcattgtcactcgctatcacatggtttctatggcaaccatgcattataaaatatctttgcagattgcggatatgactgaagttttaacttgtttttatcactggcctgttttgttccatgcaccatcaacttaaccatgtctaacaatattggtagatgcctattagtcattacgcatatacgcatctgtcaatatttgtattgatattttttctgaatattatacgttttagaatgtacgtaaatttatatttagaggtgactttaacagcagcaaaaaaatgtacattttcctcataaaatcaaacatatcatttttagatggtagagtgtttacattttcatatatattattctatcatttttttgtcaattacattataagctgggaccgagtttttaaggtgtaataaggcattatcgtctcgctatgtatatgtaaaacattattaatctatagtaatttttttacttaaatttaattctgaactcactgaaaatcataagaggaaatagtgccaaggaactcaattaatatttcttggatttagctatgggaaattgtttcttttatatgtgggaggcagagctagttttaggatgtggtcaatatgcactgagtagaaaaataaattcaaaacattgagaaaataaatagtggtttatgtgcatatatatttgaaccttaaaaaaatgcatgataaaacgtgtccaacccataataactctaatacaaatggtcatatagaaaatgtgtagcaatatcataggatataggtgaagaaaaacaaatctatgctaatttatatgactaatcaacattttttgtatgtattaaggtataaatgtacatcgtatttttctaaggacatgatattattaaatacatagttacgaaattgtgagtgtattaaggtataaatttacatcatattttttcctgattttggttacgcgcagtaccactatctatagtctaatactacactgtgtttttttctttttcctttttggtggcaaagtcactctatactgtgttgatcatctcacacgtaggttgtgcttatattagacttaaggttctttggtgtaaatatttgaaagaaattaaaaattagtgtacatacgattcattgaagaacattcaccaaagacttcattttaaaaattagaaagtctaattaagaacttataaatcgcaaattttctgtatctatataacttatacaactgtgacatgaaaatcaaacttattataaagctagcagtcgtaactcataacaaaaaaaagaacatatgcatctagctagttatttgcacaaaacaataataataataataataataataataataataataataataataataataataataataataataataataataataataataataataataataataataataataataataataataataataataataataataataataataataataataataataataatacatacatacatacatacatctatactagttgaggatcgatcctgtttcgcgtagattacaacgacaacgagtttatcccaaaactataagcaaatatgacatcacagttataatacatttcgtatcttcatataaacaaatggacaatgtgtaaacttccatgtacataatttcaaggtccctaatttcaatcattcaatcttttttattatatattactgtaatcaataaaattatgataatggtagtcaatcatttatacttattgttataaaaaaatcccatcatatatcttatggatcggacgctcttgggcttttcttgaaaccactataaaacctatctcaattctttcattttctccacacccaattcactcacaacctagctagctagtaaacagtattttctatataccaaaaatggcttcaagttccatagctcttttcttggctctcaatcttctctttttcacaacaatctccgcctgtggtagctgtactccgtgcggcggaggttgcccctctcccaagccaaagccaactcctaaaccaaccccaagccctagctctggctcgagcaagtgccctaaagacaccctcaagctcggtgtctgcgctaatgtgctcaacggcctcctggacttgacccttggcaagccaccggtcgagccatgctgcagcctcatccaaggactcgctgatgttgaggcagccgtttgtctctgcaccgctcttaaggctaacattcttggaatcaacttgaacctcccaatatctttaagtctactccttaatgtttgcagcaaacaacttcctcctggcttccaatgctaaaaaccatattgatatataatttaaatacacttatgtgtgtattaatttatcttcttgttttaaagagacagggtgattctctatactcttatattgtgtctttatatatcttgatctgtggtttcttctactctgcttgctctggtgttcattggggtgatccgtaagattcctgaagtttacagtttcattatttcctattatatatactcttaccattgggggtattgttgtattggtttgtattatgattctatgaattaataagaatttaacttttatgttatggattcattattatacggaatattgtgttttatggtttatatatatagactgtatcttctacagttctacccaaatattttggttcatatttgttgtatacaagcactaattcatttcaagagaagtctacccattacacttttatcttatcgtagattgttaggaaaaatgtatatcagtataggagagtatgtttttaaccagttgtattaatcatccaaaaatatctagttgaataaatttctaaaatttatggcacaacatgtaagactataaaaaactattcaataagaaataaaaagctatttactaaagcattatggtgaatcaagaaaatcttgggttacagctgctgtaggaaatggtgaatcaagaaaatcttaaatttcaaatctgaaaaatatagatcaaacataaaattcataagaacatacacttatacgtgcatgagatattaaattcaagtttcaaacaaaaaaaagaagaagatattataagttcgtcagaataaaatagaaataatcagttctcggatttatcatgtcagattctttgatatatgcaatggaataagttttactcttagtgcatggatctttcacgaataatcatatacataaaactaattacaagaaaaatatcaaaaagtttttgaacatatgtcttttctggtaaaatatatatcactggtaaaatatcacgctacgtacagactgtacaaacaaacaaacaattttaaaattctttttagtatcaatgatagaaaagattatagttatcaatttgggggttttgctcccccccccccccccacacccaccaaaaaaaaatgttatctatttgggggaatatgtagggtattaattagtatctaatcctaaattttctttgcaatttgtaattaatcaactaaatttacttgaaaattaaattttgcattaaaaaaagcgagttatatattttgggccacaaatgcaaggaaagatcttatagtagacaactgtctcaaactgagctctcgggcctgacgtctcgatcaatcttttaaaacgttgcgtccttattactattgtcttcatgcaaaggcataaactgcatgactgcattacacatttaattatatagttaccaatatatatattatgttgatatggatgcccaaacatcattatacaaacaaattaaatgccgtcaaatacttatacaaacaagtatattttgacctgtggggaggagaaaatctactgtgtatacaaacagatgtgtttttacagcggggaagggattaattttcttgttctgatctttagctaatagaaggaaaaaaacataagttaattaccatagattggttgataatccataaatatttatatgaaagatggttttaagttcaaaacgctttaggattgatgatgagtatttgtttttacccggtccgaggacaaaaatgaagtttaaaaagaaaaaccattggctgataacgtatttagacatttcagcaaaccccatttttgaaaaaacatttgacatatattataatatctagcgtttgaaaaagcaagatgaaatgtttattagccgggactagttatatcaccaatatatacatatttttacgtaatttagtctaattttctttccgacgtaattaagtctaattcttgagtttatcatagaataattttcagcgtacatgcaaatgatgataaaacagaccttaaattttttggtgatttatatcgataaactttaaacactcttatcgaatgaaaatatggctacaaagaaacaaaacaaaaacatacatatataagatctaaatgtaacaaacgattatttccagtgaataaagaatctagtgaaggatatattgaagagtaagttattaagatctcttttggtcgtcacatgggactaggaaggaagtggagaacaaactaaatgtgtgtttttgttttgtttcgtcttttcgggatagtagtagtcaccacttcgataaagttgaaagattccagaccaatatggtctcaaaccacatgcatttcgaaggaaaaaattcattatacatatatagttgggcattggctgcgatattattacatatatataaactaattatagcaacttaaaatccgatcttctctaaggtacgtaaaacattatccaatactagatatatatataacggatttttttcttggtcggacgatggctataacggattttgttcatatatatcaaggcaaaaacgtaaaaatatcaaagaaaataaaatcaatataaattactaagtctcaaaatatagacgatatacgcaacgttaaagtttcgaattttagctggcaattggccgtcattagatatttagatgaataaatacacatataaatgtcataatcaatcaatgaggaatgttctgtgacaatgccatagatactgtaacactcaagatctcatattctaacagatgttttagtttctcattaattggttattagtcgattaacacatagttttataatattgtatatgttatttcactacctatgtgaaatgttaatacgtttcctctatgatggctatttcattctataatgaatccaatcttactctaggatttatgtctctatgataaatcatatttgagtaaaattgttgaataaaatgaataattgactaacaaaattttataataatgagaaaaaagtatttgaaaaaccatggccttttagctattatttatataattaatggattgacctatatatatctttaatatagaatgttagattcttccatgatctcactagtactaccacaagacataccactagagtaaaaaattgtttacaggatcaacctgaattttaataccatttaaggttcacatgcttctctcacttaaatatatatctggattttaatctatatcattcatgcattatctaagatctcatctccttttcattgtgattttattttcatttatgcctattaatccattctttaacaaaaacaattatcatcttaacataaactaaaagaagaaggaaaaccaacagaaaaaagggtacaattagtttatcatttttgatacaagtaatactactaaaatctcatcgttatatgaggtaatcaacagattagagatgctagtagtaaatatagattcattcacgatcattctctcggtcatttaaaacaaaagaacttaattacactttgtgagtttgtgtcatcacagtttgctgtcacaatgtattgcgtgtcatttcagagttggatggtccctaagaagcaattatacattcggtggatgcatattgagcccgtgaactctctttgttttcttcttgctattagttcaatgaatatctcctaaattatttataacgtgtgagtaagcaagaaacagtagaagcaatctcaatcttttgattttgaatcatgaacttcaagtatatataatgggctaaaatccaaaaacaaactagtggatatcgtcggagcatggatatcttttgcaatgtacgttttcgttcaagttttgcaataaacagatttgggacgttaagtattgacttgtgatatgataaaccttattgatatgttttgttataattatttttggtttgcgaagatatgataattttgtagacgcaggcaacaccgttgataaactacgtacgtaaacgtctttttctgcttataaaataggtttctcacatctattattacaaacgaaatggtgtaagatcggggtcaccatataaatttaatttttatgtattacttgaataagatcatattaacattaatatacatcatatattaagatttacatagaaaattccaaccggtttttaactaatttgcaataaatcttatttataattatataataaaatcttatttatttatactttaaaaataaaataaaataataaagaaataatttttactaaaatctattgcaaattccttttttttatcacatacataattgataattcataattgtgatgtaataagaaatcatgaaaatgccaagatgggcttgggtcatatagcattgtagcctactgatctcgcagaccgactaaagtaggcccaaaaatataaacccaagacccaagcccactaagtgaattcgataaacgatatcatcacatctattgtctatttgacatccacagaacgcattataagacttttgagtctttgactcgttctactgtctgcagccttttgtaaaatatgccgctttataatgcttcaactaaaagagcaactttgtcgacgtctgtaatggctaatagttgcgtgaagaagaattcaccaccaaagaagaaaatactacaatttttacatgctcgacgctctaacccgagtagattgtagattaaaagcccacaatcttggtcaatcaacaaaaaaaggtaactgtggtaagtaactttgtttgattcaaatttcaaaaccaagaatattaggttttttgcactcaagattgcatcattgacggattgacctctttaaatttctcttaattactcctctttgatgaaatgatcaaaatatttatattcattgattagattctctcgtcttattgttaacgtttacagttaatatgaaaagttccaaataaatgtacgatcttatagtatctcttaagaaaactttcatctgtacttatttttttgaaaaactgaataatgttatgttgtatatttagaaaaagggatgtaattttttatttttttgcatgtagacataaacggttttaatcttccatgttctcggtttaagtttgtactttgttgctacgaccaagcatgtaaacaatgtagcaaccattaaaagatccaaacatctgatttcatcataacaaacccaacaaacatagaaaatacttatgaaatgttgataaaataaaataaacagaaaacgatatgagaccaaaaaaggtcatatatagcttcttccttcctctttactcctcggccttctcaacggcgacttcctcagcagccgcaacctcagtctgtttctcctcaaccacctctgtcttcttctcctcctccacaaccgccggagtttcggtcacttcctcagctttcttctcctcctcctcaactaccggagtttccgtgatcacttctgtcttctcgtctttctcctctgttttcttctcggtttcttcatctttcttctctgcctcttccacaaccacttcttcgtttgtttctacaattggtgcttcggatttttgttctgtcacggcggggacggattcttccggctgttgggtcacctctgtctccaccactgtctcctccactgtctttgttggtacctcaacgttctctactgctactggagtgacttgttcaacctgtaagcgaaaacacattattaaacggaaaaattgcataccgttccatctcacttgatagaatcatacatgataaatattgtaaagattttgataactaatcatttccggataatattaacagcgaaaatgaattatagatatagatttataatgtgacgaacaacaaaattaagagaatacctcaacggtggccatttcgaaatgaaaaagctaaagaggaaaaatatatagacaataaggagaggagaaaaatagtgtatgtgatgttttgatgagtgaagagatttgatcaagaggaggggtatttatagtagaagcaaatggtttacaataaaaaaattgttttactaaatataaattaaaaaaaaaattaatttctataaagaaccatgatgatgagtattgcacatgaaagaaccttttttgcttatataaaaaaataatgtacaattttacacctcatgccacatagatttagaacatcaccacttaaccattacttgtaaaaaatagatttatcaattttcaactaggaaattaaattatattttacatataaataaaaaaatgaaatgcaatagaagttttttgagaagctttttgcttccttcttctgtgacttcattgaacgttacaacaaacctttcatgtaattaacgttgaaactcttaaattgaacgttacaacttctcatttgaacgttgaactcttttagaaattccagcagttaaacttgcgttgatgcctgcggaaacatcttaaattctttattctatatattgatccgcgccaaaagatcaatgttcttatcactaggtgtgacatttgaattctacaatatacgatttatattttagattatggatgttttcgcacaataaaaatgaaggatgttaacattttaaaagctctatcatgttttatattcagtactggaatagattgtccattaaaacttaactattttcaactatgacttatataccttagtggttcgttttagtgcatgttatattgacgaacttttttgttaacctatgatcatttaaaacaaaaatagatattttaggatttttaaattgacgtgaagatatctaacaaaagataatgggctaggaaaagtgatctatgaaaaagtagatagaacgagaatttgtagctttgaatgcgtatttttatgatttatttgtaaaacttgattatatactaaaaaatatacttgaaatattggtttttcatatcagaaagatgatttatttatttttattacaaaaaggagtaaattacaccaccggtcagtgacgagtaaataggataaaagtcgttttctcaactaaaataataatgacagagcctggattctggtgaaaatggtaatttggagaataagaacccttgaataaaatttaaagggtcacactcaaaacgtttcaacttcaaatcattttggtattggatttataaaaatataaacaaatgatttaccattttgtcaaattttaacatatttgtattgtaatttattttactatcatctgttaattagcattggaaattacatgtcatgaaaagaacagactaaagaacatgatgaaactgtgtaaatgactatcttttcaccattttaatcctgttaaacgatgtgagattgattattgtctgagaaagagaatgcaatctttactattgtagtcaataattttcttaaaaatacaaatcaaaagtatcttccatgacatcaaatattattgtccaaaagaaaaaaattagtactactctattttaaatttgtaccatatttgacttaagatgacgtggctacaagttgcgggctcatgtgactataagccaggtaggattcctcgtgaatgtggaccctaaagtacatcagtttccgtttttggtcaataacgccatttaaggaaatcttaagcctaacaaaatgaccattttaatatgaaaattgaaaaaattactatcttcactagtaatatttatttttcccaatttatttagaaaactaaatttgacattatatttctacatttagtatactttacattgaaaatacatgatacgattaattttgacattattgtctttttactatctatattttagttagatagattattaagtttatctaaacatattgatgttggttttttaattttgtaaatcaaaattgtgtgattgatgttttctctaattagattttaagccaatctctaatgtttaggctctaaaactttttttttttcgattaaacaggttttataaccttataaacaatctatatttaggctttacttttagttgatgaaataagtagagcaaattgtgcataaggttgatttctttttcgacaaaaagagaagaagatacaggccacaagacacgtactcgtcacaatctgtaaagaatggccagcagaaaagccggtaaaaagagttggacggctaagatgaccccattcagttggtcctatttatcatatagttttgtccgaaaatgaactaaaacaccaataatgcgtaagggataaacgttacaaaactggaaactttaggtagaggggaacaaaaaagtagatatatcttaggtataagtcaacacagagggtcattttgatctgttaatacaatacaatattaatctaacacataatgcattcatcactctatttccaagttccagaaattttgtttggtcgcagataaataaattgcagcttaatgacgtcgtcggtcaatatcgtaataataataataataataataataataataataataataataataataataataataataataataataatgataaaaaaccgttactatacttgaaaatagtttatcaaaaacatacatttcatcaaaaactagatatattataaagaaaaaagtgggggaaataaaaaaatgagggagacacatacagtatatcctttactcctcgatataactttaattaatttatgaggtagatctgaaaaaaagttgtaaataattcacttttcgtgtcccaattatgaaaaacgccccatgtcttcaacatgtgtaacgctaaagcgcggacaaactgatggatatgtctctaaattatattttctctacgagtggttctacaccgttgatttagaagaaagatttgaatctcatggtagaggattcatatcgtaaggttagtaattgggaattgtggtttgctatatatcgatctagaccatatccaaaataattaatattggttcgaatttggatatgaagatcatacattatgattaaataatgttttaaaaaatgagagaaaattttgatgaagagaaaaaatatttttggtttggtgatcattacaaaatctgggttgggtctgatcccaaaaatatcagagaatacaaaacaaaatggctctaatcctgtatttttttctggatggtgtatacttggacatgagaagactctagttaacaatcgctatatagttcaatcatagaaattttcgaaaaaattgtacgtgaaactctattgaattagcaaaatttcttatatttttggtaaacaaaaacttcttagattataatgattgcattggtctttacgaatagtatgtattagttgttaaaatttatttattcgattttaacgatcagatagtggaggaggtcaaatttcaaagaccactgttggacttgggactagaggcctaattcaatagcccaataaaattttcaatttgactttctttaaaacctatgaaatttctcttcctttatatattaccactgctgactcagaccaatttttctccatcgccacgacgacattcgctggtcatggtagataacggaagtaacaattttgtaaccagggctttatgcacacaattttttcggaccagacttaagaggtgaatgcgtctatttcgatttacgtgcatgcatgcatatatagctaattatattgtaccaattatttttagaaaaagaaaaaaaaacctgtgaacgggaagactacaagtcttaattaattaaggatcaccacatatgaccttttcttcgaactccatatttaaacattcctcaaacatttctctctcattatcttttatttctcttcttgttactttcttctcattcttttgacgaaaaacaaaccctttaattagactctcttttattctcccatactctttttttgctgtcttatttttgaagttttttttttttttttttttttgctgtctcctcgttgaactcagttgcataaccatctccagtaaatcatgtcgaatcaaatccaacggtagagattttctacgacaaatctgaattaaatcagagaacgaatagagatcaggaaagcaaagatggttttgaacgatgaggagatgaaagctggagagtcttcagaagagccaaagggacaagggctaagcaggaaaaatagccatagctctatgtgtccgacagatgatgatgaagaagaagaagacaagaaactcgaacttggtcccatgattgctcttaaagaacagctcgagaaagacaaggttttgatctctcttgttatgatttcataaattattcaaacccaattgcattttggctatagcgcttttctacaattaaaaatttgtctaggatgatgaaagcttgaggagatggaaggagcaacttctaggcagcgtggatcttgaggaggtcggaggtaaaccaaaatccaatatccggtttatatctatggttaaataacagatgaatccgattagaattactttttagatttcaatagataagataattgtaggaatattaaaaaatatatatatatatatatatatatatatatgtactgttttgatagagtgacaaaatgtaaatgcagagactccggatccactggtaaagatactaaccttaacaattaggtcaccggatagagaagacatggtattaacgatccctgaaaacggaaaaccggcttcgaaaggaccatggttcactctcaaagaaggctctaagtacactctcatatttactttccgtgtcaccaacaacattgtgtccggcctccaatacagcaatacagtttggaagaccggaatcaagggtatttttatcttttacactttcgctaaccacaaatacacacattttagaagccgttgtctaatttattttctttaactttgtggagaacagtgtatagtagaaaggagatgttaggaacgtttagtccacaggcggaaccgtacactcatgttatgtttgaagagacggcaccctctggtctactcgttagaggctcttattctgttaaatctaaggtaccaaaaatctaatagttacatttttttagtttagttacaatatatgtaagtatgtatgcatcatctagcaaaatatgttgtcttagagttttattaatttgtagactattttatggattatttaaatcacttacttattgtcttgtatctatttttcagttcgtcgatgatgataatcagtgctacttggagaacaactacaccttcgacattcgcaaaaattggctgtgatatccatcacaaaagttactggaagaagagaaaaaaatataatattattcattattgtttcttcaatttaaatttgttcatatcgttattcgcctaactttttttggatgattcttcatctcacttgatatagacaatatgcttgtttgtatttctgtaagttactattttcggattttattctatttttcaaactagctagatacagattttgttacatgtgcatgtatatagatgaactacgtacgtcatcgttatagattcccttattcgtttattcatagtccaaaacttctatataaaactaaattttgaaacttaacttggtttggttttcccttggagagttctaaatataaagaaaaagcctaaaagaaatttagtaggttcttcggttgaaactgggatatttttactaaaaataattctacgaatgttttgacccttgtttcattcataccgttttcaaaactaaattcagtttgccacatatatatattattatttaattgtttcattctacaagtttaccaaaactcattttgtatattctatattttcatctggttttttaaaaaaatgtttcattctgttaccggaaatatatatatttaacatatcattgaaataaaaaaagagtgaagagcgcatttaaggaaattgtacacttcaagaacaatgaatgcctcacttaaatgcatcttggtgtactgcactatcaatctcgtctttaactcttgtggaagtcactagataataatctaatcaacagaaatatttttgtatatcatgacaaaacctctatataaataaagacaataacattctcaaagatataaatttccaaactctctcacaaaccaaaaccaaattccaacatgaagaagacctacaagcttcaaagcctcttctcttctctcatcttcctcataatcttgctattgatttcgagagccgcggccgtcggctctggcggtgtctgccggcatccaccatcacaaaacagctgcaagacatgcatggcggagcaaatgaaatacgactgccctaagtgcgtgccggtgctccgatgcatggctcgttgtctttggggcggtgttactcagaggaagtgcaccaccacgtgtcgatgcgacaccgcggccaagccgtcgttgctggagtgtaaacgctgcgtttctaggtgtaagtgtagctgtgcggcttaggaacaaatcgagtaaatgctctcttgatggtaaaataatatgttaaatgttaccatgttggatctttgtctctttaacttgatgttatatatgtatgttgaatctttttgtcgtttaacttgatgttgtatacgttgaatgctaaaagtatatagttcctatttatagtcatatatctaagagatatatcacattattcttttttcccggtcaatatactcacacacacacacatttgatgaatttgattccggattatgacacaagtattttgttccggtcaatatactcacacacacatagtaatcggatagaattgactaactagtatttttttttcaaattagctatgcaattttttagtgtaggatcaaatctatttattttgcaattttgaattatgattcatgaataaacactaaaagatcaatacgcattcatagaattttgaatgtcaataattatttggataaataatttttagtaacaagttatttcactttaaaccatattttgacattaccatggacccaaatttgagttttagactttggagactaatttattgtttaagattcgtataacatacaaaaaaaaagataattcgttcgttattaaccgtggaaattttcgttatttaatggaacataaacggactaaaaacaatagcaaacgatgacctatcgtacacggtacaccgcgacacaccggattaaaccgccgtcattctctgagaaatctctggaaacatctgaaacccaaatactgagcacagaatctctccatctcctcaccgcctctctctctacacatctcttcctccaccgcttcttcccaatacaaaggccacgcgccaccgccttgtccggagtctactccgccgagatcgttgtaattccaccattgaatttcgtctttagtctccgagattgaatcgagtatttcctgcatccctacgatcttacggctcactttcctccgagcttctctgatcgtcggatctaaaccagggacggagtctagtttcagaagcagagccatcagagtctcgttcattctcagacgttccttctcatcgcttctaatggcgtctactgtttcttgccgttggattatgctctgtacacggttcgcttcccgattgatggatgagattttcttgtataggtttcggatcctataagaacggtagccagactgaatcctcgctgctgcggcggtggcgtttgttttgacgttggctttcgtcgccggtaatggagtttcaatcgggatttctttggttgccggaggggtagtatggtcattatagaaagtgtgaataacggtggttgttgttgtcgacgatgagaattttcttgaacgtttcatttttttgttttcttttcttgatatggatgagattgtttttttttttgacggtggtcgttagtatataactcgtgaatgtggtataaataaatataactccctagtaattttgcaaagaccaattattgaaagtttttgtgtataaacgaccgaccgttgctaaaggactcattaccactcgatgattatcactttttatattgaaagttactaatattccgttgtctttctttataaaagattcagtaacatattacactaatatcgagaaatgacttattgttaatgggttggggttatctgcttaataatattcatatccccaagtgcttaatcgtgattatggaaatctttcttttcaccatttttcctgcaataaagtgatactcccatcaattccattttttctgtaaacaattcaggtgacgggattttttttattaatgttataaaaggtacgttaccggcgacagctgatcaaggcggtgaaggaacaattttccctgtgcatgttccaaacccaacattgtaaccatctccctacaacggtttaatcatagacgtaatttgattaataagcgttaaccgaaatgtcatgcaacgaaattcatttggagttgttggggtataaagcaaattaaactaaagcagaaaccgtgttaatcagctgataccttgcatacacctgagaaggtgacttggtctccgtcttcgagaaacgtctgagttgttccattgagtgatagaggtttctgtccattccatgtcaactcaagtaggcacccatatgaatctggctcctgcgtttagaaccaagaaacaaagattttgcgagttattgtgtagtcatcacgtgatatagtagacgagagaactggttcgaaaagagtttaccggtccgcttatggttcctgtgccaaggagatcaccaggcctcaaattgcaaccgttaacggtatggtgtgctagctgctgcgttatggtccaatatctgtcacaataagtttaaaagagtttgaaccaaactgtttaattatatggaggaattgggtaggagattatagaggaactcacaagttttggaagttgctctttgttattacacaagaatcatctctgccagaaggtttaagttgaacctataagaggtaaaaacatgatgtttatttcagttcagtccaccataagctgttatagttgatagcaaaaagccaaaaagtgaaactccaatatcgaatgctacctccaaggagatatcgtaatttacagactctttctcagccaaatatggcaatggaggtggatcctgccccaagaacaagttagatcatgagagaatcagtgattgcgtgacacaaaaagaatgtgatgcctaagtaccaacctgcttgggagcttgacaaccaaaaggctcaagcgcatccaaggtaacaatccaaggggatatagtagtccctacaacacaacaagacaacattcaccgaagttctttgcccatatacttcaactagaggaaatgaaatcaaagtattgaagccaaatatctcaccaaaactcttccccaggaaaggaccaagaggtacatactcccacgcctgaatatccctagctataacaacaaacatttaaaaaaaccggtcatgcccggtcaggttaaagatgactcaacgaaaactatagttaagtgagtaccactccagtcattcatcagtaatagaccaaatatatgatcggctgcattattcacgtcaataggctttcccaattcatttcctggaccaaccacagcagcctgaatatcatgtgataaaagagaggtttgtcaatgccgttattcttaactagcaccaaaaagcatcaaccgaatcattgtaaaacaaatccacataactgaggcatcagatgcttaccatctcaagctcaaaatcaagtttcttcgaaggtccaaaatatggttcagagtttccttgtggatggccctgacctctggaagaaagcaaaacaagcaaagataaaactggaattagcatttcattattaatttgtctgcatgaaattttaccatccgccaatattggtttcaatgtaataatatcttataaaaaactatatttcttgtcaaagcataaaaccttgcatgatgcatgacttcaaatatgacatgtgaattattcttaacaaccattctcagcccaccaaaaaccagataataatacacaatttcctaaccttggtcgaataatgtcagtcccagagatgacaatagatgatgcccgtccatgatatgcaatgggaagacgaaacctgaaaaatatggtaatgtcatgttaatacagagtcatcctttcgacttgaccatttcatgaagaaactctcagctcaaaagtaacataaacgcaccaatttgggtttatcgcattctcaggcccacggaacataagtccgcagttcttcgcgtgatgcatagatgcaaagaagtctgtatagtccccaatcaccataggaacaatcatttccactttactctgcaaatttgcatcaaacagcaataaacgtaagtaacagatatacaaacaatttccctagtttaagcaaaaaacaatttcacactactaaccatctgatggaatgattttctcctcaaaacatcattgtctcgcaagataggttcattagctgcatgaaaacataccaaaaccaaaaccttgaagccaaataacaaaactccataaaaatccaaataaatcaataggatcaaacagagcatacatgacaagattctttgcagcgtagaacgcgcttccttccacgcaggccgtcccatggccaagaacttattcaaattaggctgcaaacagagcacagaaactaaacaatattaacatcaaaagaaacacaccagaaaataaacacaacctcattttcctcatcactaagtgtaagcaatacactataccgtcagatcataaagcaataatcatagttgcaaaagttcaaaatcgtgaacagaaaactcaaactgtaacagataatgaatcgaagcaacgagcaattgagtagaacaatggatttttttcgagctaaacgggattgatctatccaataaaccatggagcaaacttcagagatcaggttcaaatagcaaattcgaaatcatttacggaaacattcccagggtactactacatagtaatccgagtttataggaatcggaaaaacgaacctgaagaaagcaatctgcgtccttaaggatcagaccatcgaaaagcccagcttcagagatagcggagaggtccagaaccaaatcgccgatagcgacggcaggacgaggagttgagttcgattccggtttgaagacaccataagggagattctggatagggaagtgcgagtctgagccaacatcgatgaaagacttcagcaacgccattgacgatacagatactaaagacgacgacgacgtatgaatctccggcgaagtttcccaagctaatccccaaattccagtaagcgagagaggagagttagttcgaagtggtaggtatagatttttcttaagcttccgtttttgagatgatgactgagaagttgacgtcatctttacagttttcaattaaatattcaattttaatttgagataaaaatggattttgtgaaaggatttattattttctttattatttatacagaacattttagtatcaaattaaataaactgaaactatatactccattgctgctaatgagcagctctgtgttagggaaaaaagaacataatatccaaaagaaaaaaaaatattacaagaaaaagtaactggaatgtctttttttctttaaatcaacaaaacacacaaattaaagtctcgcagccaaaagaatataattgtgagtagtctcgttaatcataaggcaatgcatttttttactcaatggttgaaactagtagtaagacggaggaggaggaggagatgcatcatatgagacgcttggcatcggtggaaagtaggacgtaggagatggtggtggtggtgatgatgagtatgaatattctggaggtggttcgtaacttggtgttgcttgtggtggatggccttctttacatgcttttgttggtggcggagactggcttggtgaatagtagtactcagtaggtggtggaggactttgtgtttccgatggatagtaaactggtgatggtggtggaggacttggtgttactgggggatagtaaactggtgatggtggtggaggacttggtgttactgggggatagtaaactggtgatggtggtggtggacttggtgttactgggggatagtatagcggcgatggtggtggaggacttggtgttacttggggatagtaaactggtgatggtggtggtggactgtatgttactgggggatagtataccggtgatggtggtggtggactgtttgtcaccggtgggtagtatactggcgatggtggtggagggctttgtgttactggtggatagtataccggtgatggtggtggagggctttgtgtcacgggtgcgtagtatacaacaggcggtggtggagatgattcaggacacggtggtggtggacttggaggaggcggaggtggagatgagtatacgtaaggcgggggtggagatgagtacacgtaaggcggtggaggagatgagtatacgtaaggcggtggaggaggggatgaatacacatacggcggtggaggaggagatgagtacacatagggcggtggaggagatgagtatacgtaaggcggtgggggagatggtgatggtggtggtggaggagggtaagctcgaacgctaggtgacatcttggaataaggaggcggtggtggtgaatatgctctgacagagggtgacatcttggacgaaggtggtggtgggggagagtatgctctgacggtaggggacatctttgacgacggtggtggaggaggcgatgagtacacgtaaatcggtggaggaagtgtccggacttcaggtgacatcttaaacgtcggtggtggtggagagaagatgttgtaacatccaaacttactgcaatccacagggcgagcaagcaaagatgagcactgtttatccgatctttgacgagccaaaccggtgatgcagttcatggtaccgttcaccacaatgtcggctaacaaactagctgcgcatataggaggacgaccggagaagtagttggaagagtaagtaaagttctcaaggttagaaagctggcagatacttggaggaataactcctgtgaaggcattgttagccacgtgaagctcttctaggctcttcatgttaccaacgctagatggtaacggaccttgtagacggtttgaagtgatgtcgaaaaccgtcactttcttgaggtttccgatctgaggaggtaaacaaccggttaagttgtcgttggagaggataagctcgttgagtgttttccccatttgaccgatacttcccggtatgcatcctccgagattgttgtccgcaagaaccagagcagaaacaggggaatttcccatgtttttgggaatcccgaaccggaaccggttatggttcaagaatatagcgtcaagctctctatcgaagagctttgatgggatcttgccttcaaactcgttgtagcggagatccaagaatttaagggaaggcaaagagaggacaaccttagggaacttaccgacgaatcggttgttgctaagatcaagctcgtagagaagcttcatgcggttaaacgtgagagggacttcaccgcagaaacggtttgagttaatgtggaacagagcgagatcagagaggagacctagctcggaagccaagtaaccggccatgtcagcgtggttgaggtcaatgccagcaacgactcgggttttcgggtatgaaggagaaggagcacaatagattccattgtaggagcaaacatctgaaccattccaattagctgtgaagttgaaaggatcagaaaagattgcttttttccatgattgaagagcaatgtaggcttgacgtagcttcgggttctcgaacttgagacgtttgtctactttgatatcactgcccaagtcgctttcatcgtcgtggtctgctttgatttgtaagaaacaaacggaggagagcaagagggtgaagagaaagagggaacgaagaggagggaacaacattgcttatgggtcaagaaacccaattttactaattatgaacatctaatatctctatgtgctccatctttataaaacagtttagaaattccaaagtcgtatctctttctctctctccaatttggccttctttttttttacggaaattttcaattagtgacatgtttacacgttgatgaaataacgtagagaagacaaaaagagctgacctttgcggggagataaaaccatcgtcactgaattcctcaaacttggacgcacgttcctagaggttctatgatgttaaagaataaaatagtcagccgtcaacgttaaatcatataaagtatagagtttaatatgttgataactcaaaactacattatagcacgatctatggaattagaagcggtcaaagaaagagaaacctgcacgcacgaccaaatgggaacaaaacttggacgcatgtctgtcacaaaaacgtgtatatatcatcattccttagatctttcaatcctatgagtaagagttgttcatcagttgtcaagtcttccaaaaggtgagcaactagcataaaagagaaagatcgatatctcttttttggtttgtagaataatctgaaatagcatgatatcttaatctctttgatttcattatttatagtagcttggaagcgacgtagatctttttaatatatgaacaagaaagtcttacaaagacactcagaaataagtgactccttggtacaagatgttggtaagaattcaactggcttacaaaacaccaacacatggaagataatatcataggataaattggtccattcgtttgatcaaacaaagtttaaagaaaatcaagcgatacgcgtagatccacataaaaatgacctaaatacctcacttttaagctatgttgccgggtagttaaataagcaaagctcatgttcaagtaattttcgttttctggagattgatccaaggggatgtatatataggccctataacagagcaagaaatgtccaatattacatgttcaattgcaaagcatgttaaaacaagagagggataggccatccaattttcccgatgagaaaacctctagcgcgaagtaatagtatgaaaatcccggctcacaaacataagcataccatcatcagtgtgtcattaccacagtcatgctcgtttttggtcaattggctaagaaacgatccgtggtggaatgggtgaagcagtgccttgtcgttggtgttggcgatcttaagaggggagaacaccagtatacttgtcaacaaacaccgtgtatatcgctagcacgacttagttccatcccgctgtccttcttcatccatgtggttgccttccttcttatgtatttacataggtccaaccaagtttcttatcgaaattaccatgtgaaatatttttaaaaaatcttaaattattttttataatgaatttaataaataaaatacattttactacaacactatcgattaatacattagacaaattggaatcgttgtaaaatttaaaatataagaaaaaaggcaaaaaaatgagcaaaatataagacgaaacaagaagcaaaacataagaagaaaagcttggaatggtaagttcatatttgatacattaacatcaagaattatgagttttaattaccaactatacaaaaaaagaacaacacaacaatatgaagacctatactttaaaaaatcgaacttatcaacttatcatttcaaactttatagctaatcatattatatcagttttaaactatcctctaaacttaccatacattttggctatcataaaaatgaaaaagataaatctacattttaatatgccgatcttaaaatatgaggaaataacaatttgttttgaaagcatgcgtcaaaaaaatctctacactccgattcacgaatgtggatctacaaataagctacttaagcgtaaagttataaaaatggcagaagatggtcaatccaaccgtaacgcccagcagtattaatctgctgagaacaaaagaatgattgagaaagtgttagccagggtcgcacaataataattaagatatagcaagaaaccatttaactgaatcaacaactacaaattaccaacgaaaattaattagttggaaagactaaaattcattaacttggtgtttttatttcattttcggttcaagtattttgcctattctcgagattgatccaaggcgatgcatccctaacacataaattgctagcaatgtccaatattaattaatgaacacagacgacgacaaaagaaaaaaaaaactaattttaaagcatgtggaattgaaggagtatctcaaatactctctagaagatcatttgaagggatgatccaacaaagcaaactacaatatccacaaaaactcttattgtctctgaatcaaacagagctataacattcaaaaaatttataaagccaacgcgcttgatcatcaagatgaagatagaatcgaagtttatgttattagcaaactgggaatcaggaaggaacacatccttcgaaatagataagcgatcatgtcatagtaggtacaatacaatcaaatggatcactgtattcatcaatttcagacactctagttgtaaaagaacttaacgatccataatcaagaatcacccacaattgtcagtcaaacagatcaacataaggtttaagagttctacaaatgatttagttagttcattcgttaaggaattagtggatttgtggcagaaaattcagaactaaattcaatatatgtgattagtgatcagagtgtttcaaacacgtcactgtctaaatccaaaggagaagtgttcaaacctagaggaagctactgggttttgagagttaagaagatcagaccagtccgatatatcttatatatagaaccacatgcacgagaatcatgaaaacgtagtgattttgatttttgtttagtagaacaaatattttgagatttttttagaaatttgttagaatttgagattttttatatgactaagacagagccaaacactagtgccgtcacgtgtaatagataagtttctatccggatgaagccattagcggtgacaaggtttaatagtattcaactactaattgcaagaactttagatacattgaatctagacagcatttcagattcattgaacttggacgtgtttggtttactctactacttctggtttccgcatcagatgtttagaatgtatcagcaaatctactgatgtgaaaaaaaaaacaagacgaaagatccgaccacaacttgccacgtggtaaccacaatttaacttgttgccggtacgtgtgtccacgcgctactatgtaaccgtgaccgtgacctagcttttttagtttttactccaactggaactggttatggatactttgtcacggacgttagttaataaatgttggcgtccgttaatcagaatttttgaagtaaataaaatatacaaaggtgttattaaaaatctgaatctaaaaatgaaaattaattgactaacactaaatgcctaattattttatttttctgatataatccttttaaaagtgaatgtatctggacaatatggtggtaacaattgagaatctaaaattaatccgccagcatatcccaaagctgtaattaatttaacgggatttagggtttctccgttacacaaaacgccgttaatcctttttcaccatcatgttgtcatattttacattttgtcgtttactccgtcaaaaagtcaaagtctctgtcaacataatgaaaacatatcactaaatataattaatactcgtgtatatatatcccacaagtcaccgagaagatgagaaatcaagaaaagggcataaaatggtagagataggaggacgatttatcagaacagcggcggcttttgatgtggcggcggcgcgtgcacgccctccgtgcgctagcagcagcggaagcgatcactctccggatgacacagaagatctttgggatctggtcgaatcttttatcgacagagaagtggaaactttacctgaggatgcttttcaggaagaagaagatgataaatcggatgaggattacgaagatgtgaaggagaggttacgggagattcttgaaaaccacggaggcgaagagcggcagagaataatggatgaggcggtaaatgctagtcgggtcttcgccggggagaaacgtcactttatggcttatctacgtaacaaaggttttgatgcaggtaataacaattatctctattactctatgttcgtatgaaattacaattgtatgtagttggttttcagaggttggttaagtttgttcggtacaaactttaaatggttggctcaaatccgtttgagatttagttttgttgggttgagttgattcttctaaacctagctaagctcttagagtttttggtcatttgattttcttatttgaatttttgttaaaggttgaaatagtgaaaccaaaattaagtttgcaaagaaatagatttgaaggcgtgattacaaaaacatgattcagaaataaatttgatcaatatagagtagcacatttgagctttgaggttggttaattatttagtcatttgattcttataaagagttcctggctagtgtaagtattttctccccatacacatcagcataccatgatatgtagaacaaatcacattaggatttagatatgaattgttgtacctgaaattaagtgagatgctaatgaaatatgtttatgaacgataatcgtatgtcaatttttatctcatttgatgttgtaatattcacatctttttggatgtgtatggtaccatattgcatacatgttttgtatttaaatgtgcaactttttttgttagtattttgtaagtgtgcaattatactgaaatgaaaagattaatctacgtgtttaggtctctgcaagtctcgatgggagaaatttggtaagaacacggctgggaagtacgagtatgtagacgttaaggcaggagataagaaccgttacatcgtcgagacaaatcttgccggagagttcgagattgcacggccaacgacaagatacctctccgtcttagctcaagtgccacgtgtctttgtgggaacacctgaggagctgaaacagcttgtgaggatcatgtgctttgagatcaggcggtcgatgaagcgagcggatattttcgtgccgccgtggagaaggaatggttatatgcaagccaagtggttcggtcactataaacgaacctcaaacgaagtggtgagtagggttaagagctgcggctgtggaccgcgtgtagggtttgaagaatcggttaaaatgacgacctttaatggttttaaagatggggagatgaggaggagtggtctaaaggttggccagctaacggtggctttcaacggcagtgaagtggggttgcaaatattttagaataaagtatagggctctaggtgttgatgtttcagagttctttatactatattgtaaatatatataagttttgggggtttagagaagcaattatctataaagtttttgtttggctaccaaaacttattgtaagttgtagtggtctatattattttgtttaggcaacattttaaataaggccttttcactttcggcccgttatattattggcccggctctatcggagtatccgattgtttgtctttcttacaaattttatactaatttacttcgatttgttgaaggaaaaactaaaataacaaaggattgatggcattggctatatagcttatatttgagattcagagttataggagtagactgcaacatctcactcgatatgtcttctataatgtttccatttaagaaacttttattggagtgtggtgcgtttattacttataaaagttaattaattggacgattcaaacttaatgagcatttgcaactctctcttcaaaacttatttataaaaagctagtaattgaatgatgaaaagtttaatatactcacttaagtgtcgtgcacccatcacaaataattcacaccgtaaataacactgttgcaaattgcaatcatcttaatattttacgtttttagtttttactacactgcactaactgtagtgttcgactgcaagctccactatatatcatcattccaagttttcgaacctaaaaactatacatttatttgaatgtcgatttaaatattggatctaagcaaatgactgatcctacttaacaagtggtggaagatatagtgtaagctgattaattggtcttaataaacactttttttttgtcaacaaatgaagcatttttaagtttgtaacaaaaaaacttattgcaaccaatgtgtatatccaaaaaaaacaatcactcatccaaagccgaaggatttatgtgaaataaaacacaaacagtcttacaaacacacaaataattaattttatttagtatttttggtctgttttctttaaatgtatttcctacattgaattttgtagtggaattcaatgtattaagtttagtttattcatatataatcaatgttataaaatttttgataagagttaatcggaacattgtttagtcaataaagatagcttaatttcatatataagtcagccgtctaagctgattaattggtcatacaaaagaaattttttaacattttactgacttttttttaaccaatttgatgaaaaccaaagtggtcgaatgatttttgcttaaacctagttttgccattaaacaaaggtttaggcggtggatttttaagacgagagacaataactaaaaaacaataccaaaacaaacaaaacctaataaaactttcggtatttaaagtctcgataacatcttcttccacaagtctctctctctctctcttccatagaaaatatgaagaagctctacagaaaaggaaccgtacacccgtcgccgccgcagataaaatccaacgaccaccttcttactcttcttcccgtcgctattttctcactagcggcggttctctcaccggaagaccgtgaagttttagcctatctcatatcaaccgcatcttactccggcgagcgaaaccctacctctcgcctgaataagaccaaagcccacaaaaaagcccttttcgacaatcactcgcctcttttccactgtgactgctttagctgctacacgagttactgggttagatgggactcgtcaccgagtcggcagcttattcatgaaatcatcgatgccttcgaagatagcttggagaagaacaagaacaagaaaaagaacgttactggtaagaaagatagaagaaagcgttcagggaagtcttcttcacttcttgctagttctagctttagtacggatgactcagagattccgagtcgactcggtgagtcagttgtgaattcgtgtccgtgtacgagttcaagcgagttgactcaagatggaggtggttgcagcggcggtttggaaccaatggagtttttttgtgccggagacgcttgtgagaaggtggaggaggagaagggaaccgtgaggagatttgtgagttttattggtgagaaagtttttggtgtttggggataagaaaattttgctacaaaattacaagaaataaaatgctcgaaatggttttttaaattgttgtttattcacatctctctctaggccaaaatgttagttttttcccgaaaggtttcatgtgacaacattaattgtgtttataattaatgcgacaagctatcagtgtattaaacatcttgattatatagaaaaagtcagtataattgcacgtatttaatacgcctgaatgtatgcacacatcaactacaaaggtgtgaccactgacgacaactccacaaggttacgattaacgtataacgtattcttaatttattatattcttaccgtcaagattaaaaagtatttacattattgaggacaatataaagtagaattgttatagtcttttattgcgatcatatgacgcctagacatatgcaattgattattcatcgtcttctacaaggatgctttgatagaagcttttaattaaaatatgtatatgtactatataatatattatttcgggtccaaagataacttttgtgctgcccaccaccacagccatttttatgcttcatatgaattcgtgtttcatgtttggttatgatagtcttttcagtttacagagcttcttctccttgtgttcgcggtgtgtgttagctgtcttgatctttcgtcgagctccttcttgagattggtgatgtttgagaagttttgcttcgctccttgtccttgcttttgagatctggtttatatctgatcgctttttgttggattctagctagacgttaagtgacgcttgagtcgtcgtcgccgtcgcatctggaagcttgtttgagtttctatgaatgctctttgcttgttgggttatgtttccttggttctcgagagattggctctcaacatgataggaggtggtaggggtttattcctggtttggccgtaggcatccgtgataaatcgcattcgcaggcgtttcaaaaggagagtttctctgttgttctcgggttctatcatatctctcaaggtttttgcctagttacctttgcttttagttttgggaatcgtcctcttttgattgtggcttgattatatttgctttgtgtgtctatttcagtttagttgtctccctttgatagggattaggttttcggagaatattcctttctcttccggctatgtcttcggagacttgtttatttgccgacttagatttttcttgtttgggcatatgtatttcatctttgattctacaattagtatctttaataaaattttaagtgaaaaaaaaaaaatgaattgtttttgtcacattatttgtctatacatttttgccctttgcgggtcactcaatctgatccttttcatcaaagcttaaagtctaaactctataaacttccattcctcggagtacatatgatcgcaataaaagaataattcattttataacctttttgtagacatgtcaatcgatttgtattagacttctcatttctccgttcttatcagatcgtttacttcttttttgtatcggccaattaatatccatataattcggaccctatatatgatttgtaaagttttttttttttttggacaaaagttttgttaagctcttatgttagataagaaaaatggattatacaagaaatagttgtctggaagtctgtgaataaaattgtcaatcatacatccattttattcaaacaacatatatacgatgtaggtctaatttgtgaggttttcacttttcagggagttttttttgtacatatagaaaaatagttaaacctacaggaaaaataaagttttttttgtgtgtgacaaaaatagtatagaaaatatatatctgaccgcgcaaaagctaaagttgcaattttggaattgattgggtccgcaattctcaaagcaaaattggttggtccactgctaatataaactagtttttctcttttaaagtatttatgaatttcttaagtatttaactcatatatattactctcttttgcaaagactaaaaccagggtgtgtttttttaacaaatgagctcttctcaagctatatatatatttttcaggtggattgtattaaatataaaagttttgttctaaatttcagttaaacatttatttgtttaggtaatcatagctctgatttggtaatcctttatcttgtgtttttttttattgtttgggatttcttgcaacttggagaataataatggacccctacgccttatcttctacgttcaatcttttttcctcgttttgttttgtcgaatccaattctaaaataagtttttttttaaaaaggtgaaaacttcgaataccagactttaaaacgtgcaatggcggttgtgctagatcggtaggattatcatctgcagtatttacacaggttaataagatacgtattttattgacctgtaaatgaaaaatccaaatgtaaaggctttaaagtttaaactaccaaaaatgttaaaagtgatctgatcatcattcttgtctcttgggtaatggtttgtaaccacgataaaatggagtaattcaactttttagacaaaacgagggaactgaatcctagaaatgcggatttttaagcattgggtttgacaaaagaaaatagagaaagaggagacataatggctctggtctcggtgtaacacttaactcacatttctcaaagatcagtattttcgtttggactaaataaaatagtacagtatagtgtttggtaattgaatctagtagtaacaaactaactaacgttttctactcgacttgttcattttaacagaatagaagttagagtgtagactaattacactgcagtgagtaacagtgaccaaatgcaaacatatacatacaagttacatattccgaaattcgtgtgaaaattacgaataattcagatatacattttttttgggcaaaaataattaagatatacattactcaagaattattgatgtctttttttacgtttcaataaaatatatataaagtcaagaggaaaagtgtagttagtcatactgttatgttttcacttttcatattaaaaaaaaagaagttaaatatataatgtcagagaaaaagatgtcaccagtcctcgtcagtgatcacgacagaagctttcaagcgtgtttgagagttttttttgtttttgattcagtagacttggtactaaaaactcaacgcaacgtttttgacttgttatgtgttgcagtagcatcttcttcttaggctttgtaacttaagtgaaaaccgtctagacttttcggaaagtgaaaaccaaataacctgtagtaacaagtactatattgacaatgaatcatttgaatcattagtataggacttgagagcatataaaattctctttcattgctaaaccagggacgaaattattgcatcaagccaacaaggtatttttagatgggccgtcgtataattttttttatctctgactttgagttgggcctttcatatttcaatacagcccaactaaattattttagaatatcacaaaacacccgaggcccatcaaaatttacatgttcactgggcttcaacacgatttatccttaaaaaaaaattcagtaatttctttacatctttttgtttgataaagtatcaataacttatgccaatgttctcatttgggtaagacgatttcactccacggttctcatttcccaatgttttaattagaactcaaattagttttcgtagtatcaatctaccaatttgaagatgtcaattagctaagtgacatccatgtcacctaaatactatctccatcattttgtacattcgaaattagtgattgaagtcgccaatttagggtatcaatttgcgtattctaggtttcaactttacttttgctttctttctcatcatacaaacgtatgacatttccatagattagatttggacaactgattttctataatcaaattagaagaaaattgtattagcaaactaaaaataagtcacaaatattatacgaataagagatctaaataatacgatcaaacaaaaaccttaggattttataagaaaaagtgtgaatgcgtcagtaatctgaatattgtccacaaggataaataattacccaatcggatcaaagtgaagaaataataaatttgatattcatcattcgcattttccgatcaaattaagtttgccaaaaatcataagttttgaagatcaatttataaataaaaaacgaagatgtggacgagcaacaatcagatcgtaaaccaaaacaaagaacgactgaaacgatatctcggccagattgatttccctcgccggttcatcaaggactcagagacaccgttactctctcttgccccattttttagaacctcgaggttttcctttttccaaaatcaaatccaaaaacatttcaattcagaaacttagatccaatcaaagagacgagactaataaaagtaagacatttaataaccctagaaatcgagataaaaaggcttcggagcgacagagaggtatttatagtttgatattgactgatgccctaagttctccaaaacaatgtaattgcttttgggcctttgggcctttgggctgaaatgtaattcggcccaacttatataacattctatttgattggaaaggtttaattcatggaaatgtaaatggctagagctaatggcttttgtgtgacaatcttcatatgctataaacttatagtctaaacttgaatatattaatcacataaataacgtcattttttttcttctaattattgtatctttaagattgtattgtagttagaacttagaacccacacaattattgcataaatagtcactcactcccacgcttaacacataatattcatcacttagttattgattttactaacatcaaccccaatccttttattgacattaccacacatctttttatcatcatatacttttagctttcgtagaagatcccacatccatttagaatgtctcaaccacagccaccggattcaaatccgcagctgcttcagcatttttcatcgcctcgaaccgtggctccttggcctgaaacttgagtccggcatagagtttcatgtagtcatcaaacacaaagcttgggtattttgagtctttatccacaagagatgttgccggagagatctcagcatcgcttccggggttgtaaaacgacgcgatagacatcctgtttccttctttctgggtcatcacacggtgcattacactcttgtacttcccgtttgttatcacctacgcacatttgacaaaaaagttatatatcccggttaacctaaaccaatttgttgattaatatcggtttgtcaatttgatactagaaccggattctgctatttgttaaacaaaaaccagttgtactaacgtctatcataaaccgggtttaaccaataaataaccggtttacctcaagttggtcaccaaggttgatgacaatggaatgcttgagaggaggaacatcaacccaatcaccatctttaagaagctggagaccactgaccttatcatcttgaaacagcaaaatgaggcctcctgcatctgtgtgagccctaagccctttgatcatctctggtttaggacatggtggatagttgctaagctttgtcgcaaaagttggacccgttgtcccatgaaacaccttcttcaagtaccctttctccaaccctagattctcacacaacaagtccaatagctcttcagctagaatctcaagcctcttcccaaaatccttcattgccaatctgttaagagacatggaaagcaaagtaatcaataattttggaagattgtgaggcgttttcaaagctggatcaaagtctgtttgtgtaccggtattcatttgacatatcagggatgtcgtataggttagattgagggagatgatggaggtagaaagtgctttcccaatcgacatcttcaacttcggtctcgagggtatctaaacctttggaacgaagcatttctttgaacttttgttccatatgtttcttgtagtgttcctttgtcatcctctcaatgttgtccattagatcatatggtagtccatggttcaccagctgaaataacgaaactttgaattgtaacgtccattttcggaaaaaaaaaatgtaagggaaaataatttgattatttttcaaaataataggttttatgtatatgataccaaagaatatctaagaaagaacctaaattccctgataatcaatcagcaagagaagagagacaagaacctcgaagaagccccagttttgacaagcatcgtcgatcaaagccatggtttggtctctctcttcaccattgagcttagacaagtctataactggaaacttaatgttcatctccatctctctctctctctcttaactagctacttaatgttttcgatccttgatgatgctaaatgtgtgagttaaggggttgagagagggtcgctagctatttataggcgcaaataataaaacaaatgttaagtcttttaaataattttttaagtaaaacgatagataagtatcatagagtcataagatcacataattgggtcatttagataatagttgctaaatataaaaattatttttcttattagaaagaaaaagagtttggggaagttgtatttgtgtgtgtgcaatataattggggggaccttactctcctgcttttgagatgggataaaatttggtgttttccatttgtatctctagttctacaattctattggttatttcttttgcctttttaaaaaaaaacatgaataattgtttataaggttcgtacaagtaaagactcgaagagtttttttatctgctggtgctttgtggagtcattagatgcaaaaaaaaaggctagggatgatgtgtaatatacgatcaatctcgacaaataacaatattacaatatactgattttggatttttggttatctagttatgtatgattgatcattttatttgaatcactatgaatagggaatgactaagtcattgtaaaatgcgtacaagcaataaatagaaaatcgtttgtgcttgtaattctactatttgacagatagattttcttattttgcataatagcaggatgaggagacaaattccatgttgagtaatttatttatatatattgtagatggtaacatatacaagaggatgattttcatcaccaacatcttgcatcttcgagttgcatgattatttcctcgttcttatgggtgttggcaagtaggtctgatgtatatatatcaagtaaaaatatgttattttcagtgagagaatttgaatttgacttatagttttgacttagagtaatattcaaaattagaatgaaatgaagttttttctttccttttcttaactggactgaaaatttatgatgtatatatgatgatcattttcttttacttttgtcaaataaattgtgaaataacaaaacataaattaaattatcaataactaattgacagaatcgcaaaatcagtttatcgttctaattcatggattaccaaccacaacctaaagatacgtatatgattttggtcctttttggattataaatcaactttgttaattttgggaaggaagaagattaacctgatcatttttctgtcaaattatcttgatcattatgaggttgcttcttcgataataccggttggccttggccagctaatataattacaataagttatctttggattcttccataatagggaaaaaatattcctcatagtttaacaaatcaataaaaacctttaaatcaaatgtttggtaagaaaagtatacattatatataatttaactaaagttagaaaatattcccaaactcattaagaagtgaaactaaaataaaataagtttaaaatgatagtactttctctttatgtacgaaaaacaacacaatatacgattaattacttccaagttgtaatagttgaggttataatacctttcttttttcggaaaagggttaaagttgaggttataataattcgtgccacaaaaaatcttgtatcaagtaacaagaaaataaatcaatctttatctctctcgtatcttgtgaaattaattgataattgataacaaaaaatcagaaagaaatacttcggtcggtggctactactacctacttttcttttagtgatcttagcccaataacccccatgcgagcttgttatttctttcactaattgaaaagttcttttttttgtcaagtattaatttacaaactatatatctatcgaaattcggatttatctagacttattatgaacaaaatacttactttcaatggtaacgttttaattttttaaaaaaattcagatttatgcttacaaaacgttcatatataccgtcttcttcttactgttcaatgtcttgattgattttttggtgaaagtaaactatggaattacatgtctttttaaaaacttatggagttatacacacgcatgcattttcattaatacaacactaatttcgttataataaaatgcaacagactaggctatattgtgtttggtttggtgtctacgcaaggcatgtgtactcgtcgcatacaaaacgtaaaaatagacagcaaaaaagaagctagctagatacgataatctcaaggctcaaaagcccaaaaattaaattgggccttaaagttccgaacatcatagaacaggccattatacaagatatccctaaaataccctttgccttgtaggatgagtaaattaataaaggaattgactattaaacccttgggtcagagtatatattcacaccaaccccaatgcggagacctcgaagtgaactccattgacgacgagtgaacgaaaggagggaagaaaaaagttaggttcgaaacgaaagtaaactagttaggtgaaaagcgaaacaacacccacagagcaatggcccctgctctcgccgttacacgagatctcaccgccgtcggatctccggagaatgctcctgcgaaaggacgtgcttcggtttacagtgaagttcaatcaagccgtattaacaacactcttcctttgccttctgttctcaaaggagctttcaaaatcgtcgaaggtcccgctagttccgccgccgggaatccaggttagatactcgcgatttgagtttttttatcagtctgatctagatcttgttagtttggtgagaaaaattgaggaactagatgattttattaagctaaattgaagtagtttaattgtgattatgtgtgtattatgctctcgtgtagtttgagaatggatgctcttatagatctgtggtttatagattatttagaagagttttggagaatttagtgttttggtttatgtggttgtagatgagatagcgaagttgtttccgggtctatatggccagccatcagtagcagtggttccagatcaggatgcaccttcgtcggcaccgaaattgaagattggtgttgttttgtctggaggtcaggcacctggtgggcacaatgttatttctggactgtttggtaagggtttgatttttacgtcaaatgatgtttttttttttttttttgtagaatagttgctgacattgttccactcttgattttgttttcggcgtgttagattacctgcaagagcgtgcgaaaggtagcacattttacgggttcaagggtggtccagctggtatcatgaaatgcaaatatgttgagttgaatgctgaatatattcagccttacagaaaccaggtacttggattcagatccttccacaagatttgaatttacactccactagatgtggagcattagtccttggttaaatatacttgtctttttaagtcgatgtggttataattctttttttggtctcaacagggtggttttgacatgatctgcagtggaagagacaagattgaaacacctgaccaggttgaatatttttttgtggtttgaaaagatatttgttactgcttccaaagcctctatttcgtgcagtgagtaattatatatgcctctcatgtgcagtttaaacaagctgaagaaacagcaaagaagcttgatttggatgggttggtggttatcggtggagatgattccaacaccaatgcttgccttcttgctgaaaacttcaggtaaaccttgcagttgaatctgttatgttgaaacttatttatcttaggcgaaagtagttgttcttgaagatccatgtgaccagaatctttaatatttgctgattcagcatttgacttattatctacttgtataattaggagtaagaacttgaaaacccgagtcattgggtgccccaagaccattgatggtgatttgaaatgcaaagaggttcctactagttttgggtttgatacagcttgcaaggtgatattccgttttgatcattttttttttttttatcaattgttacataagttattacataaccaatcctttgctctcgtttcaattcctcgtcaagaatctaatttcttgttccaccagaagaattatgttggaaaaagcctattaaaaacattttaatgcctatgcagatttactctgaaatgatcggaaacgtcatgattgatgcaaggtcgactggaaagtactatcattgtaagtaaatgtttaacaaaatttcttgaagttgcatcatttctattgtgccctatttgtttacatgctgtatcacattttcattgcagttgtaagacttatgggtcgtgctgcttcccacattacgcttgagtgtgctttacaaactcacccaaacataaccattattggagaagaggtaacgtttttggttgacttcaattcaaattaccgtaaagatatctgaatcttaatcgtgtagatgatagaattagactgcaaatcagattcatatttgtgacacttttccattgaagcaaattattcatttcaatatggggttattggttcagagagacctcacacatgcctcattagatcagtttatatttactcaactttgatctggaaatacttttttgcaggtttctgcccagaagcagactttgaagaatgtcacagactacatggtggatgttatctgcaaacgtgctgaacttggttacaactacggtgtcatactgattccagaaggtctgatcgactttattcctgaggtgtgttgtcattgtaaaaaaatagaatctactacttttaaaccgattaatataattgttcttcttaactgatgattaattttatttcatgacttctcaggtccaagagctcattgctgaactgaatgaaattctggcaaatgaggttgtcgatgaaaatggtttgtggaagaagaagctcaccgagcaatccctgaagctgtttgatcttctgcctgaagcaattcaggaacagctgatgcttgagagagacccacacggaaatgtccaggtaattgatcatggtcctgtctcctcgtactaaatttccaccacaatgcagttagcttcatctctcacaaatcattattaataataccatgtcctcatctcaataggttgctaagattgagactgagaagatgcttattcaaatggttgaaactgaattggagaaaagaaagcaagctggtgcatacaagggacaattcatgggacagtcacatttcttcgggtaagttacgcaatttgttctttcagttaaccaaatcgttatataatacattgcttatttattgatgtgaataatacaagcttgatttatggtttgtaatcaacttgaatacaggtatgaaggaagatgcggcttgcccacaaattttgatgccacatactgttatgcacttggttatggcgctggagtactcctcaacagtgggaagaccggactaatttcttcggtttgtactccaccatttccactaaaatctgttttccatctgtgatcataatagcctttggtaaactagtatgtgcttagaatgagatgagttaacttattggcgcaggttgggaacttggctgctcctgtggaagaatggactgtaggtgggactgctctcacagccttgatggatgtcgagaggagacacggtacagaaatataaatcaataaagcttactaagacacattttgaaatctagatattaaaaaatcagagttgatttcaacttgcaggtaagttcaagcctgtgatcaagaaagcaatggtggaacttgaaggtgaccctttgattcccttcccttttcatagttttcgattggcggttagattgtcttgctgactgtctttttgagctctgcaggtgcaccatttaagaaattcgcatcactgcgtgaagaatgggcattgaagaaccgatacatcagcccaggtttgttgcatgtttcttgtctttttttgacaaaccatctgttgtgtttcagattctaatccctttgcgggaatgttatcgacttgcaggtccgatccaattcactggacctggttcagactctctcagccacactctacttcttgaactcggggctcaatagtctctcgactaaccaccattcctttgcttttctgccttccttggaatttcgcatcagtcttgttttatcttgaatattacgtgtccgtaacatttcgattaagttgattcctctcgtgtttcttcaacatataagataattataatattatttctctcgtgtttcttcaacatataagataattatactacatggtctaaatttactacaaagatctaaagtcggagtctgtctagaaaaaagtcctttgcgggtctattaggaaaatcgtaagctactttttgtcaacatatgcgttacttgaatttttatgatgtttttaaagtacaaatttagtttaaggctaattattgtttcaacacactaaaagtcctggtaggctctatatacacatcaaggtcagattctaattttaatacaaagttctaaagtcagaattcaaatttaatacaaagttcttttggtttctattaggaaaatcttaagctactaaaatcaacatatcgttacttgtgaggttaactgttaaaccaccttttgcttaccagtaaaccctattaaaagaaaatagtaaaacctaatgctggtaggttctagagatacatcaaggtcattttcatatcaaattataccggtaggttgctttgttaacgggtctattatttgcttcttgaaagcaaaacaacacataacttttacatgtatgttaactgtttatagatcctaacttagcaagtgaaatgatatttcaagtggtgccttggtggaatgttaaattgtgataaattaaagatatttataagaagaaataaaaaacactaaggttgtttctgttaatagctaaactataggactaacattaaacgttaatgatgttcgaagttttctaacgaagagaataacagacacactgaaattcaaataatctctctctctctctctctctctcactatcttcgttaaattcggcaaagctttcgctttcttatttatggaaatttctttcatcctttagtttagtctctctctctctcccttttttgtcaattcagagacagagaggagagagagaccaagaaaaggagacttttgttgatcatgggacaagaaagacctaacgacgaagagagacccgagtcacgtgatcttggggtctacggatgttcaccgcctcattcgccgcgtctcggtccgaccaggttctacgtctttgctggagacccgaatccaaaacaaacgataaagcgatgcaagaggaagagaatccaagcttgtaacgatcaaagaacggctaaaacagctattggcgttatggcgattttgggtttcttttgcctcgttaattggttcatgctctctcgccttcacgaaggtcgggtctggcttcgaagaggactctctgagaacccaaaacatgtttctgcacaggtccaatgatcgtaatcttcattgacatgtttccttgattactgacgtttcttgcgctacactcattttcacatacaacaaaaaaagctttttatttataaaaacagagaagataagaaaaatgatatcttagttgaaataaaatattgtgttgcataactgaattattatatggtggtaattgactatatgaagagttgtgttttgtgcttaaagtttcatttgatctaaactttttgttgtgtgaatcagaatgaagagcgtaaaaagtttgaaaaacagaagatgaaatataatggaacatatggtagaatgttgagtttggctactgatgctttggcagaggtaaatatattcttcacaaaccaatcttatccttcctaattctcagtaacattgttttgttctttttaatagggaatgcgtgataaccgttattgtaatggttttgattttgagcagaacaaacttgagaccaaagacttatggcaggagccgaaggaacaagcttcggcgtggaagccttgtgcggatcaacgttctttgactcctgacggtctcattcaatctctctctttataaaattaggttaaagcttgtttcctatggagtttaacttgcctgattttttagatggcaaaaatggatatattatggtaactgcaaacggagggattaatcagcaaagagttgctgtaagttttcttctccttgtccttcaaatttatctttcaaattctctagtgactataagtctataaccaatggatttcgtcataggtatgtaacattgttgttgtagctcgattgctcaatgcggctctcgtcattcccaaattcatgttaagtgacgtttggacagatgcaaggtaactattgtaagctctccgtcctctatctctcattttctagccatttttgaggtttttacatttgtaacgatgtattgaactttaattaatacttcatatatagtcagtttggagatatctaccaagaggaacattttatggagtacttgtcgcccgatattcggatagtaaaggagctaccaaaagagcttcaatctcttaatcttgaagaaatcggtagcgtcgtgagttatacatttctccccaaatcttgacgcgaacagtctcatctttcttctctttttgttcatgttttgtcacttttacctcttaaggtgacagatatagaagtgatgaaagaagccaaaccagacttttatatgacacacattctccctatactactcaagaacagagtaatccattttgtcggattcggaaaccgcttagcctttgatccattaccgtttgagttacaggtagacattttttttactctacgcgcttctatatatctctgattatagcttctttatctaaacctttttggaagtagaggcttcggtgcagatgtaactttcatgcgctaaactttgtcccgaggatacaagaaactgcggcattgctcgtgaagagattacggggcagtggatcttacgttgcaccacttgatctacatctcctcggtccaaaatatgcttccttaatcttggacaataagtctgattctccggtgcaggaggaggcggcttcttcttcttcttctaagtaccttgctctccatttacggtttgaaatcgacatggtggctcattctctatgttacttcggaggaggtgaaacagaacagaaagagttggattcttaccgccaaaaacactttccatctctttcaactttaaccagaaaaaaaaagtttgttccttttacttcaaactcaagcttccttgtcttcgattctaaacctaatttgctctgtttttgtttcttttctttattcagattccgatctgcggatgttttgaggacagaaggactttgtccactaacacccgaagaagccgtgcttatgctcgcggctcttggcttcaaccgcgaaacccgagttttcgtagctggtgcaaacatatatggaggatcaaaacgtttagccgtgttaactagcttatacccgaatctagtcaccaaagaaaagttactaacagaatccgaactacaaccattcaaaaacttttcatctcaggtaaaacttaaacatagacaaaccatcaaatcctaagtaaaaaccaattttgtattaatctttttttcctttggtttatgtgtagctagcggcattagatttcatcgcttgtgctgcagcagacgcttttgcgatgacggattcagggagtcagttatcatctcttgtatcgggttatcggatttattacggaggagggaaattgccgacgataagaccgaacaaacggagactttcggacatattgttgaagaacagtacgattgagtggaacgtgtttgagaaaagagtaagaaaagcgattagacagacgaaacatgtattcgctagacctaatggacgcagcgtttaccgttacccaagatgtaaagaatgtatgtgtcatgcatgaatcaataatatttgatcatttttttgttttctttttggggtccggttttggttcaatttatcctattttgtaacctcttaagagttgagttttctgtaatgatatatgtttttttttcattatatgattgaagagtatatcaagattttggtgtgcacatgatatgtgagatttatatgtttcttattaattgaatcctacaaaaattcaattaaaacacaataaagaaacactcctctaaaactaggtcaaagttcagaatcttcatagaaccaaaagcaaccaatataacataagcaaatcaaacagaagaaaagaaagaaagaaaaaaattagaaaaccaaaacaattgacataaacctagctagtcttattgtaaccaaacctagattagcaacaaccacctctaagggcaagaacaagatgaagaacactaccacgttctaggttgtaatgtttggcggttaaatcatcagcaagttgtttcccagtgtagacgatcctttgatgaacaggaggaatgccttctttctcttcgattcgttctttgatccgctcaatcgtgtccgttagctcaatctcaatgtctatttgtttttccgtcagagtcttcactttgatctccatgcttactcaagttttctctctcgctctcaaccttgtcttttgtctctcaaatcaaaatatatatatcttcggatagttaaaagccttgaaggatttggagttatttccttttttttaggcattggaatttccaaaacaaatccattatttaacatattttagtagattttatcagatcaataaaaaattcattaacgtttagcaaaattaaggtaaaaactgaaataccttttatcaagtaatccattaataatctttctttgtactgaaaaaaaacccaatcaaatttcatggtttacttgatacttctagaagttttaataaaaaataaaataaaaattgaaattcacccaaaagtcctttaagaacttatccaaacttaaaaacagttcaaatatcaaattcatccctttttatattgacaattgaatattatggttgagtgtttgaaaaacaaaaaaaaattgatgaatttgttttctttcttttttgccgtccggttttggttcgatttatccttattttgtaacctttttaatcgagttgagttttctcatttctgtaatgaatatttgtttatttatttattatgtgattcaagagaatatcaagattttggtgtgacattctaatttaccagataaggttatttgcaggtttattgttctaaaaggttcatatttttgtagaatcacaacccacctagtaacattaattgacgagaataccaaaattttcggatttgtcagactaatttgcttcttatcaattaaatcctacataaattcaacataaaacatacaaacaaaacaaaaactcctctaaaactaggtctaaaagtcagaattttcatagaaccaaaagcagtgattaacattgagaaatacaacagaagaataaaagaaaaaaatagaaaaccaagacaatagaaccaaacctcgatcgattatcaaaaacgatgaataacactaccacgtagtcggttataatgttcggcggttaaatcatcagaaggaatgcctatttcctcttcgattccttctttgatctgttcaatcttgtccatgggatcaatctcaatgtcgatttttttttcactaagaaattgagatttgactttgaaacgctgtcgttcagcaatctcccgcttcccatgtgaatttaaagtattaacgtggtggcattcacgctccaacttgcgcgtgacattctccagaagctcgatcaatgcataacccacgtggcacatacgcgacttccactgttgccgccccacgtggcagctagctgattttaggatcaaatctaataccaatgcactaaattaattataataattacttaacaatctacggattatcttcttacttcataagatccttatattttcattacactttgactcattcctttcaaattctcatattcactgattgaatacagtacagcataagacatgtgtttaagtgaagtaaacgctttactaatcagtaatcaaggattcaactagaaaaagggagccacagagacaaagactatacgcagaccaacgtcaccctcaacctttttctattcacccaatgctaaagaacaaaataaaaaaaaatctttccattgtcaaacattaaaaagtaaaaaaaaaagttcttcatcttcctcgtcctcactttattcctattccgtgttttttcagcgttttccacagctaaaaaccgacatagcttctctatttttgtttcctgggtgtatgtatgtacagagaataagaccgatctctccaagatctctgttttctgaagagttggtgaatactgtttaagcttctctataagagtgtcattccaaggtatctcttacttctctaatttggtgtttttagctttgtcttcaatttcttcttcaattttaatttctatgtatttgagtaatctataagttagattgcttatacagaaattctaggaaaatggtatttctttgtcaaaaagagacgttactgcaaaaaaacacttctttttctgggttttgggtctctttgagattttgatctaggagttgaattgaattgaaatcttttcttaaaggttctagtcactgctatactagtgcataaattctgttctttttattgattactagtaatatgaaaatgagaggaacaagagacgtattaaggtatgatattaaaatgtagagatatatcttcactctttttggaatactctgaaaatcttatcttaccaattcctctttaccaatttccttttcggtaaaatgtagaattttttatatctaagaaatataaatttccataatctgtacatatatcacacgctttttgaatgaatatttttgtaggtgaagtttttgatttcaaagggttcgaattgattttgcaggtgaagaagaagcgtttgattcccaaaggagattcatttatttgataaatagatttaagctaagagttaaaaaaagatggcaacactaggagatattggagtagcagcagcaatcaacatactcactgcaatcatcttccttttggcatttgcaatcttgaggattcaaccattcaacgatagggtttatttccctaaatggtatctcaaaggtataagaagcagccctttgcattcaggtgctcttgtcagcaagtttgtcaatgttaacttaggctcatacctccggttcttgaactggatgcccgcggctctaaagatgcctgagcctgagcttattgatcatgctggattggattctgctgtctacttgaggatttacttgatagggtactaatgtttttgtgatttgcttgtgaaaggttgttgcttttgattagtatgatcttaaaaactaatgttgttttctctgttttttttcaggcttaagatctttgtaccgatagcgttacttgcttggtcgattcttgtacctgtcaattggactagtcatggtctgcaactagctaagcttcgtaatgtgacatctagtgatattgataagttatccatctcgaatatcgaaaatggatcagacaggtttgcaaattatcccaaaaaatctcatattgatgattctttcttccctctgtgacttcaaagtttgtactttggaaggttttggactcaccttgtgatggcttacgcattcacattctggacttgctatgttcttatgaaagagtatgagaaagtagctgctatgcgtttggcatttctccagaacgagcaacggcgccctgatcagttcacggtaaagcaattatatgtgatcagttttgtttcttgatgttagaaccttggactgagccagttactttcccaggttttggttaggaacgtaccagcggacccagatgagtccattagtgacagtgtggaacatttctttctagttaaccatccggaccattatcttacgcatcaggttataagctcattcattgcttagaaagaatcagtctttttcctcgggttttgtttaaattatggaagttgattatacccaggttgtgtacaatgcaaacgatttggcagcattagtagagcagaagaagagcacacagaactggcttgactattaccaattgaagtatacaaggaaccaggaacataagccgaggataaaggtaactgagtggtcttagacacaaacttaaagaagcttgtcttgtatctaatctgtttcatgttgtgttctttgggaaactagacgggttttctcgggctatggggaaagaaagttgacgcaatcgatcattatatagctgaaatcgagaaattaaacgagcaagtaagtatcatttcttcctacaacggtttctcagttggaaataatcaaacttgacttatcttttcggtttcttgattagataatggaggagaggaaaaaagtgaagaaagatgatacaagtgtaatgccagccgcttttgtctcgtttaaaacacggtggggtgctgcggttagtgcacagactcaacagtcgagtgatccgactgaatggttaactgaatgggctcccgaggcacgagaagtgttttggtcgaaccttgcaataccttatgtctctttaacagtaagaagacttataatgcacattgcattcttcttcctcactttcttcttcatgattccaatagcctttgttcaatcccttgcaagcatcgaaggcattgagaaaaatgctcctttcctgaaatccatcatcgagaagtaatgtttctgtctcttactctctccattgtattgcctacttatatgaattagatgttgaatttgctatgttttgcagcgatcttttcaaatcggttatccaaggttttcttccgggtatcgtgttaaagctctttctaatatttctgccaagcattttgatggtaatgtcgaagttcgaagggtttgtatcgttatcatcgttagagagaagagcggcttttcgatattatatctttaatctcatcaatgtcttcctcggaagcgtaatcaccggctctgcatttgaacagcttgattctttcctaaaacaatccgcaaaggagtaagttcccttttctctttctctgtctccattggaacagatatagatccttgagcttatgtattgttgcacttgtcacttgttaggattcctaagacggttggggtagcgataccgataaaagcaacgttttttatcacatatataatggtggacggttgggctggtattgcaggggagattctgaggctgaaacctcttatctttttccatataaagaactccttattggtgaaaaccgaaaaggatagagaagaagcaatgaacccgggacagatcaattatcatgcgacagagcctcggattcaactctacttcctcctcggtcttgtctacgctcctgtgactccagttctactccctttcattatcatcttcttcgcattggcttaccttgtctttcgtcatcaggttagtaaaacaaattctgtttcttcttttaacatcttcaagattcttttctcttgtcaagcttttccaaattttggttaaaccaagattcttcctttgttataacacaagcacactaaaccttctctacttcttgaactttcttgcattgctgattttgcctttttgcagatcataaatgtgtataatcaggaatatgaaagcgcggctaggttctggccagatgttcatggtcgtataatatcagcattgatcatcgcacaaatccttttgatgggactattaagcactaagggagctgctcagtccacgcctttcctactcttcttaccgatcataacctttttcttccaccggtactgcaaaggccggtatgaaccagcattcctccgtcaccccttgaaggttagtagataaaaatctcactttgttactaaaaccatattcataaaacagaggttttgtcacttgttaagtaactctatttggtttggtttggttaagtatatgttattgatatcataaggctcggtttacaggaagctatggtcaaagatacattggaacgagcaagagaacccaattttaatctgaaaccgtatcttcaaaaagcatacattcatccggttttcaaagacaacgactatgaagatagccggtttgatgaaatatccggttattgcatcgaagattcggatgaagagtgtgttactgtaccgaccaaacgtcagtcccggataaatacgcctgctgttagccatgcaagccgcggttcttcgcgttcaccaccctcaaagtaagacacattgattcacttaaaccgggtgtggatatatacggtatagaaagaaacgatatcaattgggaattttagttatttagtcagattttgtatattatgagaatatttttggttctgacttttgagttgttttcagtatattaaaaaattctttactgaagtcccatcgaaatttatgtaacaattgtcgaggaaaaacaagccaatgctaaagaatctatctccttattgctcacaccatagaaaaagaaaaaccaaacatctgtcgataaacagcattggaattggtttccttctatttttagtagattaacttccatttaaaaaaaaaccaagacactttagtctcttttgattagtcaacactttattgtagatattttcttcataaaaaaactttctccttaaatgctaacaatttaaaaaaaatctgaccaccataatagtaaatgcaaaaaaagaagattaaatactcataaatgtagaatggtaagtcgtatttgctttttatatcaaaattaagatacattgtacacagtttgaatgtttatatctctacatacatattaagaaaaaaaatattttctttgtgatgggaaagaaaaagaaaataataacatttcttctatagccaatcaaaataacatatttgttgaccaaaaatttgaaatagaaaatacatttctttatttccaactgtactaacatatctgtacattatttacagaatcagaaattcatagattttaacgtccaagtctgtgatatatatcaaactaaaaatcttaagtaggaataaaatctgcatatatatcgtgtattccgatgattaattgaattgaattgctttctccgataagaaatgaaaaagcttcggtggatgtgactgagagcgaatcggtgcttcggttctaaaatcgtcacgcgcgactgaagagtgcgtggttccactcatatccaaaacgtacggtactacgaaacagtcgctagcagcttactttagaagcgctcataaaaacttttgttcctttgactgttaaattttgtacttctttctctttttcttttttttaaatctctcagaaactcttaaagaacaacatttcggacatatctttcttcacaatctcatgtttttttaaatttcttctttgtttcatgtcggactcaacagctatccatcgcctcactgtctctcaccggaatctagggttgtccaggaagaactcttctgtgtttgtttgatttgagctaatcagaaaggtgatgatgctactctctctgacatatttccgtgatttttttagtttctgtcgtttcattttctcagttcttgttctacttttattctgttcttgactcgtgttaatctctttgtttggttttgtctctgtgatgttaaagttttaaaacctctgtattgtttgattcaacaacccattcgtaatctgtgaaaccatagtttgatattagaaaaagattggagtccaattaaattgagtctgaatttgaattttctgacgatttggttatggaattggcaggtgaaattgagaaaatggagggtgaagttgctactaacggagtgattctcaagcataatggtgtaaaggatatttctttagaaacttgttggccagagaagaagaaaccggttgaggcaacgagtcttagcagtggttcatcagacatagaagaagagattagtgtggaatgtcctaagcgagtggctaatcaaagacggaaacggtctaaagctgatgagattaaaacgaaatcttcaagaaagaggaaatgtgatgatgagaacaagtgtgaagagaatgagaagaagcagaggagctctgttaaaaagagagcaactacatggaaagaagaagaagttgttgttgatgatgaaaagaaatgcgaacaacaactccaactagttccttccagcaaggcaacatctcgaagcaggagcaagaaatcagtcagtgtggatacttggttggttaacaacgagattgatgttagcgctttgagttcgcgttctgagtctgaactttcggattcttatctgaaaaccgagtactttaatgactgcagaagcatgacaaggagtttaaaggtagcatttgttcttacacaatgagaaaacatcatgtgatgaaactgtattcaacttttttctgatttgttttcttccctacacaggcaaatttgggagagcttgcaatttgccatcaatgctctaaaggggaaagaagatatcttttcatttgcaccttttgtgaagtgaggttgtattgttttccatgcataaagaaatggttagtttctgttcttacattttaatgacactgcctataggtttcaatatcgtcaattacaatcttatgatttgtgacaggtatccccatttgtccacggatgatatccttgaaaaatgtcccttttgccgaggaacttgcaactgctgcacatgtttgcactctagtggtttaatcgaggtatgagttgcattcttaacaaaatatgtggtggttgtttatatagatcaagaaccgcaagttcgatttttgttttggtgtgaatagagatgtatctatttgtcttgcagacatctaagagaaagctcgataaatacgaaagattttatcatcttcgcttcttgattgtggcgatgcttcctttcctgaaaaagttatgcaaagcacaagatcaagaaatcgaaaccgaggctaaggttcaaggtatatatggttctcccttttactactaagacaagattttttcttgctacaagataacatattgatatgtttatagattcaatggcttctcaagttgatatatccgagagtctatgctcaaatgaagagcgtgtcttctggtaagtatcatccttttgttgcatgtgtttgaagagttacatgacatctatcttatatatcactgaaatgtctttgttgctctagtaaccactgtgcaacatcaattgttgacttgcatcgaagctgtccaaagtgttcatatgaattgtgtctgaactgttgccaagagatccgtggaggttggctttctgaccgcccggaatgtcagctacaattcgagtacagagggacccggtatatacatggcgaagctgcagaaccgagctcttcttctgtttccgaggatgaaactaaaactccatccatcaagtggaatgctgatgaaaatggaagcatacggtgtgcgccaaaagagctaggaggttgcggggactctgtgctggagcttaagcgaatcttaccagtgacttggatgtcagatttggagcaaaaggcagaaacattcttagcctcttatagtatcaaaccgccaatgtcatattgtagatgttcttctgatatgagtagtatgaagaggaaggcagcttcgagggacggatctagtgacaattacctttattctcctgattctttggatgtcctgaagcaagaagaacttctgcatttccaagagcattggtccaaaggtgaaccagtgattgttcgaaatgctcttaacaacacagctggtttaagctgggagccaatggtgatgtggcgggctttatgtgagaatgttgattcagcaattagctctaatatgtctgatgtcaaagctatcgattgtttagctaattgtgaggtagaaactcattttcttataaagtttctatagctgtataagaggttataaagctcattttgtttcttgttatttcaggtgaagataaatactctatgtttctttgaaggatatagcaaaggaagaacatatgaaaacttctggcctgagatgctgaagctgaaggattggcctccttcagacaagtttgaaaaccttttacctcgtcactgcgatgagttcatttccgcattaccatttcaagaatacagcgatcctagatcaggaattctcaacattgctacaaaacttcctgaaggacttcttaaaccagatcttggtccaaaaacttatgttgcatatgggacttcagatgagctcggtagaggagattcagtcactaagcttcactgtgatatgtcagatgctgtaagtttcagaattgttacttagtactgttaaataataatacggtttctcaggtgtataacggttttttgtttttgtaggttaatattctgatgcatactgctgaagtaacactaagtgaggagcaaaggtctgcaattgcagatttgaaacagaaacataagcaacagaatgagaaagagcttcaggagcaaaatggtttagaggaagaagaggttgtgagtgatgagattgtggtttatgatgaaacaagtggtgcactttgggacatctttaaaagagaagatgttcctaagcttgaagagtatctaaggaagcattgcatagaattcagacatacttattgctctcgtgttacaaaggtaagaaataatccacaaaacgttttcagttccgagtcttagaggttattgtgctgataggattctttatgttaggtgtatcatccaatacatgatcagtcatatttcttaaccgtggagcataaaagaaaactcaaggcagaatttggtatggttacttgtaactgtagtaactgtcacttaccgacattgtattcttacgtttttgtgtttgtttgtttgaactaaagggattgagccatggacatttgtgcaaaagctaggagaagcagtgtttattccagcaggttgtcctcatcaagttcggaatctcaaggttattatttgaatggaagctgtcctattaactaaactttttctcattatctttaacttgtattatggattttgatacagtcgtgcacaaaggtagctgttgattttgtttcccctgaaaacatcgatgagtgtctccgtttgactgatgagtttcgacaactccctaagaaccataaagccagagaagacaaacttgaggtgattctttttctgatattttcaattttggattagcaacttctgtcaatggatacagttttgtttgtagttgaatcttgttttaatctttgccatgtgaacagataaaaaagatggtgatctatgcagttgaacaagctctgaaagaagtggagacattattgctagatcgcagctaaaagctctatagctttgttgttgtaggattaacagcagattttgtagaattgttaaagccatggctattgtagttggcttttgctgtgatatatgtatgtaaaagagacaagtgtctcttgaaaagaatgatttcctttttttcaaatgggattttgatgtaacttttccttttccggtctgttttggcatatgaatgaatatttgatgtaagcttcttttgtatagttttgtatctttacatcattttgagagcaaatgaaagtttatgatatgagagcatcatagattcatagtagcaaatacaattggttcagttgttgcttgcaaatttttactgcagtaaatatggattgttttgttttcaaaggttttaaaatgacttaatacattaatttccaaaggttttgttttaaggtattttttttttttttctaattgtatagaaggaaatacaataattaatattcctagtcaaattgtataattttcataccattttctgacaatttcaatttcggacaacaatttaatgatgttctaatttaacgtgggtcccaactaacttaaaacgtgtacgtggcttacgacgtcgtttacaagtttatacgtcgaactatcaacatcattctacctttctttctctctttctctcaaaatccaaaatgttgtaatttgcaattcttcagtttccgtttctctcctgagaaatttattgacttcaaaaaccctaaaaagacttgtgattgttcgtttctctaactcgaatgttgatcgtacgacggtgagtgatcgtagtacaatgacgaagaaatcacagccgcagattccgcctccattgtcccgtcgcggcggcgtcgtgtggctgggatggaaactcgtaatcgctttctccgtcgcgctttgccttcttgctcttcttcgaatccaactacagtacaattccttcacgacattgtcgtttccactctccgtcgcgagatctcagacaccgcttcacaaatactccggtgatcgtcccaagctcgctttccttttcttagctcgccgtgatctcccacttgattttatgtgggatagattcttcaaggtcaaaaaagattcttagtcctattaatacttgtccgttattctaaatttcgaaaaaattgctgattctggtgattttgcagggagtggatcatgcgaatttctcaatttatatacattcagtacctggtttcgtgttcaatgaagaaactacacgatcacagtatttctataatcgccaattgaacaatagcattaaggtgagtgttcatgagaatttctccatttgatgtttttttatagtgaaacttagggtggtgttgttatggttataggtagtatggggagaatcaagcatgattgaagcagaaagattgttgcttgcatctgctttagaggatcactccaatcaaagatttgttcttctctctgacaggtttgcttctttcagcattactctttcagatcatcttatgcctgaccacttattgcatctgactttgagcacatttgtggtttgtacggacttatttcattttcatctactttctgttttgcagatgtgctccattatatgactttggctatatatacaaatatcttatctcttcaccgaggagttttgtggataggtagattgaaagtctgaatttatgaggtttcttagtacttcatacttgatatatatggcctgataactggtgtattataagaggagttgtctagatgttgataactatgtttgttgctctctattggcagttttcttcatactaaagagacacggtacagtgtgaaaatgtctcctgtcatacctgaagagaaatggcgaaaaggatcccaggtatcttcattttcttgcttaggaaatgaacattgctaccaagatttttgaagcctgagtttcttgtgaaaatttaagcattaggaggatagggaccttttaaagttcatgaagtttttaatctcatcttagttttatctattgcagtggatagctttgatcagaagtcatgcagaggtcattgtaaatgatggtatcgtattcccagtttttaaggaattctgcaaggtaaagattaagctttatgatcatgactttaatttcaatcttgattctttgttgctgaagaaacaataacttacttcttgatttctctttcgatttgcagagatgtccacctttaggtaccaatgaggcatggttgtttcttgtaagtgctatttcaaagttggtatttttcatttaataccagcctgaatgtttatgttgattctttgtgttggtttcaaaacaatctcaacagtgtcttttctgtagtctatgaatacttctctccattgattaacctctttctttattaaacaaatggggaaacttttattacgtttgatgtgaactcagaaacagaagcgacgcaactgcatccccgatgaacactatgtgcaaacattgcttacggtgaccatcatatctgatacacatctctctcatttttgtttccatctaaaaagttccatattgttaatgtattacaaactgaccatttcagatgcaaggactagagagtgaaatggaacgaagaacagtgacatacactgtatggaacgtttcaggtacaaaatatgaagccaaatcttggcatcccgtcactttcacattggaaaactccggccctgaggaaataaaagaaataaaggtacaatctttttgttcagaggattaatatcacaaccgaatgaatccctaagtaatctctctagttcttttgcttttctcgggacagaaaatagaccatgtctattacgagtctgaatctcgaacggaatggtgtaaggcggattcgaaacccgtcccatgctttctctttgcaaggaagttcacgaatgaagctgctatgcgcattgtgagtgaaggactaataggatcatcagcaaacaaaaccttataactttgcaacagtgtaagcaagtaggtcaagcaacagagcgtatacatagagtaggaatagcattgatacattacaaacatccctcatgaggtttaatggtttatgattatatatgacgcttagtaaaaactaataatcattcttcatggataatcttgtgtttgggtgttaaaatttctatgtgtatatgtctgaagaaactggcttcgattaatagaatatgttaatagcaaattctactctggattgatgtcttttactcattctcctggaaattgttaaaaaaaaactaaaattttcaaggactcgaacacacaataatgaagtacataaacacttaaccaaaacaaactttttaaacaagtgaccttacatttttctttatagttggtagcgtaaagcacatgttttggttgctttatgggcggactgggcctagttcgtcggaattctaagcttcttttgcaaatctgatgattccatagaaatgagtcaaacgacgagccgttggacggtagttgagctcaattgggccacattttttgaaaaaatttgttcactaaaattagcttaaaaaaaacatttttttaattgggctacaacaatgcaattattccaaatccatagtattggcattgtcatttttataaaaatctctctgaatcttttaagttcaaaaatcttaaccattaaaaaaattcccaaccgactcgagctaagcctagcaatcataaaaaaaggaaaacttccattaacgaaaacttctcatcagaaactcaactcctcctcctcctcctgcaatcttcttgttttctctttaggcttttattttcatttgggcttaaaacccattatcctctcacactaaatatttttagaaaacaaaaatgctcatacttatttaaaaggaattttgtatataaatgagtgattgtgattaattttgagatgtatggtaatttttttttataatatatatggtaacttaatggtaaccatatagttaaatgcagagtccaataaaaatgatcaccttgggtctgaaaaattgaaatgatgagaagctcagtttgaagtttgaactttgaagcatctgtactatgtagtggattttgctttcagtgtttcataacacaaaagaagtattaaaatcttagttagcagagctctcaaaccaaaagaatagtaacaagtggttgtgacacccttttaactacttctcactagtaacgtagcaaagacaagattctttattcttctttcatgtgtttatatccatgaaattagaaaaatagtaataatgtaccttggttacaacttacaagcaacatcaccaaatacaatgcaaaacaaaagaagagagaagatctacatgatttcaacattaaaacctaagctcttattcttccctgaaactggttttgatgttcaaacttagaatcaatctcatcactcagtagtttacatcattacttcttaggatactctctcgccccgaaaatagtagatcctattctcacatttgtgcttcccagttcaatctgcaactcaccaaaccgtaaagaaaactctttaacattttgaacagaaagaatttttcactcgaatcaacaatcacaacaacttactgctagttcaaagtcaccagacatccccatagatagctcacattgctcctccggtattccaagctccttacacacttcacttctgcatttcgcaagcaactacacttacaataagaaacgaaagtgagctcttttaagcatctcacgatattaccaaacattataggttcaaaccagattatataaaccttgaaattctctggggttgaagtgtaatcagccatccctattgtcatcaaaccagaaaactcaagattcgagcaagcttccttcacgtgtttcgccagtcctacgcatcccgagggttccacgccgaatttagctgaaagttttggtgaatacgatcatgtaagatagctttaagaaaagtgaaagtgggaaaacatttgagataaatgttgaagaagaaattccagattcttacagtcttcaccactggtattcacttggacaaataccttcaagggctttcttccgatattaccaaccacacgatcaagcatatttgcaatctataaagcatatgcaaataaacaaaaccggtggactgtcacacgtatattcctcaagtggtttgatcacttatcaaactctcaatccatctttaatatcactacccacaaaagttcaacaatagagtccactatctggataattgtagtattcttacccaaagatcatgatgttttcgttatctaacacctcgaaagagctctagaacatttaacaaaccaatttctctttaaatatacaaaagagaaacttttaccttttcatcatcaacactttccacggtcacaaggttaggaacaccagctgatcaaaccaaagaattaagaatagaactcaagtgtggagttttacacccaatttagtaactcaatacaaaaaaactaaagatgaggactttgaaatagcaaagtcaatttacatagcaaaggcttcactttgttgctctgcaaattcccaatgaaatgccactctatatcttctggaagctgcaaatttcaatgtatcaatataaattcagaacttttctaatccaaaagattcaatttttaaaggattcgtagaaatcatagcaagcagagagaacctgaggtgccttctcaatgatctcttgcacataattctctccaaaagacctctgaccagcgtcgtatacttggcgaatcagagaaactggtttcgtcttactcaccgctacgacccgtatctgatccgacccacgacccgctttctccgccgcctggtttacccgctgaaacaccgatctcagagccgccacaccatcaatcgccgccgccgacatagtagaatccgccacgtgttctttgtctggctcctcttcgttcatcgaacaatcactgatcttctggtcacagctttgtgggagagaaagagggaggacagagagacggataatacgctgcgtttcgatgttttaattttcaatgaaaaaaaaaacattcgccacgtttcgaaacagaggaacaatgttgatttttccccaaaaaaaaaaggaacaatgttgatacccgtgagaagttaaacgaatgtactgttgcagatgtattgctaaattatggatgtagattaattatatacgtagttgtaaatactaaatagttttgaaaataaataccagtgggaaatatttttttcataaaacaaaaactatatcctaaaaaaaaactagaacctaataaccccaagcatcatgtgtaaatttgtgtttttgtatataagcaaatggcaattttgatttttttttcttgacaaatgggcaaagtctataaaccatcaaaataagttctttattcgtaattgattccacaaacctttgatattcattttgtcttcataagttaaatttgtgtttttgtacatttattgtcacacatcctatttaccactagtttcaaccatggggactttcatatatttctaaattctaagtctggattttaatgagtgcatggttgaagttgttctctaaatctttcatgctttttaaatccaacgtacatttaacgatccatatgtctctccacttagaaacttcgacactttatcatccctcaacaatcataagaatttcattaaggagtttaaccagtgtgcctatagcgtcacagtccgaactttaaattgcagcaatgtccttcaagttgaagggactttttgtacttgtttaaaatacgcaaatatattagggtcccaaatttattattcattgaatttatcccaccaagttaagtgtcaacgccttacttgagtgctctcagaactgaatttagtcaagtttgaacaaatatgtatataccgtgtattacggaaagtcttgtattgtacatttgtactcgtacctttttctctcctatatatttttcttagttctaaatgtattatttgcttcatggatatgattgatactacaaaaaaactagttgaataataaatatgaacgcttcaaaaaatgtcaatgtctaaccttttgacaaaaaaaaagaatgcaagtttcgtaaacatggcacataaaggctaaagtgtgtacaacaaaaagacttggtttggttcggatagtggagttccattccatatggatacactattgaacaatatctccctaaatcagtaaatctctatatagtatatacttcgtaaaaacattataatttagttgattgtttgtaatcaacctaacaatattacgcaaaaacattatatttttaaagatatattatcataaatcgtattacgttacgtttataattaaatccttaaaaacaattagtagataaatcatttgagctttctgagttaactgatcgtgttgtcaggatcaggaagagaaaaaaaatcactaacggatgcgatcaagacgttactatactagttgcacttttagctaaaagattatttatttttactttgtctctagatattattaaacttggatatctcatggtgttattctttgcaaaatatctagatatttccccttttacttatttaaagtaattaatttccttattttgtctctggatattttggagaaatttttatctccaaatatcgatgatatataccaaatcacaaaaacatctatatatctagagctatatagctaaaaacaatttattgccaaatgatcaaatgaatttcatgtgtcccacttttgttctgcctaaatttagaaatttattgtttttttttctacgcgagcctaactcgttttactcttctgaaatctaaactcttcgaatttaattgaccactccactaaaagagtcttaaaaagtcaaatatttttcttattacgacctaattttgaaagaacttcttcgttgacctatgcatcattctctcgtctataaataccattcacgtcgttcgttactcttcatctaaaaacattcatacacatacaaacacacgaaaatacatcccaattctaaaaaaattgttttttcaatttttctcctttgatttcttaaaagaagatccacaacaacaagaatgaatacattcaagatatcatatttcattatggtgctcataatggtcttagccattgctataacatttagcgagccgctaacggttgaagcaaaacatcaacacaaatatggttgggggatagccgcttctgcaaggaacaaaggtaggaaacatttaggtgcaacattgacatgtgacaaaagctccaaggtatgtcgtctcaaaggcagtccaggtcgtaattgttgtcgtaagaagtgtgtcgatttgaggaccaacaaattgaactgcggaagatgtggaaaaagctgccaatactcggaggtttgctgcaacggatattgtgtaaacccaatgtttgataggagacattgtggaggttgctttaagaagtgcaagaaagggagatcgtgcgcctatgggatgtgcagctatgcttaaagaaaaaatatgggataaaggtcactaaggaaaaataattttaatttattggttgaaattggattacattccctttatattacatacacttcggaattaaaagataatatagctagcttacataacggtctagtacttgttcttaaagatatataggtcttgtaaaagtttgtcatcactattacattgttaaatttatttatatgcacatgtcacatgtaacaatccaatgtattattattgaataaagtttgaattgattagttacattttattttttaataatttataaaataagcaatacaaagctaagttctatagtcctaaaacaattctatttacgatggattttcaagttttattaagggattaatcataatttttcccttaaatatccaacattatcctaatcccatttactctttgatataaaagtgaagatgatctaggagatgtacggatttgagtcatttgacagaagttgactttagtgcctagaagaaagggatgataatgacatttgttaattgccgtctatatagttttcttatatatcatcactcgttttcagtcgttttcaaataaaaagcgcattatgttaaacaagttgaagtatttaccgataaattaaatctgataattggcaccatgttgtatgcgtcggccgataccatgcatgtcaaaatgcagtgtctttgtgtaccgaactcacgaatcatagacttagactagtcactatgtttatatatacaaaaggactaaattatatatactccaaacttgtgagattattaaacaagtacaaactaaaatccaaagtcaaaaccattaatccatcgtcatctcaagctcgtgcacccacgtctatctataaataagcgaagagcgttgatcaaagaagtatttcgataatataagtttcatttcattagtcagcgccatccgtgtgtcccaccttctcatctttcacacatagacacaaaatcatatatacttaataatagatactgatatgtatattctctagcttatatctattgtcgtgtatatatatttgcacacacatagttcaattcaagccttacatcttctagcaaatggcttctcttttcttaacaattatttcacttctctttgcagctttctcttcttctgttgtagaggctgcttacagtaatggttataccattcccaaactattaccaaaccctatcgattcttgctggcgaagaaacccttattgggcgtctaaccgtcgtgcactagccgattgcgcggtagggtttggaaaatctgcggttggggggaaatacgggtcgatctacgtggttacaaacccatcagacgaccctgaaaaccctagacccggaacactgagatacgcagtgatccaatctaaaccattatggatcacatttgcacgtgacatggtcatagtgttgcgtaacgagctcatcatgaacagctacaagacgattgatggaagaggggctaaagtggaaattgcctatggaccatgcataacgatccaacatgtgagccatgtcattatacatgggataagtatccatgattgtaaaccgggtaagtcggggcgggtacggagcagcccgacccatgttggtagccggaaaggatcggacggtgatgcaatagccatttttgattcgtcacatatttggattgatcattgtttcttttctcggtgtcaagatggtttgatcgatgtacttcatgcttctacggctgtcactatttctaataactacttcacgcagcatgataaagtaagtttatattttacatagatgtaacttctacaatagtattttgaatacttgatgataatttggtatgtttttatgaaggtgatgttactcggacataatgacaataatgtggaagataagatcatgagagttacaattgcgttcaaccatttcggaccgggtcttattgagagaatgcctaggtgagtgtacatgcatacatattgatatctagattacttgaactagattagaaaatgctgacatggatatgtgactgatgacgtggcagagtgcgaagaggatatgcgcatgtagcaaacaataggtacgagaaatggcaaatgtatgcgatcggaggaagtgctgatccaaccatttttagtgaaggcaactacttcgttgcttctgatgaccctagcaaaaaacaggtctcttcatttaaaatagttaatattttaataactatcattacaataccacacatcaataatgcaatgaaatcttacatgcatatatatgattctatatatttaggtgacaaaaagaatagatagtggatatgattggaagagatggaaatggagaacgtccaaagacgtttttaagaacggagcttacttcgtgccttctggctacggaaccgtcacgccgttgtacggaagagcagagcggtttccggtgtctcacggctctctcgtccctttgcttacttcatccgccggtcctctccattgctattccggcagaatttgctaactaattaattattattcacgtatatatacatatgtgattatatataatgtttcataaaatgtaacgttttgataattttgtttctttccttggaaacgacgaggcggaattcctgttcctgaggtgtgttttgtgaattattcagtacccgggacggaattcaagttatcttggaggatttatatactttttgttttactttcaagatttgttttgtataaagatttgaagttgaccaatgtgaagagtatagtattttggagaagtttttgtcttggcttatacgaacaattatgtgattcttaatatggatgacggtacagctaccattatgcttgcaaaatttttcttgcttggtgcctaccaaaagattactatccgaccaaaacgaaaaatttactattgtataagaaaacacaaaaaattatacgaaaatctttatctagaacttgtagtatacacaaaatcaaagataaaaggtaaagaacaaaaaaggcaaaagagagcgaaaaaagaagaaaagaagagtgtgagtgtgaccatgcttttaatctttttaaaattatgatttcattggagcttttagaaaattctgttctcattgctttgaactccacaagtgaccggagcattggctctcactttcctcaagtaccaatatactccaccggcaacgccaatcgctcctgccgctgaaactgccgtcactgttcctgttagcgacaaattttccggttcaaatcaggtcacaacttacaagtatatataaagtcatatagtaataagatgaccacaaacttcatgttgtagttatagtaaacttgcttatttacctgcgatagctcctacgcgtttatggtttacgaggcttggatctgcagaatgtatcaaaatgattgaaaatacgtattagtactatctaatagtccctaccaaaaaaaaaactatctaatagtagttaaatagttctcaatagaaattgtagttaggacgaaaagatatgaacatagacattttgacctttgcaataagtagtgacattgccttgtttacaaaggcacaaaaaatctcgtgtcctcgtattaaacccacaaactccaccacctttagtcgtttcttggcaaagaaggcacttcattgtcactggaaattcgtaatcaacccttatcccgtactctggaaactgatcatacggtgcattctccacacctgtactcctccaatacacacttgtatacgtcgcacagtcctgcagcatgagcctaagagattgagtcgctttagggtaatacgaacaacaagaaaccctagatcccaaagcagagccacattcaggcaaatgtctgcatagatagctagaactatcgcaggacgagtcacatctatctggaaacctttcgcagaagagcggttttggttcgacgataactttatcggtgttgcagttgaagaacaagtagtcgttttgaggagagacagtgaagtgtgtacttgaatcgatgctaaaagatctagtgggtcgaaaattgtctcgatcttgacagttccacatgaatggatcggagacaagaaggtgaggatcagagtagcttatagatttaacagggtatttaccagatggtgttctaagttcgagcttggtatcgttgtcggagcaaatgagcatgtgtctgtaataagggctaccacaaccgtcgtcgatggaaaaagggtaatttatcggaatgttgccgcaagaagatctgcagagatttgattgggatgatgttgttgatgattgaagaaggatggtcatgagaagggagaagaagataatgtaagagtgaagtggagacattgttcaaaaattaggagtttagatttgattattgggtagtttttagttatgagattataatttggtggtgtgaagtgttgagtaagcttggaatgtcttgttaaagagtttaagaatcaatcttgtcatgtgcttgttaatattgcttattttaggtttcggtttgtttttaaaatttcacctttctttttagtataaagtattccaagaggactcgtggttttgtttcagattatttgaaatatttacatacaatatgtcaacaaacgtactattcttttttctgatattttacaacaaaatttgttctttaacatgttatctaaaaaccatttaacaaaaaaaataaaatgtatgagaaccttataaaatacaaaatagtaatttcagtatataatagttttgaattttcttttatttagaatttcgtttaaagggttgtgatttgtgaagtaatctttggaagataatctcaatgtaaacaacacattgggcttctcataggcccaatataaacaacacattgatcattatccatgtaaggtgaactctttaatcgaaaccgttcaatttcagtcatctcaatccaacggttagtattccaaggagcacgtaatccactctaaattcgtaaacacgtgatttctcactaaatataaaacttgatacgttacgccttcctatccatccgtcaacgattaaatccaatcgttcaatatagagatccaacggctaataacgaaacattagcccacacgaaatctcctttttttttttgacgggattatacagtgggcctccacctgtaattgtccatttaggagacagcgcggttaatttagcattatccctcctcacagtcatctctttcttcgcaaataaatgtaaccatctctcttctcgttttcttcaacaaaaatcctcatttctctgagaatctggtgctttagctttggtgagctctctttcttatgaaacttatcgattctcttctcgttgattgtcttatacttttagttctctgcttaatttattgtccttaatactcgtggatttgttcataaatcgttttctgagcagttaggtaagagttttgttaccgaatttcatgttcttcgattttgaatctggatgattgtatgatgtgattagtagactcgcttagattttgtgatctgtgtatggtttgtggctaattttggtttcatcggtggtatgaatttatttggggttttaggtttgtttgattacgtaatcggactgtttacttgaagatttatcgattatagttgtgatcgtttttagttgattgagaagaagaaaataaatttcatgctcttgttattgtcgcgattgtggcgattttcagtgtcttatgaatcaattatgttgcatgtgagtcttggtgcaattgagattgtttcctttttttactagattgcttgtcttattgaacaaaactttccatttatgttgaaaaggtttataggaacggatgtttagggttttgttgtaatctgggtatttgctttctgatttcggcaagcaaatgtcgatttcaaggtttatatcactttctctagcaaaagaagtctttagtcatttgcaaagtcaagagagtttttactttatttattgcttccacgctattgcttcgtggctgattgagagagaccaattaaactaataatttgtagtttgtacaatatattgcgtgtaacattgtccttcgttatctgtttgaggaggaggaccgagttagcctatttttagtcactttacaaattttcttttatgttgcatcattcaatatgaactctctgatataaatatatgtatacatactggttgacttttatgggtatggttctctgctttttttctctgtgatggtctcttgattctaactttctttgttttatgtttttggtttttgttgtcaatgaataggtaaaatgaagatatactctagaacggttgctgtttcactcattgtgtcattcctcctgtgtttctctgcctttgctgagcgcaatgacgggaccttcagagttggactgaaaaaactcaagttggattcgaaaaatcggcttgcagcacgcgtcgaatccaagcaagaaaagcccctgagagcttacagacttggagattctggagatgctgatgttgttgtgcttaagaattatctagatgctcagtactatggtgagatcgccattggtactccacctcagaagttcactgtggtttttgacactgggagctctaacctctgggtgccatcatcaaaatgctatttctcagtaagcaacatttggactattgttgttagctgtggttgagatacttttgagtagaaaactaattgtgttctatctcttttgcagcttgcatgtctcttgcatcccaaatacaagtcgtctcgttcaagcacatatgagaagaatggtttgttctctctcttaacttgaaattttttgcagttggatttcccagttggtagatactttacagttcactcaatgtagcctctagaattcatgttaatgtgcagaaaaccattgttaaaagatgcaacatcactactgatagcagctgctaggttataactaacttgctcatctttgatgcaggaaaagctgccgcaattcattacggcactggagcaattgctggtttttttagtaatgatgctgtcacagttggcgatttagttgtcaaggatcaggtaaactatatgtccgaccctaatcagtactcttacaacatacacatcaatgacctccttcttaacatttgtctatctcatcaggagtttatcgaggcaaccaaggagcctggtataacatttgttgtagctaaatttgatggtatccttggtcttggattccaagagatctctgttggaaaagctgctcctgtttggtatgcctgcacattcttctcttgtttggactgagttactacattcctgtagtgttaatgctaatatgtcttgttttttacaggtacaacatgctcaagcaaggccttatcaaggagccggttttttcattttggcttaaccgtaatgcagatgaagaagaaggtggtgaacttgtatttggaggtgttgatccaaatcatttcaagggcaaacatacatatgttcctgtgacacaaaagggctactggcaggtttgtgatacatcacttccttgtctggttttctcataacgttttccagtgacgatctaactcaagctatatatattttgttatagtttgacatgggtgatgttcttattggcggtgcacccactggtatgtgtaacactgattggcgttgttctttataacacatatatatagcttttcctgacaaattcaaaaaggttttgctatttatgtttgctggtgacaactggttctaaagtttgagttactgttatacagggttctgtgaaagtggctgttctgcgatagcagattctggtacatctttgcttgccggtccaacggtaagcaagaattaaaattgcttatagctttatagaattatggttttttaactagtatatgtagtaatatttcaattttttccctgtgtagactataatcaccatgataaaccatgctattggagcagctggagttgttagccagcagtgcaagactgttgtggatcaatacgggcagaccattttggatttacttttgtctgaggttagtgtgcttaatattggactagctaataaaatctgtgacaagtcatatgctgtgcaaattattttggcttaccattcatcccccttgcgccttgcagacccaaccgaagaaaatctgctcgcagattggtctgtgtacttttgatggtacccgtggtgtcaggtaaagttataatctgtagtcattgccattaagctaggatcttcattttggaatgcttgtttgtttttccgtgtgatctgctcatatttagtatgattttgtttataaattatctagtatgggcattgagtcggtggtggacaaggaaaacgccaaattgtctaatggtgttggagatgctgcgtgttctgcatgtgagatggctgttgtgtggatccagagccagttgaggcaaaacatgactcaagagcgcatattgaactacgtcaacgaggtaaccaataagttgtcatttcaagacttttgtgaaacagtagttattgttgtcctgattactgattataaatcgctactgtgggttttcttaacagctatgtgaacgcctccccagcccaatgggagagtctgcagttgactgtgcacaactgtcaacaatgcccactgtttcacttaccattggaggcaaagtatttgatcttgctccagaagaggtatgatagtgaactatttaaagacaacattcatattatgtagtgaatatgaccatctactaatctgttgtactggtatgatgtgagcagtatgttctgaaagttggtgagggacctgtggcacagtgcatcagtggttttattgctcttgacgttgctccacctcgtggacctctctggtaaaccattgaatctattactctgtagcacaatttcttcttgctttctttttctaaccctaagaacggtggtaaaaatgtaacaggatcttgggagatgtgttcatgggcaaataccacaccgtatttgactttggtaacgaacaggtcgggtttgcagaggcagcctaaacacgatcgggttggtgtcgcgtatggttttagtatgaacaatctgcgtctcaagtgttgtttgtatgttttctggagttgaggactttgagtcgtagtagaaatggtggcgcagttccttttaagttgtttcctaacgaaaaaaggcctttgtagttttgaaggcattggctttgtaaataccttctaagtaagttcgatggtgaaaaaactgaaaactttaataaagcctgcctcttttgtttatgcttagtaagttgtatcaaatggttcggtaaaaacggtgtagcataaaaaatttgaaaatggtcaagctcgctttatcttcattttctaaccacataaattcctacgtcaaaaagtcacgatgataatagttatttgtcatatattgaagaacgttcctgcttgaaacatgcattttaagttgatagactgtttgagacccaattttctaaaaccttaataattcgtcaagagcgaggtaaattccccaacacgaagcttgcagcatccttcctgaatttcggaacaagtatctattttgaacaagtctgtgaacttatgagaaattataatgacaacccacttgcagcgactgtatacgtatatggaaggaaataagaaccaattcgagaagtttttgttgcgaaatgaacaagttacaacgagttacagtttcctatagcagaagaattgattaatttctaccttagctaaacacttaaacaagaagcaaacctatacttgttttgtattctctgatctttcccaatcatcttccatgttaacaagatgcgataacaccaaaccacaagctcctgatatcaaactcgaaacatatatattcagacggcagaatcgcaaagaagtttcaagtgttggaataaggtctctcaagtattctttttgctgcttgaacgcgaaagtttcgaatccacagtgtgcaattggtctcgcagcacctggttttcctcaagcaaccggttaaactcaataaggaacccttcagattgcttctgtagagcaaccgcactagttttctcggtacggatttctttagaccttgcctcaagctcagagtccagctgctcttgccttttccgaaggacgtaatttcttccatcaagtttttaacttcatctaaacctctggccttaacaccttccaataatgctccttccttctttataacttccatgttcttccttcttatgcgtagctccctcatgtaatgatgcagcctgtctatcattagcccaaggaatagaaaaccacctggaagaaacacacacaaataaggtttaccaaagcagaagagaaacttccaatgaacaaagaaaccaaactaaaacttggaaagctgattccagtttccaactaacaaaacccttaattcactatagggataactccagagctaaacaatcacactagcaaataaggtttaccaaagcaaaagacaaagttccaacactcgaactgaaacttaaaaagccgacttcaaataacaaatcccttatgggactatatggaaccttccacagccaaattgactgaagtaggttgaatcaaagaatcaaaagcagtgacaaatcgaaaattcaagagctaaaccatcacactaacaacaccaaatacaacttatccacctatattagacacaagttaagatccagcacagtgatgatcacaaacattcaagagattgcaacatccacaagtttctaaaacaatcatagatctcaaaatatgtcactagaaccagtattactaaaacaaattggtaaaaactgagagagagagagagagagagagagagagagagagagagagagagagagagagaagaacgaaatcggatccaaggagcttacccataagagtcgattcaaggagatgcttagccatgataacctcatctgtaggattcactacaccatcttcgatccaacgcttctggatccccatcatattgtacacgctcgtcaccagaagcacaataaccgtcgcagaaaccgtctgaatcaccaccggtccacgaccacgcttggaacgatccaagctcataatcaacagcttcctaatcggcgtcttgaaggaaagcgccattatcacaacaacctcgaagagaacaacagcgaacagtaattgctgcatcgtctttgatctcagaagcgataatgtgatcgtctagggttttgataatttctccgagaaacaaaattcaacagcgaatttgaagaactttcctcgtcggaaaatactaaggaggaaagttgaagtcgtgaggaaattaataagctgtcaaataacattttgctttttaaattttcgtgtatttatcttattggtccctgaggtttaagatggtttcaaattggctcgatattaactaatgtgttaattgtaaccaaaactaattccctcagaaatcaaaaatctgaaaaatgtcacaagcagagaggagatagattaccgaggaagatgatgaagtggtcgatcgttaagagaatccccgtctatggaggttccttcatttctatggtatgaattccaaaaatccagaaccgttttcgtgattcatgttatgctctcgttgttgttttctgattgttactgctcagcgagtttcttctatcaatgtttgattcgatgaagatgcgaaatttcgaaccattgctgttcttctgagtttgatcgttttttagtttcggggctttcacgcttcagctagtgtttgattacgaagttttctgattaaatgtgtgagtttttttgtagtcatctcgaaaactgagaaatccatttttatagatttacattgttcatagttatatgtggaagttgatgattgatggtgattctgcaaattgatgatttggttttctgtttattggcattgcagaaacatatgatgttagttccagctgatttgagctggagctgctcgttctctggtatgcactctttgataaacactggagaagaagacgaggaagaactcttgaagaagatcgttaaccatagtgaaagtggttcaaagatcatcagcaaaatcgattatacgaatcttgttgagaagtttacaagagatggaaatctctctggagcatatgacttgttacagtctttacaagaaaagaacatatgtttgcctatttcggttttcaagaaccttcttgcagcggcgggtgagctgaacgatatgaagctttcttgtagagtcttcagagaggtcttgatcttgccgggtaaggaaccattgagttcagattgttatctcaaccttgctagagcattcattaacacggatgattgcacgtatttgacgagtctgcttaaagagatatcagagtcttcacttccgtataggttaatagtaatgaacagaatcatctttgcatttgctgaaactagacagatcgataaggttcttatgatacttaaggagatgaaagagtgggaatgtaaaccagatgtgatcacatataactcggttttggatatcttgggacgagctggccttgtgaatgagattctgggggttttgtcaacgatgaaggaagattgtagtgtatctgtaaacatcattacttacaacacggtgttaaacgggatgaggaaagcttgtagattcgatatgtgtttggtgatatacaatgaaatggttcaatgtggaattgaaccagatttgctaagttatacagcggtgatagacagtttgggtcgatctgggaacgttaaggaatcgttgaggcttttcgatgagatgaagcagagacagattcgaccatcggtttatgtctaccgagctttaatcgattgtctgaagaagtcaggagattttcagagtgcattgcagctttcagatgagttgaagaacacttcctcattagatttggctggtccacaagattttaagagacatttgaggtcacatagacgctaaaatagcctgtgtaaactcttcagattttgttagatatatgtatgaaatcaaacccaatccgttttactttaattgtggttctaattcaatttaaaagaagcctgagaaaatgacaatgaaggtttgaaaagagtataatggatgatactatgaccagtctcataaagtttgcatactacagaagtacaaaatgtgtcaaagtttctctttgaaagaaagaagatattttgggtgccggaatctgagacttgagtccggtaggggaggtcgacatatgtctggagaagtccgctaaattacgaaaatagccttagattcctccttttttttttaccatagcttgttcttgacccagaaaaggaggaagactacaccgaacacaattgcgactggtgcccattttcggatcaaagcctggtcaaccaaattcaatgtttcataaccatatgttaactatctaagctacaatatgtcaagctcacaaggaatgagagcatctcatagccgtgtgatcaatgttgcaatgtgtaatataaggtaatatacaatcaaactcacctgacggttcaaatctttagccttatcagcatatatacgagattcagatgttaaccggctcgacatctcgctcacctctgcattaagaaaaaacaagaagagaaaatggcaaatgataagcatattgctcagctgattataacaaacgcaaaactagtgttccatttctccttattctaaaagcttaaataatgatcataggagaagtaatggatgttgacttacggtccagcttttcaccaacacctaagacttcttgcacattccgggtcattatttgatgaacctcatagagttcatcattcaacttggcgatgtttcgttgcgtacgagtgtcttggtacagtttcttggttttctgtatgaatgtatctacaaaaaaaggcaaagtggaaaaagagtgaatccagagaggtatgtttccaagatactgaatgtacagaaaaatctacactacacataccaaatttaataaaggcataaggccgagcagctgtttcaatgttaggcccattgacacgttcaaattcattcttgagatcttccaggtattggaaagcgagtttctttgggtaagagcggtcacacattgtcaagtagcaaacacgtccttctatgatgtaactaaagttttctggtcaaggaagcatacatatctggtctttcttaaactttagctttgagatacaagcatactaatatgacaacgtagatttcaaacataatgcaagaggattgaaacgtgtactaagccaaaaactggtaaaaatgtacaaggatgtcaaaagtgtgaatcttaagtaaatcaaagtaaactttctacaatccttattatatctatcaatcaacaaacttttgcagcagaaactgaactaataaggaatgaagaaaaaaccagaggttaaggatactggaaaacataggggccagtttcaacggacattcttgaagcgtcattttgacctctggacagattcttaaacaaagctttgacctgttgtttatacatatctgaatccggtaagtcacgtccatcatcgagcccctcagctagaggtaacccatcagtaacacgagctatcaatgtcattttcaccatctttgccttattacttctccagtaataaaaattcactgcaattatcacaaatttcaaaacaagaatatgaatcctgcaactcactaaaatcacaaaaccaatatttatcatcaagacagaacatgtaagccaggtaattgaaacacagatgcttaaaacttgggttctgtaagaacacacaatactctaagaagatgaattattttgatttttcaacaatgagtgttcgaaatagcttatctctatttgcattcagatattgaacaagacgaactattcaaacgtgagattcaaatatagcagagaacatcaacctcaaagaaaattctataatcaaaagctttcgttttctacattgtgacaattcaccaccatcaaatccaaagtttataacgaatttcagcataatccacattcatcatctacggaaagaaaattaacgatctaataacaacatcaatacaagacatcaaacggaaaaattgattcaagagctacacagtaaagtaatatcttcagaacgttctcaaagttccgatcccaaacggaagcaaatctcatacaaaattgaacaaatgtaaaacgtaaaattagacttgagcatggatttagagaaacctgataggagatttaaaattgcttctgctcgattcaaagatctgagaaccagaggaagacgatgatcgaaggaaagagaagtaatttgttttttttttcaattaaagggtttatcaaacaaagggactaaatgattatttattgattttcttttctttttttgtctgttcgaaatttaatttatggcgatctacgttttgcgattaccaattaccagccctcacgtgattgggcttatgacgcgttttgttgacatgtcttgatgacgtggctcgtttaattagcttcacaaacgctacattcatcttagcgtttttaaaactggattgaaccgatcaaagcgtcttaatgacccggataataccggaacaattttctaaaaccggtgactttcccttttattgaaccgaccggttcatttattaaattgaaactctcttttacatttagagagtaacacattcttctccgacgagaagatcgaaaatcacaaatcgtcaccggactcttgcaatcgagaaccatctgtcgcctttttatactcgaatacgagctcgtgatcaatggcgaaagctttggaatcaaactcgaaatcaaggaaagaaaccatcttgatcaaatacgccatcttctcgcgacttctcgttctcttcttaaccattttgtggcggagcttactccaaccgtacgatacatccgctgcactgaatcctccttgcttgtatcacaaagaagattcttttccgtttctagtagccaatgcagcttcgagatcccttgagaacagtgttgtctgggacagtgtttattttctccgaatcacagagtgtggctatgagtatgagcagacttacgccttcttgcctctgcttcctttcttcatctcgcttctctctcgcacaggttttgtaatttagacatctacccacttgattccttactttggttgtatcattccggtagtaactgattctttttggattcagtttttgcgcctttggttccattgattggtcttcgagctgtgatggtgttgtctggtttcactgttagtaacttggcgttcatatttgctgctatctatctatttaggtacttctttgacattcatcctaaatcgattattgtgtctagaaataagtcaagtcaagagtcttttgagctctacaagctaatgctgtttgctattcaccgtgtcttacaccagtcgttgctaacagggtttcagttattatcttgaaggatactgaagcatcattcagagcttcgattatcttctgtttcaatccggcgtccatattttattcgtcaatgtaatgtgtttaagccaatgatctcttaagttcatttgctgaaagtaaatatgttcagtcttatcagaatggtaactaactgaagaccaaactgtttctttgtgactttcagatattcagaaagtttgtatgctcttttctctattggaggagtgtatcacttgttatctggtaccagcaatgtaggcgttctttggtttgctctctcaggctgtgcaaggtccaatggaattcttaatgctggttatatctgtttccagacaatgcatcgagcatatgaagctttatatcagaaacggcgtgcttatgtaagttatacatatttcattcaaatttcagaactattgctgcaattcaaactccggattttttcggtagtatgcttaatctgaaacattctatttcctacaattaagatccttctagaagatagaaaaggagaactcgaacaatttttagttactttgttctttatatctctatctgatggattcctacttaactgttctgctggtatgctctttagttcatggttgcactggaatagtttcttgatttagtatgtctcaaatcacatctgcttggttaatcatgtaatgattaaagcctgtctctttaacttgctgtcaactctttaaaggtatggtagcctaatgattcttctcgctacccagttagctatgcaggtttttattgctggatttcttagatgcatatgcatttgtcttccttttgtcgcatttcaagcatacggatactataacatctgccatggacatacgcgtgatgaagtgaggccttggtgcaaaggaaggattccgttgctgtataacttcattcaaagtcattattggttaatactttgaacacaaaccttttcttgttcttgtaaattttctttcttatatttgatttagagattcttgtttctgacaggggagtaggtttccttaaatactttcagtttaagcagctcccaaactttctgctcgcatccccaattctctctttagctgtgtgttcgattatgagttacatgaagtctcggcctgagctcttcatatcgctggggtttcaagccaccgagaaagaaaagagatctgctgccagactttattctctgaaggatgcagttgaaccaagtgttaaaacttcaacaaatgaaggtatcagtttcatcgttgttatataatagttccaaaattaaacgttgagtgattctctctgttttcctgagtaggaaaccatgacattaggcagcggaaacctagcagtaagaaggatgtgactgggaccaaagtggctccagaaaaatcaggatacctttcagctgatgttttcccatttatcgtacacttgagttttatggtaaccacggcgttcttcatcatgcatgtccaggttacaatcctcaatggcataaacagaatataatatacataattttagatgagattaaggttttagtgagactgtcctcacgtttgtgttgtggtaattacaggttgcaacaaggttcttgtcagcaagccctccactttactggtttgcatcgtctttgattggatctccaaaacatagtaaatgggggtacttgatatggtcatattgtgcagcctatatccttcttggtactttgctcttctcaaacttttatcccttcacttgattcatggttttctcagtatcattggagtactaatacgtggatataactttcctaaaggcaaaactatcggtttctagtgatgtaaatacagagaaccaactgttttttttttctttttcttttgttctctgctcagtgctcactgtgatctcgtttggcaagacattgatatgttctttgtggtctgtttgtaaaagatttgacattgaggtgactgtttcagtataagtactagttagatcaatgattgtttcagtataagtacttgttttgtttcttcgttatacaagtaacaactacgagacatttgattgggccctagatagagagcatccagcccatgtgtatagaggcacagaaactcatatgtaagagaccagcacgttgtttgataccagtaacttcgaacggcaggatgtttgtaagtgataataatcccacattgcttagcctagaaataatgactgggacacaggagtataaataaagaagtggctggaacgagcaaatcacttacctggacggggtctactcgtgatcaagatgacgagtggcctaggctagtgaccggcctgcactttgtctggggtgcttagcttaaggtcttcccttgaggaagagcctacgtcattatttgtggcagagggggtttgcgttcgcgcagcccctaccattattagtcttaatttttttttatgtaaactatttaattcctaatcttgttatctttcaacatttattatctaaatatcttctcgggaataaatgaatttttgagaacttgagtcgatttgttttaggtaacagagtcccacatcggaagtaagtatcaagttgatgggtattgtgtgactatataagaaagaggctttggttgaagctaaagtatctttgcgcttggggcaatgacgcagctaatgaggtcttaaccgaggcgcgtctattgctggttgaaaactatttccaaaccccctcctaggcctaagcttgtcttgggccttcgagaatttctggaagggttcccttcggggtaaagccctacaattctgtagttcaatatttagtttgcaattatcaaacacttctttttagtaagacataatctgacctcagttatttttagaagaaataccacgatccacatgtatttgcattaaaaagaaacctgttaatgtatacttccctttcgttattattgaatcaaagaacatcggttatgatgatataaactataaatggtatgttctgagacaagaacacaaaaaactcagcgcctgtgaaaagtataatgaacaaaacctcaagtacaagaggaatcacagcaagaattgcaaagagctaaccattaaaaactacttgtgcttgggtttgatgagttcaatgcctcccatgaaaggcctcaggggctcagggatcaccacagatccatcttcttgctggtaattctccagcaaacacaccatcatccttgggacggcacacgcagtcgcgtttagagtgtggacaaacttagtggctggaagattcgctttccctttcttaggacccgtctgaggcggttcagatgggcggtaacggattcccagtcttcgactttggtaatctgtgcagtttgatgcgcttgatatctaattcagaagttaaagcagcaagctcaaagtagaaactaggattccattctggtggtccgacacaaatgaatagagtttgttttttacctcgccaaatcgtcctaaaccgggcatccatgcttcaatgtcaaacttgcgatatgctggagcgcctaaatcggctgtggccatatccaatgttctgcaaagataaagtttaagtgaaaaaaaaaaatctctggtaagaggaaatcgggtttaaaagttagtttcttacttaaagtgtaatcctagagaagtgaataaatcttcttcgatctgaatgagttcttggtggaaggattcactatcttcaggttggcatatgacgaacatctctgctttgctgaactgatgaactcggtaaagacctctgctcgaaatcgagaaagtaggatgttgagtaaaacctgtgtataaattgaagaagccaaaaacatgcagatgctacaaggagtaaaccctttcgtcaaacttactttgtggcagcgccagcagcacccgcttcagtacggaagcaatgagagaatgctatatatttcaaaggcaatgctgattcaagaagaatagaatccatgtgtattcctcctacgggaatttcagcggtaccaatgagacattggtcagttccatctatcgaatagacctattcagaagaatggaagcatgattggcaacaaacaaaaaacgttgacttatcaaacagagcaaacacactagtattgcagaaacctgagtattatccccacgaggttggaaaccgcatttctcaacaatagaagatctcacgatttcaggagtcgttaggggggtataacccttcttcatgacttgtgataatgtccaattaagaagagccatctccaatagaactgcctcattcttcagatagaaaaactttgaaccacttacctgcatgagtgtaaataacaaggaagttacttcaacttatctccttgattaaatataccggaaaaccaaaatatttggtcatcaatctaatactttactgaaggaggtgatcgttcacctactcaagtgaactctacaatatgaagtaatcaaatgttcagtctaaatacaactgcactaaaaaaaagaaaaccagcagctacgcaagatgccaaatctgatccaacaacctacaaactgtgctttggtgcctatgaaataagacaaagtgtatacctcagcagcagagtcaaaatcaatgagatcaagatccttcccaagctgaagatgatcctttattggaaaactaaactcacgtggactaccaacctacataagaaaattatgaatgttttaagaaagacctttgacagcaaaatgccttcgtcaacgcaagagttgagggagttctgacaaaagtaacttacctcctgtctaattgccgatgaatcctctcctccaacaggaacatcagggtgagtcatattcggtatagactgtgctacatgttggagctcatctttaagcttcacgaggtcttcttccagagtaacaagactttccttaagatttttacctgaaggcaaaaacgctctatgatatctcagtacagaacacagactaacaaacaaaatggatattcctcatttaccttcttctacgagtctctcacgttctgatggctccagcttccctttcatctttttggcaacgttgtttctttcctcacgaagcctctcaacttcctgctatctgcaatcattgattagctgaaccgagagaaaagaaaaacaatttaatccaatctctcaaatctagccagagactagaaactaatactaagtaaactatccataaactaagaaaacaagaagctttttgcaactttaacatttcttttgagttcttcttcctcaaagtagctgacttcacatattttctactactaagaatcccaaattcgaagagagtagaagattaggtaaccttttggagattgaccatgttctcataaagctggagcacagcttccaaattagcattcgaattcctgttcctgatgttgatttcgactgcttccttattgtcccttatccatttgaaatcaatcgctgccttccacagaggccttgctgctactaaaaaggaacgaatcagctttgcattcaaaagcaatgccacgaggtaagagagggtaaactggaataccagaggaatcggaggtctgtgtggccggaatatcttgtacggcggcggaagcggagaaagctctgacaaggagaggcttattacggggttgaagatggcgggaaaacaaacctagggtaagagtattggtaaatggcttgaggaagaggcgagaggagaaggttacaggaaccgccgctgcgagtctcaatttgtgtaaacccatcgccggagcttctctgctgacgaagaagacacgacgacgacgacgatttagttttatcttctgctgttttgcggattgctatttaaacgttgtcgtttggatctgttaactggtttgacttgccacgtgtttctttatgattcagtgttgacatctctcctcaataaaaacgacaacgttttgcgtatgtatgaagtgaactatgaagtatgataattctatcttatgttgttgaaacttttacaaggaagaagaataagaggaagacgaaagttaatccaattctgcattattacaacttatgaacaacgtcaagggccttcgtcttcttatcattcttcttccacttcctcttcctcttgttcttgttcacatacttatatatacatatgagagacatattctaatttctaacacacatccttcacgttcaggactggacatccacgggtgatccacaatcgagacacattaaaaccatgggctctgatactattacatgtgttaaatttatttcaataaaaatgaaataagcaatgccctcttggcaaaatatcgtacatttttcaggccaaaacagaacagaagaaaaacacaagtcatttaacagaagcaagagacaaagtcatggacgaaggagacacacatttcatgttggtttgtagtatttggtggccacgaatggcatcttcgtgatgctgccttcatatggtttcccacggaccaagatcttgactttagtcccagtcttgtgctgacctgacttcacatatcccatggctatgttcttcttcaggttcgggctaaaccctccacttgtgatctctccaatcttgttcccactctcatcatgaacctcgctatgcgaccttgcgggtggtcctgaggagaagaaaccgacccttctgattgtaggtccatctttaagctgctggagaatcacatccgcgccaagaaatccaccttcggctcttctacgcttccctatggcccatgtgagcccagcttcaacaggagaaatgtgttgctccatgtcgtttccatatagacaaagtcctgcttctaacctgagactgtctcttgctcctagacccgtaagccttaccttaccctcggacttctccaagattgcttttgctagatccacagcatgctcatctggaaccgaaatctcaaacccatcttccccggtatacctgaaaaaccaaaacagagacattcattacctatgagatcttcagaacttttcctcttgagctattgtctacttgaaccaagcaaatctgactagaagcagatagtgaaacatgaaattttacccagtcctggtaaggaaacatgtggaaccattaatgtccagaatctggaaattgccaaagtaaagcttgctcaagtcttctttagtcaggtgttgaagcactggagcagccaaaggaccctgcatcacaaggttcaagataactcatgaactgtatatacaagtattcagcaataacagaacaaaccaagagaagaatcttataatggccaaacctgaagggcaagaagagatctctcgtcgtggatatgccacgagacatcacctcctttggatttgaaagccttcatgtgttcttcaatgtgagccaaatccttatccctacagccagcattgaccaccaaatagatatgttcatctgtcactttggtaatcaccgagtcatcaatggcacctcctttctcgtttgtgaacacagttaagctcccagttccaggagccaaaccagccacatcagcaaccacaagtgtctcaagaaaaggaacacaatctttacccttaaggctcaaaccacacatatgtgcaacatcaaacaaactcccattttccctgcagttaaccgttgagtccataatcgaatctttgtactgaattggcatactccaaccagcaaaaggaaccatctttcctccatgggcaacatggaagtcgtaaagagcagtctttttcaggtcagcttcagaggcaaagtagcgacgtgacacaaccttcttgtcagattgagcaagacgacgggttattgattgccctagctgccatagactcccacctctcatcttctacacaacaagtttgatacaagaacactcaaaatcaataaccaaaaatgcatcttttcaaattcaactggattcgataaactcttaagctatggaatgaagaaaggagattcatataaaggctctataggcaaaaagatagcatttttaaatctatgaatcttcaaccatcagattaagattcataatatagcatctgaaacaatcagaaaacttaataatcgcaatgagatcgaatcgaaaatcgtattatcagaaagaagaagaaaacaaatgttgtctgcaatcgaaataatctgtgaatagaaaacataaaaactgaaatgggttgtgtagaaatcttacaaatgttgagtctttgccactggagcttcttcccagattcctcaaactactatgtagtagtaagtgtgtgttatattgcaaattaattgatgattttgttgctatcaatggcaaaagggactttatatatttatatttaggtaggattaatgagatttaaaaatagagatttgtgaattaaaaaagtgaagaaagagatggggttggtgatggaagaggaatcatcatcagccaaacgaagaaaaggccaaagcaaccgcatccccattgagtggtaagtaattgttcaatctttatcttcttatttttcaaaattttataaaaatctaaataaacttttaggtattgtagatcaccaaaaatgaaaaaggaacatttgcttcatcaaatgttggagttgtagacatttttatccatttattattccaaaaaaaaagaatacagtacattgacttaaatttgaaacaggattcaaaataacatttcctttgtcacggtttgattcttaagttatcaagtattcaagaaatatatttaaaatcaactactatgggtaatgaagctgctttaaaacttgttgtttgcttatatgtgacttaacattgtatgttcattgtgatcttctgttctatgcaaccatcaataacgtgaatgtgatcatcggcatttcgaacactttccttctgaatccttctatcttctctctcgctctatcgaaaaccagaacggctcattgccctctctgttttttttcttttgggtaataccgggccggggaagatgggtttgagatttcaccaggcccattaaaacgaaccccttcaatagattttgtcattgtcttttaacaacctctagccacaagtagtttccctttctcacttgtagttttgtttgggtaattttgaccccttatgcattttttgttccaagcagatgtcgaaatggtttcctgtgaaccctcagttttatatatctgataacgttgtgatttctaatctctagaatcatggggtttcgtttcccactttccctaataagatctaaaaccttgtagagaaaaaaaaaaggctactaacggaagacgtgaacaagaacaaacacaagaggaagaggaagaagaataattagtatagtggtactttttatacaaggctagaccggatctgatcttcatatctaggtctcatggatgtataaaaatatgatttgggtttgggaccaaaaataatggtattgtgttttagtcgcggttaatttgatcttattaattaccttaaccatcacggcatctccattcactaacctagttgtaggaataactatatacatagtaaatttaaatgtgtgcctcttgcaaaaatatttatgatcatatgtcatgacagtaaagatgaaaccactggactaaaatcacatgtttaagaatgtaagcatagcattgtttatatatgaggaggggtcatgatcacaatccatatatagttctttttctcttcctacttcggatagaatataagcttgttttgttatatgctacttcttccaatcgtttttcggcgttataactacacttgttcaaaacaaattaaaaatacattttgtttagcgatatataaacaagaaaaaagaaagtaatgctatatagtgaataaaagagaaacgttccacacttgcacttaagaatatcagaaccggcgttacacataatacgattacgagcattacctctagtagcaagacctttttggttcaaatattgaagtttaaattaaagctgaagaaatccgaaattcaaaccctctagattttattaagagaatgaaagtaacttaattaattagtaataagctgagaatcagctctcacacgcacacttgtcaatacgttcaaggaaggccaccgagtccgccaccggctcctcccccaaagccgcctccaccgaggagtccaccgccaccacctccgagtccaccaccgcctccacctaaccctagtccggctcccgcgccgatcccagccccaatcccaagcccaccaagaccagctcctccaccaaggccaagccctaagccatcaccgctgccaccgcctccgaggaaagatttttcatccttgaattgggtatcttcggagataagtttcctagcaccgacattggcacaaacaagtgcaatgagaaggagcacaagcaagttagtgaatgtgcctttcatgttttgctttgttggttcaaattctttttgtttatggtgaatccctgagctgtgttacaagaccatatatataggctgttatgtatacacacacatacgtaatgtaagtgtgcaataaatgcagataaaactttggatataggaccttgagtacaatgtagctaaatataaattagtcttactaacatattagtgttagtctcttttcaaagagtacaatgtcaaacgatatgtatttgtatttctatgtcaaacgatatgtatttgtatacaaagagattaaacatagcatcaatcaactctcgtacattaattagtgttagtctcttttcaatgtgcatgtgagattcctaacaaccttaaaacatgggatgtgatacacaaaacttacattcttaaacatatttttgttggttttatacattcttaaattttagtcatcttattatcataactatttttgcaagaggcgggacacatatatttaaattaaattcacgtgcatatattcacatattaccggattatattcagtatagacacttacacatatatagttacacaaaagtattaattcctatggagatgccgtgatagttaggtaaatgagcataaaaagacagacaacccaaccgataaaattaattggggagccaagagaaataccactatatactactttaatttggtcccaaccccaaaacatatttatatacatcgatcgcatgatccttgagacctatacatgaagatcagatccggtctagcctaagcaaacagcttgactttaagttaaatcgattctttcttcttctttttctaaaatcgattctatttaatgcactcatataactgatcgaacttctgcagcgtcggttttaatcagcatgcagaaagaaagagaagggtttagaaattttagattcggttacgtagtggatatggctctagctatatggaatgtatattataaatggctttccaatgatatagttgtagtgtaaagtaggtggatccattaccattaatacagccaactaatttgatctcccttttatttgcggttgtggctgagttttcatgtgactacatgtattgaagatgtagacttatagtagttagattgaatactaaagctattgtatacaatatctgattttactccatcatggtataactattaaccaacataaatttagttttgataaacgtatataaacacaagttctctttctctcctctctgtttctccaattgtcttggatggatctaatgctatttttggagagtaattgctacaatatactaggtttctatatctgaaccaacacaatcaaaattggtccgcaaattccgggaagaaaaaaagcagagctaaagataaaccgatttaaaccgtctctttttccaagaagagccatatgatccgtctcaaatctagtaaaccgatttggtacgaaaatattacattcaataaaccgtccataaccgcaaacaccaaaacctcaaggtggtggaaatatttttattcaggtccatatagactagagttttaacttttaagctcaaagacaaaagaaacgagcacacacacatagcacgacacaaactaaaccacatcttcttattttagatcaaactctaagtcttccttttattttatgatcacatttttattattatggttttgtgatctcgaccttcattcatcgctcttctcattccagttccttgagaaaatctttgttgtccaccaaaacctgtcattataacaaccaaaccttttaaacaaatcccaacactagaaacggataccaaatcattagatctgtatcgattactaaccgttttccagccatctggatcaaggaatgagacaatcttggtgccgagtccaggaagaggtccggcttctctagtgatctttcctcctagctcttggttgactatcttaataacttcaccgcttttgtacacatcatctgtgcctattgcaatctgtttgttatatttaaccatttgattatcagaggaatgaacacagaaactggtttaaagctaacagaaagcaactgagacatgtctaatcccagacctgtgcatatgcattgccctttgtgtactcagtcacgtcgtagttataggtcagctccaaaactatcgactcgtattcttcagcataccccatcatgcctatggtgtactgtttcatccaacaacaaataaaaacataaataagtcccagcgtagctctaaaaaactaaattatatgtctacattgcatcactgattacttcaccttgtactcaggtctctcaatctttctcaagagtctcatcccgagggcctgcgaggaatttagaaatgatgtaaacactatagtaatgaatatttaaacattaagacaatcatttcactgcattaccttttcatagaatttgatggcacggtcgagatcaccaacacgaagcatgacttggcagaaaggttcaggagttggacctctctggatgagctcaaaagtgtagccatcagggtccttcacaaacgcaatgacactgcctccacctttgactggaccaggttccctagtcacatttccacccttggcacggacgttctcaaccagtttggaaacctacaaaaaaaaaaagccgtgtatctcttcgttaaggatcacatgcatattttgattcttgatacctaaagctcaaagtaataggacttacatcttgagttgaaatggcaaaatgcccaaagccagttccaatatcatatgagctaacaccatagtctgcgaaacacaaaacattagaacaaagtagttaacttgtgaaaaagcgtataacaggagagggcgagtagagtgcatactatatgtgagctccacaacaaagttagatgtttcaggtccaaaaccaagaaaagcattagaatacttctcctcagggatatctcttttcctcaacagcttcataccaaagacctcagtgtaaaacctggtgagacaaataaagaatatcttaaaatgtaaaataactcctgttacagaaagataaagaataaggtattaatgaaaaagaaaaagacatactcaatggtgcgatcaagatcaccaacgcggtagacaacatggagaaaacgacggttatccttcttaggccattccaacaaatcagaagcctcagccatgtttctagaaagaagaaaacttgattcagctgctctcattgaaacaaaatgtacattacaaatcgagataaaacattgacacagcctcaacatagaggcggaagcaatctcattcatttcccctataaacttgctctctcctgataaatttaacgaacaccatcaactctagatttacatttaccaggattcttataaaacatcactaatctcaacttcataagcattttcaacccaaaaaggtctcaactttaacatacccaaaatcatgatgcaccaaatatgaatcttattataagttcgccgctattatataatcgcaaaacgatcaacaagaacgaacggaattgtgatttctcaatgatcatcacaacacaaagaacaattacattctataaaaatcccactaaattatcgatccacgaatcctgtcctaaattagatccggaaaacaccggatcgctagaataaaattccactattgaatcgagaaaaaatgattaagaatcacaaaatctagaacatgatcaacgaaatgtttagaacttgatcatatctgcaacagtaaacacacctgggaagaagatgtacggtacaaaaaagctaaaccactctcgagtaggtgagtaatccagtcattgttggcacaatcgtcgtcacttaaataggagtttgtagaaactttgccgacaatgtctttgctactgcctgtgacatagttagatcatcacagacgcgttacaaccgatggatgagtgtattattgtgaaaatatggtgaacgaccgttacggttataatctaacagccgtgtcatgggatgacacgtggcggcgtgaaacaggtgttaaaaacatgcttctgtaaaccgtctgtttacagtgtgcgacacagactcgagcatagagaaagaatctcattcaagtagaatcgtgtttcatgtgattttggaaaggcattagccaaggcccacacaaaattgtgaaattagaatttagcgagggagtgaagcccatcagtccgtgaaatgggatctcagcccatttagaaaatattttatttcttttgtttatatatattttctggtgttttgtatgaaatttggacgatgtcttattcacgacacatcataagctttctttatcgacatgtttggttttgaaatggaatcattttcttcattcttctttttggcactaccataaaaagaaggctttttatgcattaaattttaaaagtaaaaacgataaaattggcttcacattgaatcttttgaagccatgcgtagtgtataccgagactacattatgaaaacgacacacctcttagcaatgcggtaacggattgtaaattttaaaatcaaaccctttgtataatttcaatatatataactgtagatttaataattcctataaacagacgaaaaagtgtcacggttcattgttattttgttttccgtaatgaaaatctgtttattttatttatataaaggagataactaaattgtttcaggagattggcatatactatagcatataattcagtgtgatttcatgattcaaagagtgtttgtttattgacatacatacatacagaaagctttcctctttttcagagtttgtttctttgtttgtttaatctgttatcttatgttacatatggatctctatgttagtatgtttgttgggttgctgtatttttttttttttgtcctctctttcttctcttgctcgactagaaagaagtctacaactttacaaaagagactatgtaaaagtgatacaaaaagagaaaatgtattcattttgtctaacataatttctttgtatataagttccctttaaacagtttagtcggtgcaaaaagattcaggctaacaatattacttgttacgttttcttgagacatctatttttattttttttcttgtattgtttgagatgagaaaaagtgttatcaacaaataaataaaatgggccattgtcttcttgctgttcagcggaagcatgggttatattgtaattctctgtttgtcaacttgtaattcaatgtgtttgatagatatatttcaatgaccggaaaataaatacatagagaaaacacctacataatataatagtataattcaactaaaggccattgttatatgctttcaattgtccacttttattacatgtggtcaacaccaacatcccatttccaacccaatatacaaaaccaaaataataataaagaataatattttttattttattttatcttaattgtttgaagaactattattttagacagagtctttttgtgtacaagcaattcaactttatttaatttggttttttacaaaatttatggatgaaagaaaatattccaaatggaccaaatctattaaagattacatagtgatgcctagctggtgcttttatcggaattcaagggcattacggtaaaatatcacatatggtctgaaaaaaaaacagtttgtgtggggaggagcgagcagagtcggttcacgtgaaagcacagagacataaatctttctttcacagcctaaaacccctaaaaatgtctaatctctcttcttcttctccgtttctctttagattatctcaaccatacagccataaatccatcggaagaggaggaagataatgcaagaatcagtcgctgagtctgaatctgaaggggaagagttgcacaataagctcaagctcctcttcaatggctttcactagcatggtttccaccgttcctgttctcttcttcttcttcactcttcttttgatttctggtaagttcaccaaacaattccacttttcagttcaaattcccccaaattgacgaattttacatatttcaaataaaaaattgtttttttggtctccttttgagttaacacttggctaaatattacttcttttgtttcgaatccaaatctagacaaaacccatttagtgaattcttaaaccttagttagaaatcattgccaagtttcgatttttaactagctttctatgtgcagcgaattcgtcgtctttatctcacaacattaaggttcaggaacaagacaaagatcccttcgttggtttcaacatcggcacagatgtctctaatcttctctcgccgacggaattagtcaaatttctccaagctcagaaagtaaatcacgtccgattatacgatgctgatccagaattgctcaaagcattagctaaaaccaaggtacgagtcataatcagtgtaccaaacaatcagcttctcgctattggatcatccaacagtactgctgcgtcatggattggtagaaatgttgttgcttattaccctgaaacattaatcacagccatttctgttggagatgaggttttaacaactgtgccttcttcagctcctttgcttttacctgctattgagtctttatacaatgctcttgttgcttctaatctccacactcaaatcaaggtctctacgcctcacgcagcttccatcatgctcgatactttcccgccttctcaagcttactttaaccagacttggcattcgattatggttcctctgcttcagttcttgtcgaaaacaggttctcctttgatgatgaatctgtatccttactatgtttatatgcagaacaaaggtgtggttccgctcgataactgtttgtttgagccattgacaccgtctaaagaaatggtggatccgaacactttgttgcattacacgaatgttcttgatgctatggttgatgctgcttatgtctcgatgaaaaacttaaatgtgtctgatgtggctgtgcttgtgactgagagtggctggccttcgaaaggtgactcgaaagagccttatgctactatcgacaatgctgatacgtacaactcgaatttgatcaagcatgtgtttgatagaactggtactcctttgcaccctgagatgacttcaagtgtctacatttatgagttgtttaatgaggatttgagggctcctccggttagtgaagctagttgggggttattctatgggaactctacaccggtttatttgcttcatgtatctggaagtggaacgttcttagcgaatgatacaacaaaccagacttactgcattgctatggatggtgtggatgcgaagacgcttcaagctgcattggattgggcttgtggacctgggagatctaactgtagtgagattcaacctggggagagttgttaccagccgaataatgtgaagggacatgcttcgtttgcttttaatagttattaccagaaggaaggaagagcttctggttcatgtgacttcaaaggtgtggctatgatcactactactgacccaagtaagctctttttttcttcttctttttctcttgttatggtttatagtttgaagatctagagtaaaagacttatgaaaatcaacaaacaccatctgagtctgttagtttttagatcctaagttgggagagtctataggagctttaacaagaaaatatttatcaagatcatatacttgttgtgtaaatgatctcgagttccttaaaagttcgaaattgtgagttaactggatacattacatagttctttatccttttccatttatttcgttataaaatctattaaatgaggagatgcgtatgtttcaggtcatggaagctgcattttcccgggaaggtattgcaagttcttgcattgaactcccttctggaaactcttttatctatatgtttagacgagataaagtcttcattcttttaattggtactcttacctcattttgtgcagcaagaaggtcggaaataggacacagacagtggtgaattc

SEQ ID NO: 37 - DNA, 99758 bp, Arabidopsis thaliana
gaattctttttgatgttgatgaaagatcattattaaagaaatacattttataatttagtcctttttagcagaatttgagttagaattctttttgatgttgatgaaggattattgttcttggaagaatgaataattcgaagaagtgaaatccgtttttcaagggataaaattgattgattgagttttggagtcttggtatttgacactctctttcttttgtcgttacaatatcttctttttctcgacccaccatttactctgtctttcaaaatctatcaaatcatacttttgattagttactatactatagtcatttataccaacatagttcatacaaaaaagcaacacttaacaagaaagaaaaaatataaggggattaaaaatagagtggtgaagcaacgactccaactctcccattgattagaatacatccttttccatctttacggatttataaagattttggttatttatagatacaaattaacagtataaaaacagttatcattttttctttagaaaataaataattttttataatatggtccatgttttcattaaaaattatttgataaaaatatggttatattacagttttactaatatatttctatctacatataaaatttagataaaatttgatttctttgctgagtttgtttggttgaactaaagtcatgttaagtttgattcgtttggttgtgagatatgtagattgagtacggtttgactataaataattggttcatttcttgctttcacttaattgattaggttggatatataattcacatgtccaaccctaatcgaaaccgaagtatttcaagttgatattatgatagatacactaaaattatctcagaacacgagctatcgtaataatttactttgtgacatcggaaatcacaaagacatttgcataggactgagctggaaaccaaaagtctttagttcccaaaattatgaagaatttctcaaatttttaatagaaaatagataagttcaccaatgaactcttttgttgtttttaccatatagtaataactatacttaacaattattatagtatatattaactcaacctacccccccagacaaaatcttatatcaaccatggatactgttagtttggtaataaaagatcttgcctatggtttcacatagagttgtaacatttcaacattagacaaaatgttatcagtttaagttcatattatgactatgcacattttaaattaaaacattttagtttgcttgtaaaattacagaattaacgcaggggttttaattgctgcttattgtctcattcagtcatttgccgaccaaccaacataaatctcaatataatgagttcatgacgtcatggtcatggtagatggttttataataatacctaaaaaatctcaaatgatggtagtaattaaacacatatgacgcaaacgcagccattacaacgctatttcaaaacttatttaaacaattagtaatacttaccaaagcttttgaaagatactccagtaaacttgtcaaattcttatattgttctaatagactttataataaaacgtaagcatcgggcgatatggcatgattatttcatgacagaagaaataaataattttaacaaaaaaaaagacagaagcaataaataaaaaacaagcttctgatacatgaaatacatatatgtctcatacatacgtttagacaaacctgaaatgtcctcttcgtacaataatatccacaagtgtcagatttacactgaagtgttgctatgcatatcttttgttccatacttttcttacaaaatcatttattttcttctcgatatcaccgattggtgtatgttgtaatcatacattaacattaacaaacaaagatactttttcaaggattattctaattggcagttttagaaataatggaattatcctttactaatcatacagaaataatgtaaatatgtttagcatgtgtgaaatgactgttggtcgatttttaactttaataaataaaaaagcaataagaacgtggttttatttcgccactcccacttgcatcgtcatcatcaaagaaaaacactaatgtctagaccaaagatttaaaacatctaccccatatatatatgatgaacaagatagcaagtaaatttaaatgtaaaattaaattttagtttgctaagattaatatacaaaagaagtattatcaatttatcagttattaatcaaatcaagttttaagtgcaactcaaaagtttccatgcttatatagttatttgtatactactatactgtatgtgcaagaaaagcatttatactcttcgccatatatttcaaacttcacaaaatttaattaaatttttataccatttatgtacctataaatagatagaagaagctccatctctttcaaactatcaaccaccaaaatctttcacattacaccttccttttgtcctcaaaccaaaaccctagaaaccaaaaatggaaaaagccttgagaaacttcaccgaatctacccactcaccagaccctaatcctctcacaaaattcttcactgaacctacagcctcacctgttagccgcaaccgcaaactgtcttcaaaagataccactgtaaccatcgccggagctggcagcagcacgacgaggtaccgcggcgtacgccggaggccgtggggacgatacgcggcggagatacgtgacccaatgtcgaaggagagacgttggctcggaacatttgacacggcggaacaagccgcttgtgcttacgactctgcggctcgtgcctttcgtggagcaaaggctcgtactaattttacttatccgacagctgtcattatgcctgaaccaaggttttctttttccaacaagaaatcttcgccgtctgctcgttgtcctcttccttctctaccgttagattcctctacccaaaacttttacggtgcaccggcagcgcagaggatctataatacacagtctatcttcttacgcgacgcctcgtgttcctctcgtaaaacgactccgtataataactctttcaacggctcatcatcttcttactcagcatcgaaaacggcatgcgtttcttattccgaaaacgaaaacaacgagtcgtttttcccggaagaatcttctgatactggtctattacaagaggtcgttcaagagttcttgaagaaaaatcgcggcgttcctccttctccaccaacaccaccgccggtgactagccatcatgacaactctggttatttctctaatctcactatatactctgaaaatatggttcaagagactaaggagactttgtcgtcgaaactagatcgctacgggaattttcaagctaatgacgacggcgtaagagccgtcgcagacggtggtttatcgttgggatcaaacgagtgggggtatcaagaaatgttgatgtacggaactcagttaggctgtacttgccgaagatcgtggggatagctagatattcatcatgattatgttttgagttttggtactatcgacttagtttaaagttgctacctttcccaatgttggatattaactaaattatgttttaagttgaatttgctaataggatttcataattataatcaagtttataatatattttcgtagctaattaaagtttatatccacgtattctgacacattacgcgcttaatgatttaagttgtatcataatttataatcacatggtggaacttgttaagaagttacgtaactcttaaacagctttaagcctctaacatagtcgtaatagcaagaaataatatatatgatgagagatgagtaaaataggaaaattcctttgttcagcaatgttggtatcgacctattaaaagtgaatctgcagatgaaaaagtgatatccttacatttatttgtttgtagtctgaaaagtggactaacgttcgtacaaaaggcagtgtttgtctctgtcttctccaacttttcgtgctctcttcattctatcaccaaaggaaaagctgaactactaaataacaaaggtcaagaactttaatattgattgatgtcaaaaaaattagtaataagtactgattttttcacatgttgattaataagtactgaatttgcagaaataaactaaaatatatgctttgaccaaaaaaaaaaaactaaaatatatgctttttcaaaaaaactaaaactaaaatatatgcagaatgagtttaattcattgcgaatatatgatgaaatacaaaaaaaaaattgcgtttttttttgtatcaactgtacccactactcatgttcgcaattccgtatgtttcgtggttattgcgttgatgtaacatgtatatccgtcgatgaaattagtagtatacgaaaattgaaaaccacaaaaatggtaccaaagaaaatgaacacgtacgcacacactaatcatatgtttgtaatttaatctactgtctcatataagtagacaacttagatattcctgttggatgctaactttagaaatctcaacgaattaaagtgaaatcataataggggatacattattaacagggtgaatgtcaaattgtttcaagatgaaggctcaaggctaggggtttaggggtatttgtagtcttgtagaaacataaagttaatattcattaggcaattgtcaaaaccatattgttccttttctattttttgatatatataccttgtaaaaatattccacatcaaaaatccgattcgctcaaaaaaaactctgatcgtatgattctagttaaataaataaatggatgaaagcatctattgcattgtcaatttcaacacagcgaaagcacggaacttcaattgttgaactctattcgaactccaagcttagtaatagcaaaatttctctccatacagtagtagacatgggcgcaaaaagttaggcccagtttttaatcaggcccattatgagatttacatctgagaagtggaaagtttgtattcttggtttatgtacttcacttgaattgctcttttccacaactccacacattattatctacgtctgctaattgctgtgacataactttattatcatctatgatcctgaatatttagtggttgattactacagagtattgttgttaaactcgatgtatgaaagtgcagtgcatttcttaacaaaatttaagtttaccttgtatttcttctcttctttaatcttcccaaaatatacttttgtgaatggtgatttaaaagcttttgagaccactcaaatgataaagtggggcttgtgacgtttcagacattgaaaacctcataatatattagtgggagaccttaaaaaatcaagtcaacgccgactaatccaacacagcgtcacacgttaacgtatgcaatacaacattaggatatttttatcacgcatcgttgtttactttatgttatgtaaaaaatgttagaaatcaaatcgaattacaaaacgtgtagtttatcttttctcaaaaagcctccaagtcgtcgttttcatgtacacacacatactccactcgttctcataattccgatcaaaatattatcatcattcatccatacgtataacccaataatttattcttattgaaattgaaaaatcaaattttccttaccgggtgatatcttacatttaactatttaagcaatcataaacagagaaagaaactaacatactcaattcactatcaagagtggaaaaaatcgtacaagtagacaaacacttatcttatttgtccaagtaagagttttatatctcaatcataagtaaacggccttatagtcaatgtatctcgccgacctatccaacacaagtcacgatgatgatccactggcttttgtttaaaagatttacaatcattgaatcattttgtctcattaaaattaaataatttgataaggattgttgatacattgttacacatgaaatgatgctctgtatcctaaacattttaatcatagtaataattccctagaagaaagaagaatatgattctttccgttgaccttttaaggatgtctaaatgggccatgatgagtgttaaaagtaagcccaattacaaaggagatattttagatgaccacgtgtcacaagcttagtaatgaagtcatttacacgacacaaataaaacagaggcgttgagtcaggtccgagagactcgtggtggggcccgagtaaaccgttatgctgcttcttaaatgactatattatccctaaacgctgcttccttagagtggagtaagataagggtaaatacgtaaatttaagagaatgcagagaaattgatgattttattaagaatttgtgaaattggccctctcttttcttaatcgcgtagtgccacccatttccagagaggacacagccttttctttcttcctctttctctcttactcattcgtttttttttccttcttctgattcaaatttatttgtttcttctctctgaaaacgtttttttttttgtttgctcttctttttggtagtttctgtttttgttaagctgagtttgaggagtgtgagtgatttgaattttgtctgattttccgggataaaagagcgtcgtcggagataggcgacggatattttggacttatcgtcgccgaaaagaagcgagtttttgaatttgaaaaggtggttggcattttggtaatcggtggatctgagtttgggatgtggtggatgatgggagaagctggtgggcattactgttctaagaagactgatgatatctgcggcggtgtttgtagtcaggtttgttcctccgatctgcctttttgtgtgcttttgttctgtgtcttagaagataacgaagaaactacattcatgtgcaaaaacgagatcttacttcatctcctcttaaattgaaaaactttcactcgaatttgataatttaagatcgacccatttattcgattgcacgcatgaacttgcatttgttgttagcaccactgttcaccgattcttaattctccaattctaaagctttaatctctttttcttcagtttttaagacttggatctgagtttagatttttttagttcagatttgagaatttctcattcaaatcgttcaaaggttacttttttttagctctgcatctgttgtgttaatgttctcatgtttaacatattgtttattctctatctggcaggaacctggaagattcttcagcttttctagactttgttgtgctcttcgtggtgttgatatgaagacttatatcttcttattagtgattgttcccacatgtgtactcgctggctatgtccacggtcagaagatttcttactttctccggcctttatgggaatcaccacctaaaccttttcatgacattcctcattactaccacgagaacgcttctatggagactctttgtaaactccatggctggggtgttcgagactaccctagacgagtttatgatgcggttttgttcagtaacgagcttgatatcctcgctgttcgttggagagaattgtttccttacatcactcagtttgtcctccttgaatcaaacacgacgttcactggcttgcctaagcctcttgtctttgctgctcaccgagatgagttcaagtttattgagtcacgcttgacttatggtactgttggtggaagatttgtcaaagggcagaatccgttttacgaagaggcgtatcagcgggtagctcttgatcagcttctgagaatcgctgggattactgatgatgacttgttgttaatgtctgatgtcgatgagattccaagtagacacaccattaaccttttgagatggtgcgatgagatcccgaagatacttcatctgcgcctcaagaactatctttactcgtttgaattccttgttgataacaaaagctggagagcttccatccacagatatgagacgggtaagacacggtatgctcattatcgacagtctgatgaaatcttggcggatgcaggatggcattgtagcttttgcttccgacgaatcagtgagtttatattcaagatgaaagcttatagccataatgacagagtgaggtttggtcatttcttgaatcctaagagagttcaaagagttatatgcaaaggagctgatcttttcgatatgctccctgaagagtataccttcaaggagataataggaaaaatgggtccaatcccgcattctttctcagctgttcatcttccttcgtatctcctggaaaacgcggataagtacagatttctcttgccgggaaattgcataagagaaagcgaatgatcgttcgaatcttcaccacatagagtcttacttctcattcatcttaagacctctacattgagaggaaacaaaggctggcttgaatcctcctcgggactaataacacttacacaactgatatataatctctgcaattttgtctgaggcgtatcggtgtcggtgaatgctgcagagtttttcatcaggcacttcgagaggattattaaagggtgaaagattattgtatatagatagacctctttgtttcttcaggattctgatttcgcatcaggcatgaaaaccttcattctctgtgactgtgcatcatcaaacatgagtttctattcttctgagtttcccctttagggaagttttgcatcaagacactctttacttacccttttttgtacatctctttctctcttgatttcagtgggtttgttaagtatacgaggattgttgtttttcatgtattcgttattaagagaattgttctcatatataaagcttccttgttaatgagtaaatgagaaatttccaaaaattgtaagtactcttcatggaaaagggaacactaatttagcaaatagtattcatcaattagataagtaacagtattcatttccagatattgaaacaaagacattgagagaaatgaagtaacgacggtcaagaacacaaaaaacgacaaaaatgatctctaatagtttctgtaaaaaattgtgtcctgtgtatagttgcttagttatcatatgaacaatataacttggatttgcataatcatcgtatgaacactcgtaaacatttctggactctaccatgtcattgtataatccttcacttgtctttctatttgtttagtttcttcagctaatgaatcgttgagtttgcgatttccttgagatactgcttctcggaactagccattcggctttggaacattgtccattcccgtttacatctgtctctcacctttgcaacaaaaccatataaccatcatcaattagttaacaagtaaccgcaaaattctctgttacaaacttatgtttcaaacttcttaccccttgccaccctgctttaccgtcttgtgcctctccctggtaaaaagaaaaccaaaaaatctgaatcaatatatgaacaaaacagaatacttgtactgaaattgagaaggtattgtcaagaacctggctgcctaaagaaggaagagattgatgtatgatccattgagaatccacaactcctatcttctcatgtgcaggctgtttgttttattaggaaactttttagtagataacttaccaaacacatgtccagtgtatttaagagtcaaggtatgtaggcaaaatgattaacctcaacgcatttacggagtgcgaaatcaagaccccaaccgtgaaccaaatcgttctgaatcatatgccacacgcaacgccatgcatctcttgagaatactggagccataatctctataaacctgtaagaatattacatggaatcaagagtactgtatagatctatgtttttgtaatgaacatttgagactacgtacgctgcacagggaggcaagtgagggtcattgcatcgacctggtttctccttcgcatctctggtgattagattttgcagacagaaaatgattagttccttaaagttttctccttttgatgtttggaatttgtaaagttacttacttgtgaacttctcctttggtttttctctttgttatctcccatgtgatctttttcttagactcaacagcaggctgcgatatctctagaccgtgtttctttataagcctgatgtacctgcagaagagagagaagcacatattcacattttctggactaggattcgtgcggcgatttaaaaacgttttgttagaatgagtaagaagacgcactcttctacatcgaagttttcaaggccgaggtcttcatcccagatgaatacatagtcataaggtgccacaatgtcaggatgcagaaaccttttagcataccaccttaaaatatatatacaataaccagagagagttaatggttaaacaagctagcctcaggaagattggagtagctagagcaaagtaaagttatgtttaccatttggtttgctttggcacgctcacgtgtattgcgcgtttggaccattctaattcttcccattctgtggttcgtccgtcgtagtggaatagaacaattgtaaaatcttttgaaaactgtggaaaaaaataagaaagactcttaagctttttgcagaaagaaaggagagcctgcatcagcttttaccttcttgacacaagcatcaacgttcactttctgaccaaaaccgacagtaaacgcaatgagatactttggcttcacaggaacatcctaaagaagcaagacatgagaacaaacccacgatcagacaatttaatgctgctggaaagatgagattttaatccaaaagatgaaagattcttaagaggagatacttaagggtcaaacattagattacctcctcaggtaatccccaaagtctgcgtaagtagtaatctgattcaggtgcaatgataccaggagtcagcatctctgcacctcggggattcgatggaacccaaatctgcataagcctcatcaaaattagtatacaagatcttttcactacactataatatcaaagagaaagaaatatgccttccaatgcggtgcatcacttgaattagccccatgtaacggacccctagatgaccatgtatgcaaaagcgtttcactcgatgtttctggtgtctcatcttctacgtaagtaatatcaacagagggaagaatgccagagggaaaatttagctgaaagtttacaagttggccacatgaaacaacacattaagcataaagtcatgagagcataaaatattaacaaaaagctaaagatatagctcacttttgttagtgatagtgtagggaaagatatccccaagaagaaaccgacaactattcctacgaatgtcgctataatgagtctcattccatcatttggctttttaccattcgaactgcaaaacaaaaggaagtaacatacaagttcatttttctaatgtgatcatcttaacacatgaatcaagcaatgagctcaggatattggtgaatctaaccagcgattcgagttgtctgttcggttagccatgtcctgaatccggttaagttctccaagaacaatacattcaatggaaacttcagtctctggaaatttcttatctgcatcaccaatgaacaagaataaaaatgcaatctttagattcagatccagtacacaaatgaatgcaagtagagatttacaagttagtgagaagaaaactataaaacaattgagctgggaatattagcttaatgctaaaaaagagaagacatcaccaaaaatggaaaatttgagataactctgtaacagttgcttcctaactaagacagaaaacattgtttacacctcctgagatcgaaatctgatgcgattcattagcaaatcaaattgaaagctaacgattaaaaattccaaaatcctaaagatacaactaaaagcagatccacttcatgaattagagatttactttgaaaagtaaacgttgttacttactggcaagtaaacaaagttacgaactttgagctaattgggagaagacaaagcttaaagacgacgaatcagattcggacataagaagggtaatctctactcgagtaacagaagtagtaaaatcacgttacgaacaataaatgagacgagagaagcaacggagaaacagagtttcagtaacggagcaagatcgttggataaacgttaaaaaggatgcaaatttaaggaagaaaatcaatacccagaagagtgaaacgaatcaaatctctaaaaagccgtcgtcgttgaaaactttcggacgaacttgactgagatttttttttttcttttgcctggcgggttaatgaattaagtaattaagaaggaaaacagagaggatgagtaaaaataaaaaagatctctttaggattcaaaaggagagaaaagaacagcgaagtgtgtttttgaattgatcccatgtgacgcgacttacgggttatgtaggtcaagagaaagttgactttttgacttggcttgtgaaggtactaaagccttggcttgtgaagacactaaagtctaaagctttggcttactaaagtcgttgatcttccacgtggtaaatgatcttaaggctgtaattcttgggctcatgatccaatgatctagggttttaaacgctcatgatccaatgtccaatgatctagggttgcatttgcagttataaaagaaacacattttggcttacattgaccaagagatatattttggcttctgagttttcagtgaaaacactcgtctatgagaaatgttacaacctctcctatgttaggaatcatgagcatctaacgtaaaactaattgacaataagttaactcatcctattttatatattgtattagtattaatcgcttcatactcctattgtagaatcctaacatcctcatcctcgacacaagatctcatcggtgtaatgtccaaaatccgaaacaagaatgtgtttttttaataatggtagtgaatataatggccaaatatgttctctttggaagttacaatattgttgtatgtgatataataactttgaggaaaaagaacaaaacgacttcatggcccaatggataaggcgctggtctacgaaaccagagattctgggttcgatccccagtgaagtcgcattcttttttacactatatccttaccttcaaatttgatctggaacaaggagaataagtagatatatagcctttccaagctgtactgcgtgaatccatggctaaacctttctggtctggaacaatggtctttaccttccaagtcttcttcattgctcaacattgtcgtcacgttatgtgcaacgaatcaaaaaatgtgaaatctcactttaaccaaaatgacacaagcccttgactataaaacaaagctacacaaatttgaaatagaagatgacaataagacacaattagaaacagtagtggtaaatagaatgtttaaacagagaagaaggaacagaacagagtctctgtctccaaaaattctgaagacacatcaattgtcacaagtcttgtgctctgccgtttcacgagcaaatgaccaaaaaaacaagtagaagaagaaaccattaggcttcaataccgaagatgaaccagtaaaaacaaaaaaagaaaaaacccctaattaggttttttaaaaaaggagatgaatttttcttattaatgttattgaagcttctctcttatctgtcttcttcaaaatctgagaatggtgtgtcagccaaactccaatctcattccacattcatccttcctttccttttttaccatccttcccttgctgacgatgacctgtgaaacccgaaaatctgaaatgtcagtttactcgcatctcaagatcttgatacacagaagcaaacattataaggaatgacccaagtttggatctttatactaacttttgggttcatgtcaaccccagataagtaggaaggaagctattgaatgcgagtatattgtaagtctgttccttggaatgggattgaatcagatgtaaaaggctaacctgtcgaagtttctgttgttgaagaatccacgttccttgcttccttggaagtttcttcgatcatctactggtcttggccaattatcgcctgtgccatgtgatctaggtctttccatggattcaacactcctagactcatcgattgatccagcccgtgaatgtggtctttctgaataggaaccgcctctgcttgcactggatccaggcctctcaactgctcgtggcctgaacctgactttgtcgtccagctcacggatcagtaagtctaggttcttttctttctcacgtatgagatccggtagattttggtgattactgtcggattcctgttgagattccttgctctcaggtgcaatggctgcctccttctcgagtttcttccgtagttcttcaatctcttccttcaacatcctctctccctctgtttcaggcctgaaatttttgtgtttcaagagaccgagatgaaaagtgagaccatagctaatcaagagatgatctagaaagtcatcaccataatcacagagaagttatttatctaccaacaaggcatcacagagctcacaaaagagttaacaaaagaagacacaaaactcagacgaatgtgacagcatgagataccaaaaaatgcaagagctgtcttacaagttacatgttacatgttatgcaattctataaatgccaaggaggctgaataaaaaagatataggaacaaaataagttcaaaaagagcacagttgagagaacaaagatcaatcaatctgccaaagaaatgggcaatgcatatatttggtaatgaagcaactttcagataaaagtctgatgccgagatgcttaagaagacattcattcaacatgtcatcaaaagaaaaccacgaatacactaaaacttaagtagataaatcattcaattagtttccattttgaatttgaaataataagccgaagtggcaaaattacctaaagctattactttgaatataatttactatcctctaatggttcaccagttcatatcacttaaaagatcaaacttttctgattcagtatgttgaacagcggattatttgagacataattaacattcaacccatggcagcaacatagaattgacggaaattcacattgctcagagaaaagaaagaaaatccaaatgaataaggacctgtcaaccctgcgatgctcgagttcagaatcaatcttgcgccaatctttcccttgttcctccagcaatacttcccgaggttttgcatcaccaaaaggattcacctttggtctcggtttcaccacattctccacattgttcaatgctgaactctcagacctgttagattgagcacttgatggtctgctcgattgcgcgcttgatggtctgcttgtttgtcccttcttggcctcaatatccgagtcaagtttcttccagtccaatcctttctccgccaaaacttgctctctcggtctagctgctccaaatggactcggcttactcgtcttcacagcagttggagtttcactcacttctgtatcagcctttcgtggttcaaatacaagacgacgtcgctcttcctgaaccccaccaccagaaggaaggactcctcgagcccatcggtcaggctctggtccggattcacggaaacccgacccaaacgtagatgattttgctttacccgctgcccaattatcaacctcatcagctttagagaatccacctccacctccactaccagcaccagcaccaccgccgccataactgccagcaccacctcctcctcctccaccaaaactacctcccccaccaccataacgactaccttgacgtccttgatcaaacgaaggaagcgatttctttccttttccccaatcatcatcctcatcagccctagaaacttgtgggaaatcagaaaccctagaattagatcccctctgatcatcatcaaatccaccataagatctcctcccaccaccaccaccgccccaagacccatcagaatcctctcgatctcgtgacattcttcccggaggtccactagaccttcctccaccataagaagagaatccaccaccgagacgaccaggttgcatttcatcctcagaacgttgtcttggaccagtaggtagctgaagcatctgctctctcgtcaatccagcagaactcggagcagtgtatgctcctttggtaaactccgataaagtcatcttcttcttcttcttagaagacttagcagtcgcagcctctttcagactcgggaaactctgtgaatctgccgccgtggctgtagcttcagcagcttgctcttcatcggcacgctcagcctcatcagcccatgcgccgattccaccccaaggtttcgacatctgtgaattttccaattccaaattcggagattcccccagatctgaaaaacgcaggacagaaattgagagtgacgaatctaaagattccaattcaaagtagctccgagtgagaaatcgaatctaaagattctctcgtcgtcgcctaaagatgaaattttttatatgtaaaaatcgatttatttccttgtgaagctggtttgtttgtaggtttcggaacggaggagcaatggacggagaaagagagatagcaatacgcgacgtattggagcgtgtggtacacgtagaaatcagttttacgaggaagttaatggcttgaacgttgtgccgttgtggttcacgcgacgtgttagcaagtgacggttgacttgtacaggaaacgaacggtcatgagtctttgtttttagccaattcttatcaaattatttatctttgtttttcccaccaacttcaaaacatatacattgcatccatttctttaaatcgggtgattatagaaaatgaagacataaatggatatgatatataacacattcatttttcagatttttgaatggattcaaacgtgaaattcaaaaagatcttgagagagtattacacattcatcgtttttctctatacataaacctttaaccttagaaagctaaactgtgcgtttacagcatcaaaaacaaaatggctttctctaccctttgtctgagtttttcatatccaaaatgaagacaaaagcagcagagtttcttctagagagatgtgacctagtttctcaaatctctttctgagatctgagatagttcattacaggacccatagcactgcctcgcagtgccttgtaagaccatgagcctccacttgaactccctttcttgttccacccattgttggcctgagacaacgctgctttctttgcacttaaagcttcacttagttcttcccaagggctcacttctccattttctgcaatattccaatgaaagtagataagactccatctatttcaatacaatgtcgatccaagattgatggaaaatttaccttttgcaggggtttgcaattctttgtttgcgcttagctttggctttttagctgactggtcaggctcgggcagtgctgacttggcgacttctgcagaatctgagctgctagttttgacactgcgaacatcgagcagagcagaaaattctatctgcagaagcaaagtctttcttatattagaattctgatgcttagcaagcaaacaactacaagaatgttcttgttcataagatatgtatgacataatgtaaaccatgaagcatacctccagggatccatcttctttataaagagatgtatcaggttgcatacagaaatcgtcgtcctcttctgtctttttctcgattggaaattcttgaacaggcatcaaagtcaccatcttggagtctggatcatagtagcttatcttcccaacctatcaaaagaagtatattgtaaagtggataagttcctcagaataagcgttgattgatcgaatttggcttaaaaggagagccagaaattttacccgaaaagaggaaacctcgggtgtccaagatgatgttaactcaatgaggcggtatgcaataacatctcctttctgtaaagttaacaaaccaggagttaaggagtttaaaaatgctgaatctataaacaacctgctgggggtagtaaagactataaacaaacctttactgagccagtgtaagccacaagctgttcataatcaatcggacaattagcaagtgtctctgcttcagcgggctgtgtcgtagcatcttcattaaaatcctgagcatatcgtttggaaaaccctgacttctctgtgccccatttctgtcccttcttcttcgtcatgtttccattccacaagacattttcctaatattatttagacataatcattacagattcagcttaggcaaagctttaaggatacaaacatagggtcaagtcataccacaagaggttcactatcaagagaggcttcatctgttccagctgaaaaataagcatataagggaaactgtgaggagccttgcaaacgcacaaaagctatacagagagaaatttacataataatttaccgagaggcttgaagcgtatgtggcctggcctcacttccacaggtacaacttcatccccgaaaccatcactaacttcttctgcctgttgattttcaagagtttcacagtgcttttccttggttgcttggtgatctatagtgatgactggtttttggctgggtgctacaaccaactgcgtctgtagaagctgcaaatcatgtaacaataaagaagatataagtgttgaagcgcaggctgtacatcactaaaacacgtgatgcatacataaatcttatcattttaagtttaaagtatttgatgaagaacctcttccttctctagttttgttttctctctcagccattgccgtttcgcctttttacgtcgggcacttctgctaggtgtctaaaataaaaataaggaagagtgaaggactgataggaagctaaatgagtaagtgaaacaaaagccaatccctgcatctacaaacatcaaggaattttacactctacacatattgttcattctaattccttgcaacaactaagtaaactcaaacctttttagtttcagcagatagttggcacagatcgttatgctctttgctctcttcttgttgtgatgacctgcaatcacaaaagcaagaaaatggaaaaaatgactagttagagataattcaagaggattaaagattcacaagcgagttttgacaaagcaaaagtctacgtacctctttgatttggtcatgggtttggtactatcgttattctgttcatcattgttagcactttgtacatccaatgatttcttcttcttcttcttcttcacaacattgctaacaacagctgtgttttctctttcgtcgggagattcttcagtagtatctaacttacacttcttcctcctacattatcttcaaacttgaataacaacaaatagacatttaggtgactaagaataagttttcgtagagatcctacttggtgctctggtttttgcttgaagttttacgtttcttcgaagccttcttctctggcacaaactcttctgcttcctcttcaagctcatcttcctcagactcactttcatatcctccagtttccttctggaattcctcattagcaagcagcatttcaccaggacgaatctgaggcctttcctcaacctcaatagcgttgtaaacattctcatcactgtcttccccaacaatctccaacaaagactctttcttcttcttaacactacacaaaaagcgcaaaatttaacactaatgatacttagtaaagctcaaaggaaaaagctttaagagattgacgaaactaaccaaacgatatctttatccttcaatacacagctggactcgaaaggtggcaaaacgaaaccttccatctgaaaagcccgaaagataatgtaagcattaatggcgtcaacattgacaaatttgatttctctgaaattagggcacaaagaagtataacgtacagatagagagaggccatgaggacacgcttcacagaggctaaatgtgtgaaagatatgatcagaaaactctgatatagttcggtgacatttacgatttagaacaacccagctccgtgttaaaccttgcttcttttgatacttactcagaatccgtcggtcttcaaacaccagacgaaccctcaccttctcttcctccatcgtagacgaacttcagataagtaaaatgagagaaatttcactcaagttttgagctttcggagaaaatccttaaacccctgttgagctccaaagacggagaagaaggagaaggggagaaactgaaagccaaacctaacactctcgttcacagagaggttttagtaaaatatgattgggccttatttaaagcccatttaagcccatatcaagaaagcctcagattaattaatgttggagccttcgtcttctttttttttttttttccctctagcttaagctcaagaccagccgtcgtcgtcgatctgatgtcgccgcattgaaacaaagaagaggcaacggtgatatgatcatatgcgtcgagctctgatatgcatcagacgctgggcgcagtacgccttgcataccgctcgcgtatagctaacctcgttaaatcaggtatgattgacaacgctgttcaggtgttcgatgaaatgcgtcactcaagctaccgagttttctccttcgattataatcgtttcatcggggttttggttagagagtctagatttgagcttgctgaggcaatatattgggatatgaagcccatgggtttttctctcatccccttcacttactcaaggtttatctcgggtttatgtaaagttaaaaaatttgatctcattgacgctctactgagtgatatggaaacccttggattcataccagatatctgggcgttcaatgtctatttggatctgttgtgtcgagagaataaggtaggttttgctgttcagacgttcttttgtatggttcagagaggtagggaacctgatgttgtatcttatactatacttattaatgggttatttagagctggtaaggttactgatgctgttgagatttggaatgcaatgattcgtagcggggttagtccggataataaagcatgtgcagcacttgttgttgggttatgtcatgctcggaaagttgatttggcttatgagatggtggcggaggagatcaaaagtgcacgagttaagcttagtacagtggtgtataatgcgttgattagtgggttttgtaaagcgggtagaatagaaaaggcagaagctttaaaatcatatatgagtaagattgggtgtgagccggatcttgttacgtacaatgtgttgttgaattattattatgataacaatatgttgaagagagcggaaggggtgatggctgagatggtaagaagcgggatacagcttgatgcttatagttataaccagttgcttaagcggcattgcagggttagtcatcctgataagtgctataacttcatggtaaaggagatggagcctagaggtttttgtgatgtcgtttcgtacagtactctgatcgaaacattctgtagggcgtcaaacacgaggaaggcttacaggctctttgaggagatgagacagaaagggatggtaatgaatgtggtcacatacacgagtcttatcaaggcttttcttagggaaggtaactctagcgttgcaaagaagcttcttgatcagatgacagagttaggtctgtcaccagatcgcattttctacacgacaatcctggaccatttgtgtaaatccggaaatgtggacaaggcttatggtgtttttaatgacatgatagagcacgaaattacaccggatgcgatttcatacaactcccttattagtggcctctgcaggtctggtagagtaactgaagctataaaattgtttgaggacatgaaaggtaaagaatgttgtcctgatgaattaactttcaagttcattatcggaggactcatacggggaaaaaaattatcagcagcctacaaggtttgggatcagatgatggataaaggattcacgcttgatagggatgtgtccgatacactcatcaaggctagctgttcaatgagtgctgatgcgtaggcataataaggggatagacttttaaagttgtccaaattgccctctcctgtgcaaaaatgccatcatagtcaatattatggcgacacagagatgctgatacagagctattaaagcctctactgttgcctgctgctgctcggagagaaagaagaaacctatcaggtttaaactaatttccttccttttttacataaacgaatacgtggtatagtttatgtagaccaactatatcttgacttttattactcgtttcatattccttacatctttggaatgtgaaccaactctactctgccttgtccctgttgcagcgacattatatgctcccgaaggatcattatttgtggtcagattatggaacaagacaaccagctctcttacattgactcagtttaaaccaagtcctcagaaatattagactgaggactcagcttattagactgagaaaaagatcttcctttattatgcttaggcacatcaagattattgatacttgatatgagaagcatggattcctccttcaatggtacgcttgtaggacttttttttttgcaccacgcttgtagaacgtaactccactgtcagatgcagtctcgattaagtatcatgttggaatgtatgctaccaatgaggttttggatcttgatatgccaagagcttaagacgtaactgatatgcatcttaaaaagctcagacgttatctcactagtgtattgttagttttgcaggactttgtttcagaacgtgccaaccttttcccttttgtcagaatattgtcatgattctgcatattttcatagactgacatattcaataacaaaatcaagctttgtctggatccctattgatcgtgattttttttcaattttattgtttttgtgtgagttttttcagcggctctcagcactatgcttcagacatccctttactatattttatcatgtgtactaatgcagaactaagcctttataagtgcgagacaagaaggaaagaggcccgccggttcaagacacaaacattataaaacagagcggctactaatcttaaccataatcagaagaacctgtacgttgttacctttctctctctctttttcttggtactttaaccaaaaaaatgagagaattaggacccagtatttacattttctgtttcaaaacttttagatgagaaataagagatgatggttctagttttgcttgcttgaatatgaaaaaagattacttgcttccttgtgtcagtttcctttaacacaagaatcctacttaaacttctcaccaagtaatcatctctctcatttggaaacactcaaaattttctctcttcattgctttcacttaactcttttctcctttagttgtacttcaatgtctcaccaccactatgaaaccaaccctcatttcgttcaattttccttgcaggatcaacatcaaggtggtccttctagctcatggaactctccgcaccatcaccagatcccacaggctcactcagttgctccacccagggtgaaaataaagactcggggacgccaccagactgagccacctgaaacaatccatgaatcgccttcctcaagacccttgccactgagaccggaggaaccattaccaccacgccataatccaaactctgccaggccattgcaattgagccctgaggagcaacgacctccacaccgtggctatggatctgaaccaactccatggagaagagctccaacacgaccagcttatcagcaaggcccaaagaggaccaaacccatgacattgccagccacaatctgctgtgcaattctcctgatcgtcctaattttatcaggtctcattctcctcttagtctacctcgccaaccgtccacgctcaccatacttcgacatctcagcagcaaccctaaacaccgccaatctggacatgggatatgttctaaatggagatctcgcggttgtggtaaacttcacaaatccaagcaagaaaagcagtgtggacttcagctacgtgatgttcgagctctacttctacaacacactcatagcgactgaacacatcgagccattcattgtaccaaagggaatgtcaatgttcacaagcttccatctcgtcagcagtcaggtacaaattcagatgattcagagtcaggacttgcagctgcagctcggaactggtccagtgttgttgaatttgagaggaacgtttcacgctcgctcgaaccttgggtcgttgatgagatactcttattggttgcacacacagtgcagcatctctttaaatacccctcctgcagggaccatgcgagcaagaagatgcaatacaaaacgctagcgatttgcagcatttctgactgaatacattgcttcttttcttgatgcgtttgatgataatataggcaaatagatagtttttgtatttttctgctacttttagaaataacaaaatgacaaaggggaaaatgcatttgattttgtatttcgaattatagaattgatcttaaattgtatgtaatttgattataatattagagatgaagatatattatctaaaaatccataattattcattttgattataatgttctagctagctttaataatgtagaaataagatcttatattacttttgtaaaagtgaaatatgtgcgaataaagtgtttaactttgtgcatgttacacgaaaagaaaaaggatatatcccctaaaacagtcattactgagaaatatcataagaacaaaaatttcttgaaaattattgcaatcctagattaacatttgtcaacaatcaacatgcaacttgtatattacatgttttaaaactaaattacgaatacataacactaaaccatataattttattttatttcaaactactaaaatttactatgtttaaaaaaaaaacttaaagacaatatttctatgaaattaataaaaatgtatcataatattgatttattatcatgtttatttcagtacaaaccacagataagaaaaagtgatcggcccattaaattgatagcccaatatgattttacagtttatggcccatatttgtggtttgcccggagctcaagaaacgatctctttcttcttcttctcgtcgtcgtttgtcactttagagctacttcttcttcttctctgctaagcctttcctctcgacttgatacttttctccagtaaggtacgtttccgatccttaatcgagctctagtatcattgatttggctatgttaatgaagatgagggtttagggttcttatacagacaccaatgtatctcgtgctagatctgatttgaagttatgagagaaaaactctttgattgacatctgattttggtttatctccttctggatcagcttatttttattgtagcttctctgattttcgatgggtacttatattttttttttcaatttgggatttttcatgattctgtagggtttgcaaagatgaagcttgatactagtgggttcgagacttccatgcctatgattggatttggctcgagcagtgatatgcttgatgagctttcttctgtaccctcgtttgatctaccccgtactaaagaggtgactttttttgtttttgtttgtgattcgaagcagtgtgagtgaattttcaatgttgtttgattacgaaactggttttatttgttggtttcagtttgatggatttcagaaaaaagctaaagacatgttgaagcatgcaaaaggaacaaccactctcgcttttatcttcaaaggtggtgttatggtcgctgctgattctcgggctagcatgggaggatatatctgtatgttctcttttatcactttacttttagttttgtttgcagactttgacgatgtttagctgtgagctctcttaagaattcctccaaaaatatgcatcctttcgatatagttgactttggtagaaacactagtacaatgaagattaagttagcttgttgttggttttggttttgtgctggagtgtcaaacaaatttctagttttcattctgttggccattaattgtgaaccagtagaggaaagaaaacgttgtgtgatttttgttaatgttttaaatctgtttaccacattcagcctcacaatctgtgaagaagattattgaaatcaatccttatatgctcggtacaatggctggaggagctgctgattgccaattctggcacagaaatcttggaattaaggtacctaactagaaatctttttggccgtgtctgaactgataacttggatctttgattaatctttctctctgtggttatcgggaatcttgctgccttgttatatagtgatttttttatatatttctaaaagcagcagattcatttaccttatcaaatgctttaagttttagttctgtctatattaaagaatgacaaagattttgcttgtttgatgttgaccctaagatcatacaagcctctttgaatgctaagcatgcaatttcagttgagcatgtggtggctttagatcccctttttttctaatcaaacattctgtagcaagaaagttcagctttttttcctctgtacttagatagcaaataaataaagaacttagtttgttgaatgcgatgtgaaattttggcatgttaataccattgtagacttcttcattttatcaccaacatcttgtttgttgattttatggctgatctcttaatttatttgtctatccaagtgccgtctacatgagctggcaaacaagaggagaatctctgtttccggagcttcgaaacttcttgccaacatgctctattcataccgtggaatgggactttctgttggtacaatgattgctggatgggacgaaactgtcagtaaaaccaacttcatatcttcaacactgttattttcttcccacgcaaaaggaaattttgaaatgctaaatccgtttacttcttgtataatagggtcccggactatactatgtcgacaacgaaggaggacggctcaagggagacaggttttcagtcggttctggttcaccatatgcttacggtgtgctggacagcgggtaagtcatttcccaaacaacatcttcatcgcttttgtcccaatctcaaaggctaaaaaccaaaatctaatgatgttagttaagcaaccgtttcatatttatgattttacttgcatcatcaggtacaaatatgatatgtcagttgaagaagcttccgagttagcaaggagatcaatctaccatgcgacattccgtgatggagccagtggtggagttgctagcggttagtaatctgaatgcatctgtggttcaaatgtaatatttaactttcaagattctgatttagctcataagtttgttctcttctcatatgaccagtgtaccacgttggtcccgaaggatggacgaaactatcaggagatgatgttggggagctacactaccattactaccccgtggcaccagctaccgcagaacaagtcatggaggaagcaacagccgaataaaaatcctgtttagttttctaatcgttcactccctttcttgttgttgcattttgtggtagtatatactgagttgtctctagctgaagctttggtattctattttactgatctgaaatgttgctcgcggattattctctataagattctctttttctgcaatcacattcttctcttactcggtgttttaaattccaatatagggaattgtgattgttttgcaccattttgttagttaaccagtctctccctatccaactctatcggcaatcctcacagatttgctcgtgatagctggtggctggcgttgtagagactagagagcaaagcttagtttggaccacatgaattgcttcggctctgtcccatcttttttatcaacctaaattcccaatgatgataacatccaccaactagaagagaagagttcatggttttgctttcgtctctcgtttcatcaatcttttttaaacacccctcaggaaacttgcacatcagtcaacatggaagtgtctcagtggtcgacaagggcatagttctgtcttaaatgatgcgatttttaccaaacggcgttcctattagcaacataaaaagccatgaggtccataactcgtcttcgttcaatgatccaatcaatcaatcaatgatttttgaaccacacgacatgattatgttttttttttgtcgcattcatgacttgaaaatttaacgtatcgatcacatcatcaaccccttataaacaagactctttgagattctaagctcatctatccaagaaacagaaaccaaggaaaccaaaaacagaggaaggcaaaaatggcgatcttgttctgtttcttcttggtttcgcttgttactctcgtatcatcaatcttttttaaacagatcaaaaacacaaaatttaatcttcctccgagccctcctagtcttccgataattggaaacttacaccatcttacaggattgcctcacagatgttatcataagctctccatcaaatacggtcccgtgatacttcttcatctcggctttgttccagttgttgtgatctcattgagcgaagcagctgaagcagtactcaaaacacatgatttggaatgttgcagccgaccaaagacggtggggaccggaaaactctcttacggttttaaagacatcagttttgtgccatacagtgagtattggcgggaaatgcgaaaactcgcggttaccgaactttttagccttaaaaaggttcaatcttataggtatataagaggggaagagatcgaatttatggtgaagaaattgtcagaatcagctttgaagcaatctcctgtggatctaccttcttctccctcaccgcaagcataatttttagagtagccttagggcggaatttccacgagagcggctccattatcgatcaggaggggattgaagaacttgttaccgcggctacaacagctataggaagttttactttctcggacttcttcccaagtggacttggaagattcttagattgcttgtttcgtacgcaaacaaatataaacaaagtctcggagaagcttgatgctttttaccagcatgtgattgatgatcacttgaagccatcaactttggattcctccggagatattgttgccttgatgttagatatgataaagaaaaaaggacataaagatgatttcaagctcaatgtggataacatcaaagcagtcctcatggtaaagttcaaattttggttcatatatctttttatttttcaaaccattgaataaacacttagtttaaactactaagcttattatgtatatatgtctgtttatgtgatgctcagaatatatttctcgcggggatagacacaggcgccataacaatgatttgggcgatgaccgagctcgttaaaaaacccttagtgatgaagagagctcaagaaaatatccgaggcgtcctcgggctcaaaagagatagaatcactgaagaagacctatgcaaatttgattgcttgaaacatattgtcaaggaaacattaagattacacccaccagttccatttttggtcccaagggaaacaatatctcacatcaagattcaaggctacgatattccaccaaaaacgcaaatccaagttaacgtattacgtatggacgatcggacgtgaccccaagcgttggaccgaccctgaagaattccgccctgaacggtttgcaaatacttgtgtagattttagaggacaacactttgactttctaccgtttggttctggtcgaaggatctgtcccgcgatatcaatggcgattgctaccgtggagctaggactgatgaatttgcttgactttttcgattggagattgcctgatgggatgaaagttgaagacattgatatagaagaagctggtaatgtcacggtagtcaagaaactacttatttaccttgtgccccttcaacgtcattgatgagaagttaaagaaagctccatgacatggaaagaatacgagaagataacctataattctctagatattattgcgagatatataagaattaattcatgtttgatgatcaacattccaaaaacaataatttatataataataacaaatcttctatttaaaccattttgcaatgattggattgagattcggtggctggctgtcactttatcgcagttatcgatctttttgtctaccaaatgatatttcaaagagtcaattagtagtatggacaaatatagtaataaaaatcaattatgattctgtggctactatatatggagtttatcaggccacagactgagacggaagaatgaggattatgatgttccaagagtagtggaaattttttagtaccaccaaccaacatttcgtcttaggacgagaattaaacacttgtagactttataataacatttcgtccaaaatagtgggcactaaaacaaatttattattttctttaaaaaaaacacgcttttcattataatcgagttcaaattttcaaaaactctagaagtactctatttacgatataaacccatttgaagtcaaggctaagttcacattcataaaatcatgactcatgagcgacgagatcaataataaacaaattttcagcctacatttctgatttcttgcacgttatatatagcttgaattgttgtgccagttaggtgattttaattaggttaacttctctacttaatttggatatttgcatgtggtgtctaccacgttacgtggttttagggttattatttatattttactaaagtttatatataaagttcgggctttaggaatcaagcgatcaagtcaaaaaaattgttggataaattttttaacgtatgttttgttttaaccaacttagaaactttgtatttctcgtggcagtttttttcccttttcagttctcgtgccaagcttaagaatatgaaaatatactaattgtgatggtgattcaaacccttaacaaaaaaaaaaaaaggtgatggtgattcatcacaaccatatcatcgggatgtcacattcaatactaaaggacgagacctccaccgaaacaaacatctataaatccaattttagttaatgtttttttttgtttgtttctgaacagttcaatagcctataagtagttatatacaaaagtaataatgcaaggaaacttggatctatcttaactttgattgatacaacagaattgacatattcaaaaaaatatggatgtcatattcaatttttattatttttgggaaataaaatacaatatggatgtcacagtgataatatattaatatgccagcaaacatgtaaaccatcatctattcatctacgtttcctctaagaagaaataaattggattcgaacagatttagaactctcaacgtcatcagaaattagtatatcaaagagagtggatttccaacgacatcattattttccaccatataatttaaacctcattaataaggtttcatttgccgtttaaaggcataatcatttgccgttttcctctataattctcttaaagttataatttaaaaccccaataaattagtaaatttgacaatgacataaccaaaatcctaattaattataaattttgatcaaaaatctattaaattttcaaattcgaagtctactcacctatttttaatcttactctaataaataaacttatctatctctatatatccatactatgtaatcgttgacttaaaaaggtataatattatacaatcgttgacattaaaaaccatataatatacaatgattgagaaactgcttatccactcaaccaatcaaaacaaagtgtaatcggaacacgtggattttgaaccacaagacttggtttatgcttgtgtcacatttatgatttcaacgaagataatatccacaaatctagtaacttctgtatgcgactctacaaccacttgatttgaagagttaacgtctcaatcacgtcgtcaatccctgtcactctatctctatcttataaagaagaagactcttcgaagttctaaactcatagaaacagagccaacaaaacaaaaacagaggaagaaaaacaaaaatgacgatcttgctctgtttcttcttagtttcacttcttactatcgtatcatcaatctttcttaaacagaataaaacctcaaaattcaatcttcccccaagcccttcaagccttccgatcattggaaacttacaccatctcgcaggattgcctcacagatgttttcataagctctctatcaaatacggacccttggtctttcttcgtctcgggtctgttccggttgttgtgatctcatcgagtgaagcagctgaagcagttctcaaaaccaatgacttggaatgttgcagccgaccaaagacggtggggagcggaaaactctcttacggtttcaaagacatcactttcgcaccatacggtgagtattggcgagaagtgcgaaaactcgcggttatcgagctttttagctctaaaaaggttcaatctttcaggtatataagagaggaagaggtcgacttcgtggtcaagaaagtgtcagaatcagctttgaagcaatctcctgtggatttaagcaaaacctttttctccctcaccgctagtatcatttgtagagtcgccttaggacagaatttcaatgaaagcggctttgttatcgatcaagacaggatcgaagaacttgttaccgaatcagcagaagctctagggactttcactttctctgacttcttccctggtggacttggaagatttgtagattggttgtttcaacgacacaagaagatcaacaaagtctttaaggaacttgatgctttttatcagcatgtgattgatgatcacttgaagccagagggaagaaagaatcaagatattgtcaccttgattttggatatgatcgataaacaagaagattcagattctttcaaactcaacatggataatctcaaggcaattgtcatggtaaattctcaaattttggttttctttatatcctatgttaacctatattgattcaaaaattttgtatcattattatgtggtatttaggatgtatttctcgcggggatagatacaagcgcggtaacaatgatttgggcgatgacagaacttattagaaaccctagagtgatgaagaaggctcaagaaagtattcgaaccactctgggtctcaagaaggaaagaatcactgaagaagatttaggcaaagttgagtatttgaaccacatactcaaggaaacttttaggttacacccggcacttccatttgtggtgccaagggaaacaatgtctcacatcaagatccaaggctatgatattccaccgaaaacacaaatccagcttaacgtgtggacgatcggacgtgaccctaagcgttggaatgaccctgaagaattcaaccctgaaaggtttgcaaatagctctgtagattttagaggacaacattttgacctattaccgtttggttctggtcgaaggatttgtcccggaatgccaatggcgattgctagtgtggaactagcattgatgaatttgctttattattttgattggagtatgcctgatgggactaaaggtgaagacattgatatggaagaagctggtaatatctctattgtcaagaaaatacctcttcaacttgtgcctgttcaacgttattgatgagcaataatataagctcgataacatggaaagtgtatgaagcaaaaaacataagattctttagattttgttgtgttatataagaaagaaatgttccaataataaatcaagaaagaataacttttgttcatttacttaaaaactagatcataatcaacacggattaagatctttttcattcaacaaaattctaaattttgtttttttaagtaaaaaatgttatagcataaatgttcagatttttatgtcgtattatattgaattaaatatagaacaaagaaaaataagatacagaacaaagagaaattttgatccaaaaaaaaaaagaaagagaaataagatctagaacaaaaacgatacattcagattgattattgaaatcaaataatcgaatttataattgaatttgatggaatttataatgtattttttgtcatggaaataataaagtttgttaatatagtaggcacgatcgaatctggagcttcaatttttttttaactaattgttatggaagatgctggaatgatctctttttacaagaaagctcctctcattcttgttccggttaaacaccattaatgacatcggcacacaaaaattcaaacaccgttgaagattgtttgctatactttatttttatcaataataagttgcggtacttggttaactgtatacgtacttctatttcttatagttgtgcgataattaccacaagtccaaaaaagtaaaatatgaatttgataaagcagtgtaaacctgagattttcaagatttgggcctaaacccattagagaatgctacgtagagaaccattgggcccataaacttattttattcccgcaaagcctgagtggattcgaaccactaccacaaaaagtaagagtttgggttatttgattttaatcattcactttgaattattatagacaccggacagtgacttatgataaagagatttttaacctttaaaactaaaacactaaaatacataatccaaagaagacggaacaaaaaacaaaaacagagccaggaataatgtcagtcttcctctgtttcctctgcctcttaccccttatcttaatcttcttgaaaaatctcaaaccatcgaaatggaagcttcctccaggcccaaagaagcttccgatcatcgggaacttacaccaacgccgggaattacatcccaggaacagtcggaatctttccgaaaagtacggaccaatcgtgtttctccgatacggattcgtccccgtggtcgtgatctcgtcaaaagaagcagcagaggaagttctcaagacccacgatcttgagtgttgtagccgaccagagacggttgggaccagagcaatctcttacaactttaaagacatcggattcgcaccgtacggtgaagattggagaacgatgcggaagctctcggtggtcgagctcttcagctcgaaaaagcttcaatctttcaggtatatcagagaggaagagaacgacttgtgtgtcaagaaactctctgatttagcttcgagacgatctttggtgaatcttgagaaaaccctttttactttagtcggaagtatagtgtgtaggatagggtttgggataaatctccgtgagtgtgagttcgttgatgaagatagcatcgatgatcttgtgcacaagtctgaagatgtcataaggaattctatcttctctgatttctttcccggattaatgggtaggctcatcgagtggatcttcagtgagaggaagagattgaatagactttactcggaagtagacactttctttcagaatattcttgatgatcatctcaagcctggaagagagagctctgatatcatcgatgtgatgattgatatgatgaagaagcaagagaaagagggagactctttcaagttcaccactgatcatctcaaagggatgatctcggtaaatctataatctttcaagataagtggttaaaaatcttgcatgcaacacagtttgtgacttttgttttgttttacgtcaggacatatttctagcaggagttggaacaagctccactacattgatatgggcgatgaccgagctgatcagaaacccgagagtgatgaagaaagttcaagacgagattcggacaacacttggggacaagaaggagagaatcacagaagaagatttaaaccagcttcactacttcaagctcatggtcaaagagatattcaggttacatccagcagctccacttttgctcccaagagagacattgtctcatgtcaagatccaaggctacgatattcctgctaaaacacagatcatgatcaacgcttacgcgattgcacgtgatccaaaactatggacaaaccctgatgagtttaaccctgataggttccttgacagctccatagattacagaggactgaactttgagctattaccgtttggatctggtaggaggatatgtccagggatgacaatggggatcgccattgttgaattgggactattgaatttgctttacttcttcgactgggggctaccagagaaggaagaagccaaggagatcatcaccgggaatgaagttgctcttgaccttgttcaagtttttctccactgaatgtgttttggttatggaatgtttgtactacactaagcttgattctaaattaataacatcttacaagtactgaaaatagtagacagtagacactatggtttatcttccattagaaacaattaaattataaaatcatttttgttaaaacagattaaattctctctttacacaagccataatactaattaattaagaatagggttacgctacgttgggagttgtttaaaagtacatattttcgtcctttttgcttctcccactaccatcaattagtggttgaaacagaaagcttatcagacagaaattggcattttcggatatgttggatgcacaaagtggtatataatacgtaagacttattcgtgtcaatcatgattcatgaagctatctaacctctacaagactacaaacacgtagaagtttggactactcatttaataatcgacaacaacccatgagctgaccataatgaatattattaaacaacccaagttgtttattttctcttaatcgttaagcacttcatctgaaatacaaaacccaaagaagaaagagattaaaaaaaactagagggcaacaaaaatggcaatcatcctctgtttcctcattctcttaccccttatcttaatcttcttgaaaaaactcaaacattcgaaatggaagcttcctccggggccaccaaagcttccgttcattggaaacttacaccaactccaagaactacctcccaggaatctcaaccacaagtacgggccagtgatacttctccgtttcggattcgtccccttggtcgtgatctcatctaaagaagcagcagaggaagttctcaagattcacgatcttgaatgttgtagccgaccagagacggccgggactagaaagatctcttacaactttaaagacatcggattcgcgccttacggtgaggaatggaaggccatgcgaaagctctcggtggtcgaactcttcaccgccaaaaaacatcagtattttaggtctatcagagaggaagagaatgacttgttggtcaagaaactaacagaattggctctgacacgatccccggtgaatttgaagaagacccttttcactttagtcgggagtattgtgtgtcggatcggattcgggtttaatcttcatgagtgtgagttcatcgatgaaaatagcatctccgaccttgttgacaagtctgagatacttgagatgacttctatgttctctgatttctttccaggaggaatcggtagattcatcgattggatctccggtcaaaacaagcgattcgataatgttttctcggacctcgacactttctttcaaaacattcttgattatcatcttaagcctggaagaaaagtagcagatagctctgatataatcgacgtggtgatcaacatgataaagaagcaagagaaagatggagactctttcaagctcacaacggatcatcttaaagggatgatctcggtaatgtttttggacctttattagttgtgtagactaatcttcccttttttaattaaatattcacacaatttttgttctgtcaggacatatttctagctggagttagcacaagtgcctccacactgatatgggcgataacagagttagttaggaaccgtaaagtgatgaagaaagtgcaagaagagattaggacaacactcggagacaagaaggagagaatcacagagcaagatctcaccaatctccattacttcaagcttgtggtcaaagagatattcagattacacccagcagttccatttttgctaccaagagagacattatctcatgtcaagattcaaggctacgacattcccgccaaaacccagatcatgatcaacgtctatgcgattgctcgcgatccaaaactttggacaaacccagatgagtttaaccctgacaggttcctagacagttccatagattacaaaggactaaattttgaactgttaccgtttgggtctggtaggagaatctgtccaggaatgacgatgggaatcacacttgttgaatttgctttattgaatttgctttacttctttgattggggtttgccggagaaggaagaggcggacaagatcatcaccggcaatggagttgctgttggcctagttcaagttcttctccactgaaaatctgatagatgtttctttttttggtttgcaacatttttttagtattggttatattgaatgcttgtgttttaaccttgcttttttctttagagacattctattaattagtaaccctaattgacatgagtaaaggaccaaaaatgttgtcatagcttagaaactctataatccaaaccaaccgaaaattttgaaatataccctaattgacatgagtaaaggataatttgacaaatttaaaatagtaaacttgcagtttgcactattgaaattaaagataatgttgacaaattctttatgaagccaaatcacattattgtataaccacaagtataatgtatatatttatatatagttggtaaaaacattcaagttcacaaccacatggtcattaattacacttgataggtagagagtgaagactaattcattgtgtatgtatccactacaccaattattcattgacttttggattcttatcagaaaagcatccgtgagtttatatgaaaggtcaatcgatcattaatgcataattccataattgtcgatataactcgattttgcaaactatattcttcaatcttgttgcaaaaaatgtcaatcttgttacgtgaataatggcatatgcattattatcgggtatcatcatttacaatcagagccaaaccaaacaaagagaactaaactgaaataatgttctttctttttttgtcgacatctatattagattgattcaaataactttcgatgatacgtacttaataaagacaagtctacgtaaacagacaaagaccaaaaattcaaaatatataacgcaaccaaaccggtccgcaaaaacgaatacttaatgcggtaatatgcctagttaaaatcgacgtaataaaagcaaaaatacaaccattgacagccctatagtcaactatagaaaaagataaaagtcaactttaaaaattgtcaaacgtttgtgagaaaacttgtacgtttagcaaaaagagattttgatattagttgcgttgccaaaagaagagagtaaactgcctaataatggacgtaaacgaatcaatatataactattgacaacctaaattacgtagtcaactgtataaaaaacgatcaactctgtcaattcaaaccttgacattatttgccaaaagaagagaagaaactgcctattaatttcaatataactaaaattattggactaggtctaaatagggtaaccaataaatttgaaaggtacatcttataaattacaaaattttggaaatttcatggaggcaattaagatttatgggcccgtggcaccccatgtgtttggatactttgacgatatttcagtttcaataatacatcattactcatggatgaagatgaaaaatagttttgtgctttaaagacagaggttgatggcttttgtggcatatctctctatagatcaccagtgttgacaattcttgtgttctgtcatctacagaattattcataattgttcatgtagcacaagtttttaaaacgatgaattctttaaaataattgacaatgactgaatgaataaatttattaaaaatgattatcttaacaaaaatacaagttgcaaccaaagaaatatatgattcatccaagtagtatataaaaataaaatctcactgtctatatatgtctctcattaaacacccaaatcaaatcgaaccaactaacacaaaagaaaagaaaaaaaaaacagagtatcaaacatgtcaatcttgctctgtttcctctgtcttttacctgttttcttagtttctttatcaatcttgtcaaaaaggctaaaaccctcaaaatggaagcttcctccgggaccaaagacgctcccgatcatcggaaacttacacaacctcacaggtttgcctcacacatgttttcgaaatctctcacaaaagttcggaccagtgatgcttctccacttcggattcgtccccgtagtcgtgatctcatcgaaagaaggagcagaagaagctctcaagacccaagatcttgaatgttgcagccgaccagagactgtagcgacaagaatgatctcttacaacttcaaagacattggattcgctccttacggtgaggaatggaaagcgttgaggaagctcgtggttatggagctcttgaacacgaaaaagtttcagtctttcaggtatataagagaggaagagaatgacttgttgatcaagaaactaaccgaatccgctctgaaaaaatcaccggtgaatctgaagaagacccttttcacgctagtcgcgagtatcgtgtgtaggctcgcgttcggggtgaatatccacaagtgcgagttcgtagacgaggacaacgttgctgatctagttaacaagtttgagatgctagtcgctggtgttgccttcactgatttcttccctggagtgggttggcttgtagaccgaatctcaggtcagaacaagacactaaacaatgttttctcagaacttgacactttcttccaaaacgtgctcgatgatcatattaagcctggaagacaagtatctgagaaccctgacgtcgtagatgtgatgcttgatctaatgaagaagcaagagaaagatggagaatctttcaaactcacaacagatcatctcaaaggaatcatctcggtaaatcttcttcttagacgaagctaaactcttgtaaagatttgaacttacgcgtctgtgttttgtatcaggacatatttcttgcaggagtaaacacaagcgccgtcactttgaactgggcgatggccgagctgatcagaaacccgagagtgatgaagaaagtgcaagacgagattaggacaacacttggggacaagaaacagagaatcacagagcaagatctaagccaagttcactacttcaagcttgtggtcaaggagatatttagattacatccagcagctccacttttgcttccaagagagacaatgtctcatgtcaagatccaaggctacgatattcctgtgaaaacacagatgatgatcaacatctactcgatcgcacgtgatccaaaactatggacaaaccctgatgagtttaaccctgacaggtttcttgacagctccatagattacagaggactaaactttgagctgttaccatttggttctggccggagaatctgtcccgggatgacgctgggaatcaccaccgtggaattgggactgttgaatttgctttacttcttcgattgggtagtgcctgtagggaagaatgtgaaggacatcaacttggaagaaacaggatcaatcattattagcaagaagacaacccttgagcttgttccacttgttcatcattgaaatgacgatcatgaaacaattagtccataagattatgtatttgtatccagcttctttatcttgatatggttgtaatcataatctgaatagtgatatcaacacaagtttttgttttttaaacaactaaacacaagtgtttttaaacaattaaattatgagaattaaattatttaattagaactagttaggataaaagacaaattaattaattagatccgcaaaacgcattactatatttgggttggccgcccacgttaccgtgaatagaaaaggtatttaacagagaccaattatcatatgcttaaattaaataacaggtaggattagttaacattatcaaacaaagaaatggttaaaaatgaaacaagaattgaaataaaagcaaaagaatgcttcttgtgagacaactatagtgttacaacattgatgaaaattgagatgggtttttctatccgacgaaatgttacaacatcaaatcaatagtagtttctgtaatcattcctctggtaattctgattgtagttcggctgatttaattcagcagtaagttcagaggacaaggtactagtcgtcttcatagctcttccttcaggttccttgagatacatccggtcatctaagtacgctgtgatttcggctatgatcacaagtagatccgacgtgtccttcttcgcccgcaatttctgcaagaaatgctctctcacaacattcacaaccttcagaaactgagatttgtacctctgatgaagaccaaacccagccgtctacacataaacatataccaccgttatggttttaaagacgattttatatttagaatcggtaaccacaatcaatgcaaacctggagaaaggagttcaaggctgtcgcagtggctctgttggctgggattttgttaaggaaccgggctaaccaagcccatccatgttctatcccatgaacgttagtagcattgccaacgcggatatcggtctgtaattaccattagaaaaagactcgcattagcggattatggaaataacaatgcataagagatagttgcataaaagaggcaaaaacctgaacaagtgcaccgtagagcctcattatagaatctaggcgttcatatgcgtctgaatcccaagctgactgaattcattaggagataattaataagaaagacactattttttcacaattctgtcaaaatagatttcttaagaagtttatttacctgtgagtttacaatatgctttgggacagtgtaaatgcaagctttgtggaattccgcgagaagaatatccataacttggggaaactgtaggcataaatggtagattatattcaataacagtaacaagaacaaaaatgcactgtacaaatcaaaagtaattttgtacctgtgagttgatgtaaacaatgacatagctgcatgcaaaagggtttggtttttccttagtggtgaccatctgaaagaatcagcaaaacgttaatgtcatcggttcacagtttcctaatcatagagtccagaagataatccaataaatgaacgtatcaaagagttcttcaccaattagatccgagcacaacagtttgagtcattttcaacattcaacaatagatgaacaagtaaatcttaaacagaccagatataaaagttaccttctttgcaaaagctgcaatacttatggataccggacaacgagggtctttaaatattttcacaatatcattgattttcccactgcaaaggcccaaagtaaacgtagttaagaataaagaaaattaaccaaagtccatgaagaacgcttaagtaaggttacaccaaaaccatcttaaatgtatctaaatctttctaaccaaaggcttaagactgacatttccacaagttaaacaagatcaaggctatcggaataaaatgctaaaagaagctaggcatataccactagaggacaggaaaggcaaagctgcaatgaaatgtaacaaataatcttaaaaccctgtctggggaaaaactgataaattaaaggcagaaaccatgaaccataccttacactatcctttgtcccacttatttgccttatcactcttccaatatgcttctcaaaactgctaaagttctacaagtagtaaataagcaacatgacttgtgagcaaatgttgattagacagacagataaaacggtaaaaagatgtagatacttcatttgaacgtgacttaagcgattggttcgttgtttctagttcttcgagctttttcaatctgtggttctccaatatcaaagcactttctgcagctcggattgaattaccttgcacaattaataaaaaaataaacacagtaagaaatgagatcacaatcttcaatatgacaaagaaagaacaatcacagcaacatagatgaaaatagatactaaataaaagatagctcacccccagcttgagcatttgatgtagctgaactccccgtaacactctctatcacagccttctgttccgcaagtttttgttcggcagctttgcgatctgctacttctttttcagctacttctctggctgcctttctctcaacttctttcttttcttcttcagctctgatttttgctagcatttgagcctctgcgcgagctttttcttgacgtattttctcttcttgatgagccctttccttcctcctggcctcctcctgagcttcctcgctccttatctttctttcttctatttgcgatttaattttatgttcgcgttggactgcagtcagatgggtatcaagtgcttcagcactgaaaacagcaaaagaaaaactcattaagaatttggagacaatggaagaagaaaaatcacagtaaatgaactgaactggtaagaaaatgtattcctgaaactagaatgctaggaagaatagcttacacttttcgctgatattgaagatcaagtttccgttcaacttctttccgagtctcactgtacttttcaacccgggctatggcagagagagacgtttcaatctcattcattatttctgtttcaacaactgatacttgattcctaatgtcgtcctgtaattaagagaaccaaatgctcaattaatcaagtacaccaagcgaaataaaacattccacaatatgtacctctttattaacaaaacaaaacaaatctgcccaccttgatttcggtttggtggtcgttgataacctcatatagggcactctcagccagacccaacttattcatcatatactcaggttcatgatcaaactcttcatcagattcatcactgtatgaacaaaaaataaccaataaaaacatcaaacaaccctcaatacgcctttcttaattttgaaacaaactagcaaggaagagttggtgatgatcacctcaagtaaagctcatcacaggcaaaacgttttcccgctgtacagatttgactatgatcttcttcttcttcctcatcatcactctcttcaccttcgtcactctccatctcatcttctgagacatgcattacaaatcctccacctctccttcccatccttttaacataccaatgaacaccaataccaaacaaattaacacaaatatttctgaggccattgttattggtcctaattcaatacagaactccagaatgaagtaaacatagatatatatataccgtaaggttgtgttagtaattggctgaggatacattgagaagccattgagcttcttttcaacagaagcaatctcagcgaccaaactctcgaaattccaattaggctcaggatcaatgctaatcccatcaacacttttaggacaaggaggttccaaaacaatccccctgcaaaagaaaattaaaacagaattgaaacagaaaatctcagtaaaatcccaaaaagaacaaactttgtttccaaagatgagaaattgaaggaacccgtaaaagaagagaacttacattacacaattgggtgattccctgataacaaaacagaagaagcaataacacaattagtgaatccttgataaaccctataaacccccttgaagcttcaagacacaaaacaatttggttcactcataggatccttgaatcatattctttgctccacaagagatagtctctggcttcttctgagcaataaagacgaactcatgccttgttttacaaattcccataaagccccttacctttaaatttaatcgtactctctgaatcgaagattcttgtgctgcacaaatctcgatgattctctaactcaactagaatacaagctttaatatccccaacgggacgaagaagcgtaatatcaacgctataggagccgatttcacttaacccccaaaaaaatggaaactttaggatcggagaatcggaaatcacgaaccaaaccagacaagagatcggcttcgttttctaaaagttcaaaagagccctatgctcgaaaacgatgtcgtttagaattaagttacaaacggttatagagaaccagtccagtcggtttaaaatcagatcgatcgtcgattagattctccaaattatatatgtgtggaaaatatgcttagacctagaccgtttcacagagtccacaagattgggcctaaaaaggccttgtaacattttctttcttatgaaaatcgtttttttttccagaacaaagtttaaaaaacaaaatactgtaaaaaaaaaaaaaaattgtcggtaaaagaaactaaaatatagtagcatggtttacgaaaatagctttttcatgaagtagagttttgtgatgacaaaacctaatccatatataatgaaacgtaccaaaaaaaaaaacttagatatatattcagtcaagttatgtttgttaaatgttatacttctagacttctagtataataactagctttaagaagtctacgtatatttgtgatatttaaaaatgagattttttctttctttcttgaaggtaagcaaaaatctctctcttatttacgaagcaacaaaatcttgtgtttagaacaaacacaaaaggagtatttacttggacgtaggttaaacttcaacggtcgtggagtccaacgcttttaagtctcccttaacttgtgatttgtgaaaaagtgtagtgaaatttataattacgagacagtaattgtatcttgcaaataaaattacattcagggaattaattaccaatatcagatttcttaattgttaattcatcattaattttgttgaaagccaattagtggggaagggttttttacaaagtagctagtgaagtacaatgctaaaatagctgtattacatacagctgagatgaataaatggcattgaaatcatttatataaataggttaaataagtaaatagattcagatagttggtaacgcatttggttttgggtacgtacacacattaaacgcatatatcaactacatggttgacaaaataacacatactgttgaaaagtaaaattatgtgacttaagcattctagatcttaattaaatagtcttcttgaatcaaatcaaaataataccactcaataccaaaaaaagtgattattttttttcagaaaatttgttgattatcaaaaatatttagtatgtcttaattaattaagaacttcatataagcaacaagtactgatcagttgacaaaaatatgtggtggtgaaaatactgctcaagttgatgcaagggtaaaaattaaaggcttttgttatcattcgttgattaacacggacaagaggctaactaatatcaaagtaaatgttaaaagcatacctaataatttacgatatatgtatgaatagtaaaggaagaacaattttacgacagagacatttactcctcaaccctctctctataaataagactgttgtcaaatcgattctccaacacacaaaagaacaaacttcatacaagaaatgacatcaaaagagccaaaacacatgtttttcattttcccattcttctgtttcttcttctccttcattgcacaaaacaccgtcccaaacatgtcttatcctctctccacaagctcccgttggatcgtcgacgagaacggtctacgggtaaagctcgtgtgtgcgaactggccatcacacctccagcccgttgtagcggaagggctgagcaaacaaccagtggacgcagtggccaagaagatagtggaaatgggtttcaattgtgttaggttaacttggccgttggatttgatgactaatgagacattggctaataatgtcacagtaagacaatcttttcaaagccttggtcttaatgatgacattgttggcttccaaactaacaacccctccattattgatctccccctcattgaagcttacaaggtactcttacaatatctcccatctctttttaattctaaatattaatgcgtttcattttatgattctttttttctatgattattctgagaatgtgaggtaatttatcttgtgccagttacattgccatttgaatttgatcaacaagaaatttagcgtgttggattgaattctgtcatgcaaatactgtaagatatatcgtacgtatatatgcatagatatacacgtgcacgtcagtacatctttttcatgtgtcatgtgtagaccaatttttctaatagaaatttaataatttttccttcaaagtttaaaattaacaaggcatatagggaggtagattgacttatgttttaatgttttagggaaagatatcgttaaacattaaaaatgtaactgttcaaccaatttttaaagtccaaatatattagtaattaacttctattcattaaaaacaaaaatttgatagaagaatgatgttccaagtttcaatgttgcttatcaaactactacacgtattgacattttagaagaaccaatctgactaaagaacacgtcgtcaactcgtgaagggaaaatgacatatatatacaaagtccataatcaatttttagttggggtttggttgggaattgttataaaagtagtcttagattaaacaaaagagagaaacatatattccggtacggtttatatcctgatatatgtcattagtcaatttcttaattaaaaattgtttggtaatgagtaattgtgaagttaatgtaagtccagaatacataacgctcgtgacgtttgtttggcctttttccttttctgctcaataacctaagtatattctcaaggacttgttctcttcttaatggggtatatataatgcacgcatctatatggatatttattgcatacatgattcttttgaaaatgaacttaacgttatgaatcatatatgtatccaaaagttggtaacttatttcgtgaaggattttagtatttgttcctgattttcaaaaactactaaatcatgtttagtaaacaatttcatagttaattaagttacataaatcataatgaaaagtagatgaaacgtgtcgggtgtcgcacggaaacttatctaaacataaggaagaagaatataagatcgcatggcatgaaaatgttaaatccatgtgagaaaactaaaatcagcaatctcaaccgaaaccgcaatcttataatagacagaaagtgataagaaatgtgaatgatgatatataatcttctttttcattttctgcagacggtagttactacattaggaaacaacgatgtgatggtgatattagacaaccacctaactaaaccagggtggtgctgcgccaacgacgatggtaacggtttcttcggtgaccagttcttcgatcctaccgtatgggttgccgctttaaagaaaatggctgcgaccttcaacggtgtctctaatgttgttggcatgagtctaaggaatgaacttagagggcctaaacaaaacgttaacgattggttcaagtacggtaacgttattatttagtctataatgcgcatatatacatgcatatattttagtcatagagtttaatgtacgtaggtatatgcaacaaggagcggaagcagttcattcagcaaacaacaaggtacttgtaatcctctccggtctcagcttcgacgctgatctctcctttgttaggtctcgacccgtaaagctatccttcaccggaaaactcgtcttcgagctccattggtattctttcagtgacggaaactcgtgggctgccaataaccctaacgatatatgtggtcgagttctaaaccggattggaaacggtggcggttatctccttaaccaaggctttccgttgttcctaagcgaattcggtatagatgaaagaggagtaaacaccaatgataaccggtattttgggtgtttaaccggttgggccgcggaaaatgacgttgattggtcgctatgggctcttactggaagctattacttaagacaaggcaaagtcggtatgaatgagtattacggtgtgttggattcggattggataagtgttcggaattcgagtttcttgcaaaagatctcttttcttcaatctccgcttcaaggtacatatctcgcaaaattactaaaagttgcaaacaacaattttgttaaagtttctaaagttttgaattgatttggtttactaggaccgggccctcgaactgatgcttacaatctggtttttcatcccttaaccggactctgcatagtacgatctcttgatgacccaaaaatgcttactcttggtccatgcaatagctccgaaccatggagctatactaagaaagccttaagaatcaaagaccagcaattgtgtttacagagcaacggaccaaaaaacccggttacgatgactcggactagttgttcgacatccggatcaaaatggcagaccatctcggcctcaaggatgcacttggcttcgacaacaagtaacaagacttctctttgccttgacgtggacacagcgaacaatgtcgtggctaatgcttgcaagtgtctgagcaaagacaaatcgtgtgagccaatgagccaatggtttaagattatcaaagccacaaggccattgaagagctcgagattgtataaagagatctcgtctatgctgtaaagctttttgacttgctataacctattagacatttattttagtggaagcgtagaacatatattgtttcaaattattaaaaaaataaaaatcttagaatatatattataaaatttcttaatgtatcatttgtttcaaataaaaattctgtaaatttttatttatcttcagttataattgatttttaattagagaaattttattaaaatagaaaacttatcaaggagtaaaattaacataactgaagaaacggggtgaatccgtaaatagtataactaatgaggagtaaaattagaattactcctcgagccgaccgtgacattgcctatgtccgccgatgaaagcgacgacgacgagtcaacaacggcgcgtgaattcgacgcgccttaaatttccgacgacgctacggagcagtttatggatgaaatcgctgagaagatcgcttcaattgatttctactgctttgccaccgatgagtcgttcgctggtatgactctgatacagtctcgtcttcaattttggccggaaaaagttttaaatttctcttccttacattgagttcttatgtttgattcatcttttctcacaattttccttgaaagttttgatttttctcttcgtcaagtttgtagatttttagcttgttgagtttttttcatctttcaagattatactatagcctatatcactgaggtagtagaaggtgaagatgttacattgcagtttttagtattaaacaaagtctaatttctccctaaagtcttaattttttgcaatgcttctactaggaacatgacttgagtaacttttcctacttgattctctgttatctctgtggacgttgattcactagtcttgaacgtgtatcttctcttcaagggactttgacgagatggttaccttgagaccgtgcctcatgtacaaggttgtagttactctggggacaactacatgatctttagcaacctttattgagtacctagacaggactgaagcagcgattgtcttcatctgtaggtaagcaaatgttttccctaaacacagccttggtccagcattgaacacaacgtatttaaattggtcatcattcacgaaattccctgattggatccatctctctggtttgaatgattcacagtcttttccccatatggattccatccttcccatggcgtaagtcgcaaagtaaacccgtgagcctttacgtatgaatgtcccatcgggaaacacatcgtcttcgatggcttgtttcatttccattggtattggagggtaaagtctcattgtttctgaaagtgctgcttgtagatataccatgtcgtttagttctttgaccgtgaagagactctcgtttttgctggttggagaatcccctcgctgtcttaagatttcacttatctcacggatgattttgttttcgacttctggatgtttctgtatcacccagaagaaccatgtaagtgcaactgaacttgtgtctcgtccagctaagatgaaacttgtgcagaattgtctaaagaatttgatggtagaaggatctttttcatcagtcgtcttgtgactttctatctcaataatccttgagaggacatcggatctgttgcctaacgttccttcttctttgagcttgcagatacgatccacaaccatcttgtcgacaaactcatggagacatcaacagctttcctgagacctttctcatacccgatgtcgaagaacttcaggggtttccatatgaaaggaggaatcatgaatctaaacatagtagattccgttgcttcttcaaaagcttgagcgaatggaacaagggggagatcagaatccagagttcctggatcatcacctagaccggcgatgcagatgttgtcaaatgtcaaacgcaagagcacatcttgaaggtcaaaagcctcttgtgatcttgcgaaactctccatcacctttaacagcttcttccttaccaaatcttgtgttgtctgaaaggaatgctccacgaacctggttgaatgcatttcggtaatgatgatccgtcgttgctccttccaagactcagcatcagcattgaagataccatcctcgagcagatcattgaaccgttctttgaaaaacgcaccttttgggaagttcttgaagttagtcttgagcatgtattcaacgttcgcagggacacaagtcacagctccatacgacccaccaagccagattccgttatagagaaaggtacctcgacattttttcaaacatcttgtagcccaaccataaacatcattcctgtgaaagaagaactctggagtaattccgaacacaggccatatcgttggccccagctttttagtaaccttctcacgcacacaacagaaaacaaacagtcccaacaaggccagagaaacatcggacagacaaagatgattataaactctctctgttaaaggcatggaagatgatatttcagacatggtaagtttctctcagtgaaatttctagtgttgtttgtggtcagatggtttgatgtgaaaatgtaatgagtaaattgaagattcaaaagagtatttgaataatcaacttcatcatgtgttttctgttttggcataagaactccacttttgttgcaatattcttgcagaagacagctagctctgaggaattagtagctagctctgaggaattagtagtctatttcaataaaagatgaagtttcttgtgggacacgaaacgttaatgttcatggcttcatgctaatgcaaattgtatgttgcagaaagcgttacaaacgcaaagaatgcttcaaaaaatgcaaaatttgcgttcatcatgtctttggtgacaatcaccttgtacgatatttatttgttgggatgttcaatggtcaagagaggatgggccgtagcaagaatgaaattcatataataggcccaacggtttgggcccagaatgctaaaaagacaaaaaatgaaaaaagagaactcactgagtgaactcgagcatcgctgccaatggactgccatatcggagaagtgagatacgactctgtttgactgtttctcacggaggatatttccagtggcggagatttcagatacagtagagccaaaactggaacaatgaatgtcaaacttcgaaaccggagatgagacttaaagtacttcagtgagaattgtctccgatggggtctccgatggagtaagagatggtttcagtcttcgggagctggtcaaaagatttcaagagttaaaattggagagacgatgaagctttcgaagagtaaagttttctctctcgaattttcctggaaaagtttgagtcttttcttagctctgtctccttttgtaactgtatcttcagtcttcaaactttgagttctaatgttaattcatcttttctcaacgttttttcttgtgagaattatgagctttctattgttttgttatcccttactttactattgtgagttccagttttgaatattttcctcgttggtttgtaagtcttgttagcttggaatgatacattttgattatcaattggattccaatcttggagttgttctttaaggaagtggtgtcttgtgttagggagaacagatggatggtgatcttagacaattccactagtcaatagggttggtaatgcagtgaaaatgataacaatgtttcttctgggagtgatctttggatcggttccaatgtttgttcatgtgttatatgagtttgggatgagttttcaaaatgatcttagagaagtcttatacataatagcaatgtaatggtatgagatgtgaacgcccgcaggaattggtgtggcataagaatctcaaaccatttgcagaagattacacagtgaaggattgctgaacaaccttagaactgattgatgttctaggcttgttattttcatcttacagattggcttttcttcagctctcatcacactcacaagccatggagtatctgtttgtgctgcaactgcgtatattggatgaaaacatttcttcagtcttgaaaacatatcaaagaagttacctgctcacacattgtacatgtattgagatgattactaattgctccaaaacaggtatatactttttcattgagatagttaaaggtcaaaaatgtttaattgtggttttagtattcaacagtaaaattgagttcctctaaggtattatagtttacaaatcttctacatggaacatgactcaagtttcttctcttccagcgaccttggtgtgatggttactttgaggccgtacttcatgtacaagttagttgtgactctcggggctatgacatgatcttggacaaccttgattgagtacctcaacaaaactgaagcagctatcatcttcatctgcaggtaagcaaatgtttttcctatgcacagccttggtccagcattgaatacaacgtatttgaactggtcgtcactgacaaacttccctgcttggatccatctctctggtctgaaaatttcacaatcttttccccagattgattccatccttcccatggcatagattgagaagtaaacccgtgaaccttttcttacgaatgtcccatctggtaacacatcatcttcaatggcttgtttcatttccattggaattggagggaacagtctcagagtttctgatagtgctgcttgtaggtataccatgttgtttagttctttgactgtgaagaggctctcgtttttgctggttggagaatcccctcgctgtctcaagatttctcttatctcgcagatgattttgttttcaacctctgggtgtttctgtatcacccagcagaaccatgaaagtgcaacagaacttgtatctcgtccagctaatataaaacttgtgcaaaattgtctgaaaaatctaatggtggaaggatcaatctcattttcccttttatgactctctatctgaataatccttgagagaacatcagatctattgtctaacgtttcttcttccttgagctcgcagatacgatccacaatcatcttgtcgacgaacccgtgcacgaccccaacagctatcctgagacctttttcatatcctgtgtcgaggaacctcatgggcttccatataaatggagggatcatgaatctaaacagtgtagactctgttgcttcttcaaaagctttagcaaatggaacttggggaagatcaacagctagagtttccgggtcagcacctagacccgcaaggcagatgatgtcaaacgtcaagcgcaggaacacgtcttggagatcgaaagcttcttgtgactttgcgaaactctccatcaccttcaacagcttcttccttaccaaatgttgtgttgtctgaaaggaatgctctacaaacccggttgaatgcatttcggttatgatgatccgtcgttgctccttccaagaatcatcatcagcattaaagataccttcctcgagcagatcattgaaccggcttttaaagaaggtaccttttgggaagttcttgaagttagtcttgagcatgtactcgacatttgcaggaacacaagtcacagctccataagacccatcaagccaaactccccgataaagaaaggtacctcgacattttttcaaactccttgtgacccatccatagacatcatttatatgaaagaaaaactctaaagtaattccgaaaactggccatagcattggtccacgcttgttggttaacttctcacgcaaacagcagaaaacaaagagccccaacaaggaaagaagtagatcgaagagagaaagatgattataaagtcgctctgttaaagacattgtagtctcttctcagtaaactctctgcagttttgtttgtggtgatgtcattgtttcaagagtatttgaagaaagatttgcgatgcatttcatattttggttttggaattacatttgttgtcttcgtgtagaattggtctatatgaagaagatgagggtttcttgttggcgacgaaacgtaattaggctattacaaattgtgtgtttattgagaaaaacccgtgaaagaaaaattccagaaaaaatgcaaatttgcctgtcatgtcttatgtgaatctatctgacataagctgatgacaaactgaaactcttagaatcaattaacaaacaaaagaaagagcaatcgttgttactagcaagtagattacaaggaataaatctgaaaaaagattatagaattttgactttagggggaagaggtccaaaacacagaggacgagatattttagttttagatatgttcagcctagttaagtattaatcaaagaatcctaatctatgatgcttcaatggcgatcccactgattcacactttcacagtctaaagactcgagaacaatcgaaagactcaagtaacaaacatcaagattgtaaaaaaactatcttgtagtgagtagtggtgacaaattcatgatttttgaggtttgatacgttatataatataaccaaaacttgtagcactctgcaaacacaattattattgatttacataacctgaccctttgtttcaagagtctttcactactgtgagtctctacttctctcctacatgaagcctaaaaacaaagctgttaataaattcgctgttgcattgagacagtaagtatgcaccaagtaaataaactcttcagtattcaacaatcaacacccatctttaagaaaaacataaattacttggtcttaataaccggacagaaccaaagactaatcaaatcctgaaccggtctggttcaatagatctaaacctaaagtataaatcaaacgtctcaattgttttttcctagggtttcaatctctctcccaaaaaccaaaacgcaaaacctccgataatgtccggcagtctaggtttaacgccggcatccttaaaggcatctggccggagctccgagaatgtcagtcttcttacccttcaaggtaaaatcaaacgtgacccagaaggttacgaaacagagctccaattgatttacaaacagttcaaaacctccgtcgatctcttccatgaactagcagctctcagtttctcctccactggtggcattggctctgacccttctgtttcgaaagacctcggcgaccgtgccatgtttctagctcacgttactcccttttacccgaagcaactcgcggcgtttccagctcaattaactggtttactccgtacttcgtgcttagctatgccctcggggcttcgaaaccatattgcacaagctctgatccttctaatgaatcgaaaggtttgtgcttttatctgaattgattggaaaaaactgtcatttcttactttgtgtttgtggtgtgtaaagtttgagactttaaaaaggattggttttgttctgagaatgttttctttgtggtgtgaatagagtcttgtcatcgaggatttgctggctttgtttctggatattcagactcttggtgacaaaaacctgcgaaatcttgcttttggtcacattgttcaaaccattcgtaagatgagtatcaccgatcccaagcacaaatcacttcagaagattgtaatctctatgttggaggtaacactttttttcatgggattgcgttatgacttataatgcgagttttagtagatgatagttaagcttggtgtgttttttgtttgtagcaagaagatgaagcaaaggctaagagagcacttgctactctctgtgcgctacacaagaaaaagatctggcttggtgataaaaatgaaagagttgcaattgcgatttgtgaagcctgctttcattcttcacctaggtatatccttattttcttctaactatggagtatgttgatatgatatgattttttgttggtcaaattactaacttcttttttcatatgttcaggattatgatttccgctcttcggtttcttcttgattatgagaacatagacgatgatgacgatagtgatgctgaaagcgatgatgacgaggagtcaaagaaaatagatcaggttgtgattaatcgacaggctgtttacaaggtaaaacaacatttcattcacatatatgaatacttttgtcattgagtacgaagaagacacttactacttgttgatgaaagtttccgcctttatacttatctatatcattttcatcatttcaaactagtatgaaattaggtgatgtttatatgatatcatggaacattaatctatagggaaactgttttgagttagttttgtataatatttttccctgtttgatgttaggcaaacaacaaaggtacatcctctagcaagaagaaaaagcaagcaaaacttcagcgtgcagtgaaaagtattaaaagaaagcagcgttcgtcgtctgagaacaccacttcaacattttcacctcttaatcatttaaatgatgcgcaggtttacttcttagctttgtgtagtgcagtcacaatggtatggaagtggctatgattgaatgtttgtttctgttacagaaattcgcagagaaattgttttcccgtcttcagaccatcaagggcagtggtgaacgtgttgaggtaaactatccgtttagattaaccatctattctaatagaaacatatgagctaactaactgttgattaggtttcccactatatgatctcagttgattattttttcccctgttgaatacatttgcagactaggttgatgatgattaaagttattgctcgcacaattggtcttcacaagttgcatttactaagtttctatccttttcttcaaaactatgctctggtatgatctgcttaccctctttattattcttctgctaactgaaatttgatcgaaatcagttattaaatgcagccgcatgtaaaggacattacacaaatacttgcagcagcagttcaatcttgccacgatggggtatagaaacatttccccgtttaaacttgatttttttttttctcattcttcaatccttctaaatatattgtattgagcaggttccttctgatgttgtggagccactgttcaagcaaattgtgaatcagtttgtacacgacaagtcacgtcctgaggtgcgatttcgagttttttcacatcaagggacataactagaaagctcattctatcatttaatattttcctttccaattcatttttttaaacaggctattgctgtcggactcaatgtggtgcgagaaatgtgcctgagggttcacgacgtaactagttcttgactcgctgtgttttggtctaataaaaaagtagtttatccagtatcaaatctgttttgtctgaatagtgttttttctcctgttcttcagttgatgacagaagagttactgcaagatcttgctctgtataaaaagtcccatgaaaaagccatctcagcagcagcacgttccctcatagcattgttcagagaggtagccgaagcatttgatttgttggtttgagcaaaataatcgatgtatgtggtttattgaaaattgcgttctgttatctcagatcaacccttcgcttctggttaaaaaagatcgtggccgtcctggagctaccgtcttcatacctaaacattatggagagtctaatgtcttcagcaatgttcctaatgttgaattattgcaagaaagtgataatgagagtggctctgatggtgatcaagacgatgatggcgtggagttgcctatcggcgatgatgttgagcaggagctgatacctggtgattgtggaagcgaggacaaagctgaagaagattccaatgatggtgatgatatgaataacactgaagacgatagtgatatagatacttcaataggtggtgatgaagatgaagaggtgaatgacagtgatgaagctgatacagattcggaaaatgaggaaatcgaaagcgaagaagaggatggagaagcttctgattcttctgtagaggatagtggaaacaaagagaaagctaagggcaagaagaggaagattgtagattttgatgcgaatcttctctctgctgatacaagcctccgagcactcaagagattcgcagaagcaaagaacgaaaagccttcttttgatgaaggtgatggcatactttcgaatgaggacttccgaaaaatcaaaacacttcaggtattagagccctttctcttttgtatgtcctcttcgttctgtttcgtaaataagtccaacgttactgatgttgtgtgtcgtatacaggcaaagaaggaagcaaaaattgcattggctcgaaaaggattcaaggttccgaattctgatcagctaagcaagaagcgggtcgatccagccaaacttgaagtaagctgttactatgagaagctccaatttagtcacaaaatgtttggcatactcagtactaagtgattttaactctacccacaggctcacataaggcataaactaacaaaggaacaaagactggaattagttaaagcgggtagggaggacagagggaaatacaaatccaaggctgccgtcaaacagaagaagactggaggatcaagcaataaacagaaggagcacaggaagaatatgcctcttgctgcaataagatcaaaggctggtaaatcaaaacgaattaagaagatgaagaatagcatcagcggaagccagtttagaggaaggaaagcttggaagtgaaaaaatgaccaaatctctcaattcttccgtctcaaaactatacacagttttgttttggttcagtttttgcataattatgttttgttctttgtctgcagttttgatattgaggtatcggcataaaattgtcgtttttcctgtcatcatacgttttatttacagtgggattaataaattactattttgttccttcgtgccatatactttttttggcttttaccaccattctatgaactataaacaaacatgaagattggaattctgaaggaaaaattcatcatttccaataattagtctctttgacatctacagatacacgcacaccaacaaaggttccggccaaattttcacagaagcacaatgagggaatggtgaagattctttctatatgtattaaattatcaaagcacaaaaaaaaaacatgggataattgatgattaaagaaaggtagacgatgaagaagatgagagcgagttacgctgttgttgcttcttgaaaatgtcagtgattctatcccaatctttcttctctcttgcttcccagtaacctcctagataccgataatttccttcttcatctttttcaaaccatcttggtttccatcctttctcctgcagcctccttgcctgcaacacacaaacggcacactcttctatattcagtcctgtggtcatgcacaattatgtatatagtcaagattaacatattctcctatagattttgtacctgtctctgtaactgttcaagtctcagtttctcggcatttgctgactcatattcaccgttttctaagtgtctttggtctggtctcagtcttgaatctgttggaggcaatttgtctatcatcccaggagttatctcattgagagagatcgcaaaaggggagagattgtatcttgtttttgtaggagatttgtctctttcccacagtaacactgcttctgtcattggatcatacccctttggttttgttgtcggatctcccaatacatagtacattgcttcatcccatttgcctatcagtatagctactttctccccggttctgttgtcttgcacaaacccatgaacctgcattaccaaattccatttaaaggcctgttcatacgagcagaaagacagaaataaaaatcattctactacctgacgagggtttcgatctatgactgactgctccttgaacttcaaccggcaggaataattgctaccgcctttgatacgcatggttccataatggtcgcagtaaagtttaccaaggatgatgttgtatatagaagtggtaaccttgctccattgatatatctcaccatcatcaaattttaatgttaagacacccactgggtcaagctggattgaccgtccccaaaattttcctttgatatttgagtctccccagaaattccacccttgtccctcacaatggcaagcaacaatcataggatgatgactcacctgaacaagagaattatggtggcaaagaaggtgaggggttgctattatatatgtctgatagatttaaaaagataatgaagtgttaaagtttttcacattcatgcatgatttttcaatacaacttctacattagaatgatgtgatggttgacttgccttctcagagaagaaacgaagtcctttatctggataatcagcttcataggtctcaccaagtagagggttgaaaggtttgcattgcctgccttccgtggacgcatagccagatacagcaaacgctgctatgtttagaatcctcatcaattcattaccctgaaatgagaaagactgttaggaggccatcaaatataatgttatagacatttcaaactaggccagcaaaacaaacgatttggaaacatatatcacataacaacaaaccgcctacttgaagaataaaccactctttcctgtatcgtactaaaattaaaaaaaggctgaatgacctgacctgcttcccccactcaagtgctctgtctatcaagtatgagtactccaaatcttcaaagcacttctgcagagaagagagaggctcattaaaatatacagggagacaaactccagacaagtctttgccaatgttttctttgatgattgaccataatccaactggcttttccttctcctttggctccggtaaattatcccttcttctgacatatggatactgcgggatcctagcgggaatttgcagacggtctgaaaagaaggggtctttatcgtagatagatccatttccttcagcttctctgctacggtaagaagcacttctcattgcttcggctgataggatatcatttgtatcaaagtaaggtacatcatcttcatcagattcaacatctgctccatcttgactttcattatctgcctcagaatcgcttgcagatacctctgacatcactgaatagaaatctgtaggagaacaatgatgttaaaactgtctcaactgagtaaggaagaaattacaatcactcagacctccaatcgttccatatataattaaaattagtgagctaatatacacataaaggatgcacaaacatgcagttgcaagcaatgtaatgtaactcaccactaaatcgtcttccctgtccacagcaagagtcatgctcctttgtttcatcaacgacggtagcttccagctctattttctcagtctgcaaataattaaaaaaaaaacgaatcaaatattctactgtgaagctgaaaaactgtaaaccaaataaagcagacgatagacaggagggggtggtagtggaatatgttcaatgtgaaatcgcagtgagattaaagtagagtctatggctgcaagaaacatataacccacatccagagaattgtaaaagttcgagataaagaggttcatatcaaaatgtgtgcatagagaagaactaaaacatacctctaactgtctcagtgtatccagtagtataatgtgtttatgtgtgagaaccttcaaccggttctgcaacacagaaacttccgaaagcataatggcttcacaatctttcaccactgtctcaccaacgccttcctgcagtaacttttcacgcaacttctcggtagaaacaaccgcatcttctgagggtaggatgtcgccactggccactctaggaaaaagatccttggccacctgaaaagcttctacccaagccgctctattctctttcgaaacacaacgtaaatgaagagtctttgtaccagtaaatatagcaagccttttgtcatcagacttgctcgctcgaatcgaagaaacctacaacaataaaaagcactacaaactcaactgccagttccatgcaacagcaaagcacaaacaaacagtaagcaaagagttagttataagaccttcaaatgtatttctccgaatggtttacaaggccttgaagctgctacagcagaagctccaagtcggttgctactaccgcagctagctttcctaatgtacctcacagattcctcaccaatcactctaacacctttctctctagacggattcatcacaatcttatcaggtccatggatcttataatacgacaaaacaccatcctccagctcaaaccatctagctctccatcctttcccatagttcacccacttatacatgatcccagcaactccagctccagcaccgacgcagttcccaaagaagaaacatcctttattagaagaagaagaagcatctttcccatcgagattgacgtcgtctactacttcagaagagagtctctcaagctgatcttggctgatccaagacgcctgagtcgaaaacgacggcttagaagcgtgtttactaaccggaatagcttcgagccctaaatgatgattcgatgatttcgctacgacgggattagtccggtcatcaatcgaaaccggagcaatgcagcaaagaggattcataataatcgaatcaaaaacaacattgatcacaaaaaacagctactaagaatcgaacattgaagctagatcctaaaacaacaaccggtgatctaagtccagctgaagaatctgagatccggtgaaggagatcgaagaaatgttgagtttgaactagaaaaaaaaagagaagcagagagagcagcaatggagggctcacagatccaatttaaggcagttgtcagtaaaatttttttgtgtttgtgcagtgtgcagagactctgcatagagaagagagagagatagagagagagggagcatctctctgaaatcgtttaaaattaaatcatgaaaatagaaataaaaaaggtaattatttttactaataatgctctgagtcaacataattggtgttttctatggaccaatcctactagagcatagattatatgtatcgaatttccatatttgttttgaaacataaaaatatttaccaaattgttactgtcttttttattttttgttggtctcaataaccaaaatattcggtaccaatactcaattccatattcaaaatatgttgtgtgtttttttgttttatggattaaaataaaaggaaccaagtgttttacaagagatgtttagttgtaaagcccatataagcccaataaggatcaaataagaagttccccaatgtcgagcccagtagatgaaatgatagtccacataatgggatgaaggcgaatgagttgatccaaactctcaccaaatcgagaaccaagtttgcatgcactcaccataggagtttattttgtgttttatgtttgacgttctcgggggttttggctatatagaaaataagaagatcaaactaattaactatattaagaattgaatcgctttcaaattgattttttttaattccgtgtttgatcagtttaatttatcctaatcaaatactcataacccatatatgtgatattagaacatgaggtgatggtatactcaactgcttacacctactaactcctaattcttaaaatttgattatcaattacaattaacggttttaattataatgttaaagtccatttcaaattccagtcacaatttttattccatctaaagtaatttgatacaaatttgattttgcttcgaatatggttgttttgtcaacggttttttatatcaaatatagttttttttctcttttcaatgcaatcggttaggtggtatttgatttttccttcaaattgaattttaaaaaattcattttgttcttgatgatacagttcaatttatctgaattaaacaatcttaaccatattgaatattaaaacatgagtattgtatatttcattatgattacacctcatttacccccaaatctctttaatcaataaacttgacatgatcatgaaaaaaaatcattgtttaaaaaaaaaaactaaaacaataaacaaatatttgttttgatagttcgaatataatactgctaatacattgatgagtatttataagtaaaaaaacttgtagaatcttaaaaatatatttagatcgtcctttatcaataaaatttgtacaaaatgcgctttgtaatattttttctttacggttacatctttatattttatttttattttttgctaaagtgaaaaaaatagtgcattctttagagctttgaagaacgttggtagatcaacaatgagtcgtctggaaaacatgtcggcaagagatgcttacagcaatgtgactgatctaaaaacgatagccaacaaattcgtaaacggcgaatattaaattgaaaaaactagtgaattgagtatcacatatctgcgttaacgaatttagtaatttgttggacgaatgtagtaattcgttagatgaatgagatcaatcaagccatttaaaaaaatatatattcattcgcattgtagttttacacataccacctaacattgactataaaaaatatatatgaaaaagaaatctgttgcaagggagactaacctagcccaacaatttttaaagctctagggcaaaataaaaattcaggaccttatattcatgttaaaaaaaaaaatttatatatttgggcatatttatactaaaaattattttgtttgggtcttttgaaattttattaccttgaaaacaggtcatactttacacttaaatgctaaaacattgggctacattttcattttgttatttaaacggaccggtatgagtgagacatgcatgatgatttaagcttatctactcaataggattaggctgagactgatatgattccatttttcgagaccgtgtgaacatagttcatgataactactgtgtagtaaagtagtaacaagacttcaatctcaagttttaatgggttttgttcggtggttcaagcgtccttatcataagtttgtttttctgtcttcactacacacatcttaatattgagttaatccaattaacagtaggcatatatcatatatcatatatcagaacattatttgtgttatgattaccttttatattatcaaagtccctagttaatttggtttgtttacaaagacgattacagtatattatatatccaaacaaaatttgtaatgatgataatcagcccagtatggttcaattcaatgttattgaaatttgtttggtttttaaatcagacttggttattgagtcgggttggaaaaccaaattaaccacagcgcataaggacgaagccaaaatttaaaacagtagttgtacataacttcatttgttttttatcggaaaaatctcacacgataaagtaccagtcgacgacggcgactttctctatgatctgaccgtttcgctgaatctcacgtgaatctctgattttccgggaaaatcaattttctctcattgtctctctccctacattgtttctcatagcctacgagaaattacgtggtagcttgtcggaaactcaacttccgttgacggaaggcgcgagaaagaagcaagcttaggttcgatcggaaaattctagggttctctagtgtttaaacggtagagataatcgatctctaatcggatactgttttggatctccattcacaccctctggtgagctgattttgctttagagatcgccggcttagtttctctaatggatccgacttctcgacccgctattgtcatcgacaatggaactgggtacgttcaatgataggtttgatttgtttatgcgcttaacgtgttcgatgaaatgctgcaattagattcattcttgtgtgtgtgtgtattgcaggtatactaaaatgggatttgcgggtaatgtagagccatgttttatcttaccaacagtagttgcagtaaacgagtcgtttttgaatcaatccaagagttcttctaaggcaacttggcaaactcagcacaacgctggagttgctgcggatctcgatttctatattggagatgaagctcttgcgaaatcgcggtctagtagtactcataatcttcattatccaattgagcatggtcaagttgaggattgggatgctatggagagatattggcagcagtgtatatttaactatttgagatgtgatcctgaggatcattattttcttcttactgaaagtcctcttactcctcctgaaagtcgagaatatactggagaaattttgtttgagacttttaatgttcctgggctttacattgctgttaattcagttcttgcacttgctgctggctacacaacatcaaaggtatgttacacatttcttttctccaagtatttacgttgtttgctgtgatgaaatgctatgtattagcctacttgctgtgatgaaatgatatgtatttaagttgtttgctgggatgaaatgatatgtatttaggctattagttgtttaagtttgcttgtagactgtgtgaatccttaaatcaagtcataattatactttattcagttttggttttagggactgagtctcaagaataggttagtgtaacctcaccaacattagacaatttccgagctttgtgggatttagcaaatattaaacatgttctcttgttttttgttctgtctcgttatgctcgcctcgcctcttaatttgacttacaattcttcttagtgtgagatgacaggggttgtagtagatgttggagatggggcaactcatgttgtacctgttgcagaaggttatgtcatcgggagctgtatcaaatcgattccaattgctggcaaagatgtcaccctctttatccagcaactcatgcgggtatgcactaatttattatcttaatattagtcttggtcttcttttgtagttggttttcattctttctctgtgacattttaagattttaaaggcacagaagttaaatgtgttaaatccaagctttgagtatggtagctaggcttcctgtttatttgttttagatgttgtgctcatatgcttagagagggtgtttactggtttagattaatgtattaacttcatgtaacttctcgtttcaatgtttactgtaggaaagaggtgagaatataccaccagaagattcattcgatgtagcccgtaaagtgaaggaaatgtactgctacacttgttctgacatcgtaaaggtaatccttagtggtgaatattcaagtcagataatattaatatatactcttctgaaaatttattactggcctgtatgctgaaatcgcttgaaaagaatataggaatattgataaagaacattcatatggttgcaggagtttaataaacatgacaaagaaccagcaaagtatattaaacaatggaaaggtgtaaagccaaagactggtgcaccatacacttgcgacgtgggatatgaacgattccttggacccgaggtttgttaccatctatctgttataaaaagttgtaagttgataagataaccagaatcggagactggatatctttactggtgcatgagtttctagtatgtcagtgagctgttcatgatttgttatcgattataagatattttcagcactctgttctgattactgaacggtactgatataaaactatgctctctcagaaactcaaattaggtaattacttagtccattatgttaactggaagtctggaactaattcttatctagttagaattcagctgtcactactggacccataggaagctaatctcctttgtatctctataccaagagagtaactggaaagtggaacataatttcctttattgttcttgcgtttttgttctgctattaccgatgagtaatgttgagattttgtgtgttacaggtgttctttaatccagagatatacagcaatgacttcacaactactttaccagctgtgatagacaaatgtattcagtctgcaccaattgacacacgaagagctttatataaggtttgaaacgccaaagactggtcagagttttaagataatttccaatccgcaatactgatgaatttgtgaaatcatttcagaatatagtgttgtccggaggttcaactatgttcaaagatttcggaagaaggttacaaagggacctcaagaagattgttgatgctcgtgttcttgctaataacgctcgtactggtggtgaaattacggtaagaaaattgtatgatattctggaaaataaaagtgataaccagttttcttaatctgaggtgatatttatttataaccacagtctcaaccggtggaggttaatgtcgtgagccatcctgtccagaggtttgcagtttggtttggaggctctgtgctttcatcaactcctgagtttttcgcggtatgcaaactagtttagagatccgctagtttgaagctaaacctcatggcttgatcgtgttttgaaacaagatgtatttttgttgttgcagagttgcagaacgaaagaggagtatgaggaatatggagcaagcatatgccgcacgaatccggtgttcaagggaatgtattgaagctgcttcataaataattcaccagcagattctgtgaatgtttgtctgctttactccatttctattactgactttagggttcttgagtacacacagtgtaagctaggcttgatgtagaagtcatattattattcagacaaattaaagaaaaaaagtatgtagaagtttgatttttttttcatattattttctgttaactcaagcattaaattccacagaaaagttccggattatcaatcgtctaattgtcaagttatcattttttataagcttttattccactcaagagcttaagttctagatgaaacacatgataattaagttttgtctactttatgatgtgttttattttttataaattagttaataatatttaaaattagacatgaatagataaaccttcttttgggtaaaatacacaaaatcattttcttaaattactcaaaacaaatatctttcattactctttggttttggagtaatgtaagatattctgttgttaataataaaggaaaaaactttcatgggaaaaaaaaatatatatatatatctttcatatgttctacaaaatacattattacatttatagcttgttgtataaacgcactaaaaaaacatgtaaaagaaaaaagtttgttaagacaaactgttgacatcacggtgaagctcttctttcattttttcttcttctatcggataagaaagagaacatcccgagtctcgacgaatacgactctcttcctccgatctcatcaaaaactctttcgctaaagctctgtttctgggcgttcaaacaattccggagtttgtcggattctcaacttccgtatacggagaaggtcgagcaacaagtagtcaaagtaagcaagcgtagttttttctctctgtctttttctttccgatcctcaatttcacgaggcaatcaattcaattctattcaattcgatgttcttactctctcgttgaactgtaactttcctcgtagatctagtttgtttcttttccgattttgtaagaaccctaatgtttatagatttctcggaaagggttaaaatttgtgtagccccttcattgtaagtcacactatgtatgtaatttgatctcttctatatgtatttatgaaatcttgtaacacccttgtttaaaaaatcgagctagatcccaaatttttcagatctgtaatctaaagttcctcttttttattttaattcggacatattgataatggcttgtaacaaagtctcagcctaattgaattggcagagttgtaatttctttgaaaagatgtattttttttttaagttggtcatgtaaaaaagcaagcaaggatattgtgtagaatgttgttatttgtaattttctgtggaaggatgtattgttacagttttttaatcttcttgtattttctggccagtttgtataaattcaatgactgaagaaaacgattatggaggtaatcagaagatacttcatcaaggaagtggaactatacctgctctagcggatgaagaactgatgggagacgatgatgagtatgatgatttgtatagcgatgttaatgttggtgagagtttcttccaagctcataatcagcctcaaccaccagctcaggtcaatacgagtaatgcaagtcttcaagctcagaatagtcatgttgctgctgaaccgaggatgggaattgtatctggaggtacagttgaagggaagtatcgaaatgatggggggcataatggaatcagtggaccagacacaagatcagatgtttatccacaagcatcttcttttggagcaaaagggttgaatattgatatccaatccaacaaaatcgctcaacaaggatcaacgactgttgtgttaaacaatcatggtttttcggggaatgcggtaaatgtgcctgagatgcctgtccataactcctatggtgctcctcctcaaggtgctcagcagattcctgttagccagatgagtgtgaatccaaatgttatgatgaacaaaagccctacgcagtcatttgttgtggacaatggaaacaccatgctttttgttggagagttacactggtggacgacggatgcagagattgagagtgttctttctcagtatggaagagtcaaagagatcaagtttttcgatgagagagttagtggcaagtctaaagggtattgtcaggttgaattctatgattcagctgctgcagccgcttgcaaagaaggaatgaatggtttcattttcaatggtaaagcatgtgttgtagcctttgcctctcctgaaacactgaagcagatgggagctaatttcacagggaggaaccaaggacaaaaccaaattcaaaatagaaggcctctgaatgaaggaatgggaagaggtaacaacaacaacaacaacatgaatacacaaaatggagatggtggaagaaattacggtagagggggatttgcgcgtggtggccaaggaatgggcaaccgtggaggtgcttggggtggtgcaatgagaggtagaggggtaaacaacatggctagtggttctggtgctggaccgtatgggcctggactagcgggtcctgcatttggtggtatgatgcatccacagggtatgatgggagctggtgggtttgatccaacgttcatgggtcggggtgctggttatggagggtattcaggtattgcctaccctgggatgcctcattcttatccaggtgttaatgcaatgggaatggttgggattgctcctcatgtcaatccagccttttttggcacgggaatgggaacaatgggtagctcagggatgaatggagttcatgcagcagcgatgtggagtgaggctaatggaggtggtggtgaagagggtggttctgaatatggtgggtatgaagatgaaacccaagagaaagaagaaaagccatcacgagataaagaacgggctaccacagaacgtgactggtctgagaacagtggtgacagaagacacaagagtcaccgtgaagagaaagatagtcaccgtgagtataagcagcagagagaccgtgattctgatgagtttgatagaggacaatctagcttgaaatctcgaagcagatcaagaatgtccgaagatgatcatagatccaggtcaagagatgcagactatggaaagaggagacgaggtgactgagaaagaacctcccatgttcttcgtctctttagatgccattttaagttactctctactatatctatctctttatatcatcaaaatattggatacaatgtttctctatactttatttactgatagtcagtctttggagactagcatatatatatgtaaactatgttttgttttattgatggttctatttgttattgtcaatcattacagcttctagaatgtcgtttggttaagatgaaatgagatctttattctttgctgcattcaagctttttttttttctcgcaatttgacaattattaagtatgtaaaaactgagagctttggcatttgcatcatatcatccaaaagccttaacacagttttacattctatacaatacatttaccatctaaaaatctgtacaaagttttgtttgtccagattctatagcagatttgagtactcatagtaaaccacaaagagagcttctgggtaatccttgggaaggctattgatgtagagatagaatctgaacaaatcttcccttgaagccgtccttgtatccaccacatcgttatcacccgcaagcacccacaagtcctctgagttcactctcttcatgctgcctcgacaaaacgggcatgactgagacttcaagttcctgcagatttgagaatcaacgagattcagtaaatgcatcaggtcaaaaaggtctaaaaactaaaaagtgtgtgtgtgtatataccaattgcgatagcatttgatgcacatagaatggcaacaattaggcaacaccattttggtgcaagtttctaaacagataccgcattcttcttcacgctctaaaccggcattgctgaatctactactacgagcctcttttgttatcttcttactgagtcttttaaggtcaaacccgatgtctgtggtttccaactcatctaagttgctgtgtaatagctgcagtgatggtagtatcacacctataaaacacaaaacattaaggacaaagatggagacacaaacagactcatattaatcattcaacatcattcccattgtaaatacccgcaatgtctcaatcgaaaaccttttaaaggaatgaccatgtccacaaaaagctttagccaaaaacatgaatattataacattagtgatcgattgttacgggtttgcttaccatagaactcactaatcgttgctttccttccgtgcgtggtaagcttaggttgtccatcagactggacctattcaagcaaatatgacaacaaattgagaaatttcagccaccaaagaaaaaaagcttatagtcaagacatcgatatccccattaaaagatggcattttgagatcaaataagacttaaaaaactaaccttgtagacaagaacatgaaagaggtttaagtagcgaggaataagacatgaggaagaaagatcaatccaccggagcaagaagagtaataatgaagcaaagttactatgaaccagtttcatctgaagccgcacattgttcttccccattggaattgcttctgccctgaaaagatataaacctcaaagttctcatacacaattcatcgaacacaacatgtgcaataacaaagtttagggaccttgagccaaaacaaaaacaaaaaagctactaaatttgcttaaattagaatatcaaaaccaacaacaactttccagaatgttctatttgtgaaagctttctaaaactaaactaaaaatttatcggagtttcctaaaataacccaattttgatgagaagagattacacacagagaagagaatgacctaaaattatcatctgggttttcaattttttcactaactatactcttatagctcaactaatcaaacaattttaaactaaagtcttaaactttagaagaaacccagaaaaaggacttacaaagaattagcgtgttgaacatcagcttccaaaaccttcaaagattcatagtacgaagaagatgaagaagacgaagatatcgccaactgattatacatatctctctctctaattgtgagattacaacaaagaggaatcgattgaagaaaattcccagaaatataagaagaacgaaagagaataagatgctaaaagtgaaggagggattggtctgattgatcggaaaaaggcaagaacctaaaagacaaaacaaagaagctataaacaccgtaagaacacaagtctcacttcttcttctctctctctctctctttgctttttgcctttttgattctttgtttccggttgctagctttttatttatatattaatcatgtttgaagaaaaattcgtcttcttcttaatgacaaaattaatatgtttttttccttgtttaataagctaattaattataaactttgagttgagatggctttttgtatgtgaatgaatatgaactttttaattatttcaaagtgaatgaatataggtttaatagtcgctttcattcaaattgtaacagcttttggaataaatacctaaagtgaatatagacaaaacaaaaacccaaagtggaagaacgcgtgtactttgcctcactaataaaacatgttttccgtaattcaagaataaacccaatattattctatggtctaaaagaagacatgcgcacaaaaaatataacttaagttcaaaattatttgaatcgaaactaaatttagtttgtataaaagcctactttgatcttttaataattttataacgaaattaagtataaagtttggttatcttttgttaacaagttcctgactttaggactcatataaaattttcttggtcaataacaaatactttgtcaatactaaactgtttttcgaaataacaaagaggtatcatcggtgaaacaaacaaacttaggttaccaaactcaaatgcacaaaaaactaatctaagtaaaaaaaaaaagcatgttgtagtacctatatattcagttaaatttttaaattatccaatatttttaaattttattattactgctaaaaaatattttaattcgataaaacattccctatacgaacaaatggaaaaagatttaaagtaaaatcaaatagagatgttttttcgggtagccaaagaaagccaactaacatataacaagtggacaccacatcaacgaaactactcccaacaaggtctatccaacaagatatatcaacaccggattgtctttatagaggcttcaaagagacatgtattagtcatttaatcttcatatgggtcttacgagtccaactcctggacacaacgtacattcgctagcaaagcatctcaaacgtgcatagaattctctacgggacaaaccaaacaccaacgagcattgagagacgcgtcgaccatgcaaaagcacatctccagactccagacatacatgacactccactccacataagctacttggacggaatgacaaccatcgatgtcacgtcccatccacataaacaacactaaatagactactattttacaggtagcgcaacccagtcaaaccaccataaaccaaatctactaacttcaaatttataaataaaataataaattctactaacttggattatgcatgtgtcatcttcagtcatatcctaggaacgaagccgatagagagtatgaaatctatcaaaaccaaaaagccacaagatgaaaaagtgttcaaagatcgaacttgagaaccaaatttgtctgtacgacagtgctaagagacctcttattgtggagatctagtcattttccaagtatggatgcaagcaaataaaaagtcttcaaaaggagtagtagtagtagtagggttttttatagataagatatcaaactttgaaaataagtaactttctgtaagcacacggatgtctgtaaaagatttcgagagactttgttaggtgatcatattttacgagaccgcggaaacggcgatgtgagagcaggatcttctaattcttgcaaaccgccacaggtgtggatggctcaaccatatatagttgtgtttgagtttcctttttttctcaagatgattggttgtattaattgagataagttaatcttaattctatccatgtaaaacaagaaaatttgtggtgacatgttaatcattaaaatggttatctaaaaagacgtgctagatattttccgtgaacgggacgctctattggctcacaggagaacataacggcaaaaccaaggtaatagcttttgggtgtggttcggccagtgtgatatgcaagaccaacaagatcctcatttcgcatcgttattccgagggtctaatggagtatgatccccaaacaaaatctttcgtttcacgaatttttctctatgaaagagttgcttcttatttccaaagtttgatatctcatgtctatgaaagagtatgatcccccaaataaaaaatttgctttttcactcatctcgagaatcatacaatttgttataaagaaaaaaaaaacagaaacacattcaaattcatccgtttcataaaaaatatcgttttggagtctttttctttcaaaaaggatggcgttttacattttcaatgcaattttagtaatatccaaaattgttgattttatttgcttctctttggacctcgctctccactacttttagatcctcagctattcgcttgatcatgttctcgtcgtatttctagcagcggcaaagtacttatctatcattttatcatcccacctattgttgacatttttctttattttttcttgcaaacagttttattttactatagaaatgagattatgtaaagaagtgaagagggaaggatgcgtttatagatgaatcaacataaagaggggaaatcaacgtaaagaggggaatggcaatggaaaagcttgaagaacatgtaaacttcttttagttgattcattttcctaaaactaattaacattatgtggtttaatgtctcaaattcaagtctatattatgtatataatgaaaaaaatgattatgttttgcttatatattgctcatgttttgctatctttttttttacttatttgatcaaattgaattcctttattctaatttttaattttataatgaaatagttaacaagaaaaaaaaaagagaatgaaaaaaagaaaaaaaaaagatattatttgtagtggtaactttattagagtaacaaaaagagaagaagaagtgtgagcgaatgtaaaataaaacccatttatcattactaattttattttcttgctgatttgtattttatgcatcattcacagtatccaagttaagtaatcagagagagaaagaggatagttccggagagcgaagttcagagggaggcaagcaagcttggatacccgaagaagaagaacaacaacaacaagaagggaaagggaagcttcaagaacaagtaaacttttaaaaaaagtttgattattatgcatatgctttttcgtttctggtttatggtttgaaaaagactcagaatattatggttaatttgtatgaaagactaagaagagtttatggttgatttgaatactcgtacatttatggtttgtatggtttatgaatgaagaagactggtagttaattatttatgatttttatatgactcctatttgccttgaggatatgatttgcgcaggactatatttttgtaaatctaaatataatataatttgtttagtagattaactatatatgaccttattataaatgtacaaccctttttattatgattaagatgtcagtacaaatttcttgtattacatggatagattatatatattaacttaacacaatacaaccaattctttggagaaaaaagggaaacttacacactctatatatatagtgcaagctgcaagcaaataaaaagtctttgaaaggtgtagtagtagtagtaggttttttttttatagatgagatatcaaactttgaaaataaataacttttctgtaagcggtaggatgtccggaaaaaaaatcgatagattttgttaggggatcgtactttaccaaacctcgggaatagcgatgtgagagaaggatcttcttattcttacaaaccgcgacgggtgtggctggctcaaccctatccttcttgctccaatcaaattgatcacgcttctcagtccgagaagaaggacaggaaaccaagtctatgctaaaaatcttttcccatgtgtcttctgatggtttcaacctccaaatatcttggatcatagtatctttctcccttttcgacatacacaaactattatccagagtgcacatgtcaatatggtgaggatctgaaccagcaatagccggattaatcttaggcagcaaccggaatgtttcggtctgaatatcaaaagccactacttcgattctttcattatatggttctgtaaaccaataaaccgacccgtttgcagatgctggcttttggtaatagaatatctgatgacttggagtgcaagccaagtacctccaagcatttttcctaaagtcaaaaatctcgcactttgtgactcccacgtttggactcgacgcatcaacaatgtacttatcacaattgtacaaccacactaatttgtaatcggtggccttcacgaatgctagatgaaagattgatttcatcactacattccactcacgttcagtggggttaaacttgtggatcaaaatctgaaaccctgccggaggaagtaggcggagccaccgtgtagccggattcactacatatacggaatgtgattttggggaatggatgcagaaaaggccatcacagctttcagatatgtagatccagttgaagaacccttgagggaaattgagacgagtaaaggatagaagagaagccgattccaagcagaataacctaaaaccaatgtcagtgtctggacgaatcccggttcctcttatgggatcttcttctcctacgagcatgaccttgggatgatccacgaaggctttcttagcgatcgtcaagtgtctctcttcaaaactgcgagattcgatcgtcgatctccattgtttcgagagagacttgagtcggattagggctttaaccggaaatcttaaaaagatctcctctagcacgtcgtttggtaatgatgatggaaccattagtactcgcttctcgtttcttcttcttcttttccttagtcttcttcctctgtttctctttctttgtaatgatgatgatgcaatcacctctcgcttctctgcgtccttcatcctatgtgttgaacaaaaatctctttcgtcgtatatatgacctaaatttaaaccatcgataatagggatctcgtaattaatccccacgagtcacgcttggaaagaaaaatcaaaagaaaaaatggaactaaatcaatcatttaaatctctagatctctcagaatttggaatcaattttcaatatgtaaggttttctattctactaaatgtactaaatagaatacagaaatataacttcttttttagcaagtggcgattgtatacattatatgtaaagattactttcctattgttaaggtgtacatatttataacaagtttctatctatgagataaaaaaaaatacatggaacgttgttattaaagtatagaaaccatctaccgtataaaaaaactaaaaggaacaacattctttgtagttacatctcttatgactaagtcaagaaaaatggcttgcgattaatcaatgacaaaaagtgtagatgttaaaaaaagatgaagagtatatatatatcaattataaatacaattaaattgaaagacaaatcgtgatctacaagaaaaaaaagctacatacaaataagtatacgagtgaagcgaaccctttttgatgacttttcaggcaagcaatcacaacatataaaagagccctagctttccccagattgatagctatatatacaagtacatatgcacaaacgctgagacattcctacacttctcttcagaaagcaatgaaattcttgttgagctgatcatgaaacctaccggaccgccgtacactagcggctcttctcgcagtgaaaccaaccgtcgtgggccgaatcgatctctgcctaaccatttccacaaactcgggatcattagaatgaccctcgtaccgaatccactgaatcatttgatggtatcccgggaagaatctcatctgaactgacttgaagacgaagaaagggatcaaagcgaagaacatcacgaagagagtggtgagccagtaagatggagctggagctaaggcttcaatgaagactttgtaagcatctgtggagaagctaggagtgatggctccatagatcatgaggaagatgtaccagaatgctactgagccccatattacaatgtgttggagccaagtgaaatagcttatggctagagccatttggagattgacgacccagactacgcaagtgtacattgtcccgccgaggatttctctgccggcggttttgccattagggttatagagttggtgtttgagagattccttgcataggaagaatatggctagtgcggtaaagactccgttgaacatccatccgatgattctcttccagctgaagagaagattctgaactccttcttggtatagcaacgggaactgcaagaacaaaaaacaaaaacagagtttaattagcgattatgaggagtttgaggtttttatagggtttatgggagataatgtttgggtaccttgtaacagtaacgagctgagacgtcttgatcgaaaacgccgagagcaatgacgggaagcgaagagaagaaaacgttgaaaagcgataaaaaccagtcgttatatgcaggttgagcagagaatgatgtgtaggcttcgtataagaacacggtgacaccaaaagtgatattcttgtagaagaagtaacatatctgcaatagcggaaacagaaccgcgttagagaaaagtttgatgaatgtatagagtttatatggagattgtttctgagagagaaaaaattgtaccattgatgagattctgctgtagcaccagtgaccatggacgagcaagagacgctctaagtaacggaattgagcaatggctatatcgctagacataaccgcttgcattccttcaacaccgctgattccaacaccaatatccgcttcttgaagcattccaacatcatttgctccatctccaatcgctaaagttgtcttcccggttccagatttgaccaaccgcgtaacctgaaaacagaatcttctattaacaaaacagaatcttctattaactaaaccgaaaccgcaatagtagaactcataaaaagctacttccataggaaaagacattaccaatgccttttgtttaggtgatgatctgcagcaaataacagaggcacatcctgtagctaaatcaagaaacttcttcttgaaatcatcttcaagagcataggttagcgacttcccgtcaatgatcaacgcaaaggcctcatgtgagcttgcgctgcttgatgctgtgagtagagctttcccttcttccatttggttcaccacgctttctcttgatgcctataaacatcagtcaatccaaatttctataaatctcatcgataaaagataacgaaaatgtattattgttttgaattttatcaaaaaaagttacatgttcaattgcatctttctctccagctttctccaatgctttgatatgtggtgtctcaagatttatgatgatctgcttcatctcttgtcttagtaaactacaagcaaatctgcagagatttcgaaaaaatgtcagaaactatgaaacaaacacactaagaacaatgtataggttcaggcataagaacaaaaacaaaagttccttacccaatattgattgcagtctccattttgtctccggttagaacccaaatcttaatccctgcttgagctagcttgtcgatacaatccggaacctgaaactcaatcaagttaaacctgttatagtcctacttgacccaaatccgagtccaaaatatttttataacctttagtcttaccccattttgaagtttgtcctcaactgcagtagcaccaaggagaatcaaatcacgttccatctgttctgtgatttcatctattaagctctcacgatccgctgtcaccgagttcttagcttcattgaagttcttgctgaattctatatactcattctcatcaacctcacggtatgcaagtatcaatgtccttagccctgcatctgcatattcatttacatgttctcgagtcttctcttcgaactttctcccgtttttggctagtctttcaaacatcacactgcacacaaaaaaaagcaagattccacaaattcaatacatatcaacaagaaggcctcaaaatgtatatataatctctcaaaattttcagttaacttacttatcagctcctttggacagtaacagaagtctcccatcttcgtcgcgcacaataaccgacattctctttctcgcgctgttaaactcaagaacgtttaacaaccgatatactctgtaagaaaacagaggaatgttagttttaacctcaagaaattccatggaggttaaattccaagaagaagaaaaacatgaccaacctttcaactgttttccctgaagcaagatccaattcacggaaagatatcccgttttgcgtccggctaaagaactcaaacccgaattctcgagccgcaacaacaaacgcagcttcatcaggagactcagcctcataagagacactccctgtagcttcatcggtttcaggtatcgccgtgtgacaaacagctaacaacctgaaaaacttctgcaaaactgctgcatctcgctgcttaacccaattccctttcataaccctctcatccagaaaattaaaccctttgatcttaggaccagactggtccactacaacatccaaatcatcaccaaccaaactcgaaccattgcttctcatagccatagatctttcaacttcagttataccacgtccataagctgttcccgcgatagaacatttgataaactccattgaattgcatgtcaaggtaccggttttatcagatagaatcgtatcaaccatcccaagctcttcattgagattagacgtccttgcatgcgcaggtttatcattctcctcgtagtacataagaatgtcattgttgatgaaaagactctgaagaactttaacgatttcgatagagacataaagcgaaatcggtatgaagtaactgtatagcataaccgcagtgaagaaatgataaaccgcagccattggagctctgtctggatcaaagaagatatctgcattatctggtctcaagtaccatctctctgttcttcctccatttctcactctatcttctcttgtctcaataccaaagacaatggagccaataaacgacatcaaaaacacaacaccaaacatcaagtaaatgattttatccattttcctctcgattctgcttctcttcgatggtggatcagttgaattttgaatcacctgtttcaaaatgtcaccttcaacacttttgacacagggtacaaatgaaaaaaaaaacagatctttaaagtttatacctttgtgtcatgtccagtgaagacaacaactccataaatatactcagtgtttctaagcttagaatctcgaagaagaagctgtgtaatcgacaatggtaatctctgttcttcaaaatgtaaagttccaacaaaagtataaagatctgcatttggatcttcacatttcacaacagcttttaactctttgaaatctgaatcttcatgtaaagccgatgaagtcgcttctaagccttgtttcactttcagattcgtttctccgtcgagattcatagtctctacataacaaatcgaatcttcgtagctagatgataacagcaaaagatccgccggaaaaaactcgtctttttcaactcttactatatttccgactttaagatccctccacccttctcgccggaatattccatttccgtcgtgaaccttcactttcctattattcatttcgatgtcctaaatatagaagaagaaaaaaacgaaactttgatttaaaaattgaaactttataatttgagagaaattcgatttgagctggtacctgttttttgcgaccccaatcttcgatagcttctttaaccatacttgcggcgatgacgaaggtgagaggtaagagagcactaatggggctgtaaggagagagagcagtcagcgataagactccggtgacgaggaagtagaaattggcgacacgacggaactgttcgaagagtgattttggtatgaaagaagctagagtgtattttgttgaccggacatagtttccgacgtagttacgtcgttcagccgccggagaatttggttcgttacagtaaacaactcgtgagaaaccaggtcctcctatgtgtgaatgatcttcttgaaagtttgatttacgacctttgaatgcgtatatattgcttagatgtaatcttcttctccgacactttgtcattgtttgtctgaaaatcctctgtaaagttttgggcaatggctaaaatttaggaaaaagaatgaaagaatgaagattttttggagctaaagaatgaagaaatttgagagagaaatgttgaatttttatgtgtaattatatgagttgatttggcattttagcaactcagaaaagaagaggaacgagtgtttttttataatatgaagaaaaaaacccaactttgaacgacgactttcaacggattattattttattgacggagttttattgtttattttttcgtattttcatggtatggaagaagttgaataaataaatatcttggaaatttagaatcctagggagtactgtatatggtattttttcgattaaaattagttttgtgaacaatacatagttggcaaaaaaaaatggaaaggtcaatacgtaattaagaataattagaaacatttgaataagaagaaattttgaatggaatgtaacagtgagctagagtcttaaaatgtatagaaatctctttaaaatttttatctaagaataaacctctcattgtcttgttctagtaataatagaggaacgatttacgaatgtgaaagagccgtggacgaagacgaagaggaagacgaagtcgttgatggttacatatttatctcttttgacaacttcttggaacagagaagaatagtcaacagagtgggaactggcaactagcaagtaattactatttactgtaatgattagtgaatgaataattatattttttaattgattgtttggttctaaatttctaatgtaaggattagtactattactattattatattatcaaactaaaataattgatttccagtgatctccgccaggctctctggctcgatctcctgattaaattatcttctctgacacagacacgctttttaacaaacacatgtgaaaattaatttccacctcatcatgtattgccagttcgataatgcggattcatctacataaataatattcaagtttggcaaaagaagaatatgtcatctagctcctttgcccaacttgagctcaatgacaaataaaattaggttattttgcatattcttgttggtaattcttcaaacaaataaaatatgtttccattcataattttccttagatctacaaatagtcataatttaaagagctttaaccatagttataagcttgttcaactcatctttttccttgtatataagattgttgtacatttcagattcatttagttagtaacatgatttacatgcttatgatcagatatattatttttagttatatattatcacaatatgttcatgtcattattatagtcacacatcttcgcagcaaatacgtcttacctactctcattatcatggctgcgcgattgactattcaaacaccatttcatgtcatgtatgagcaaattgagtcttatgtaatttaataatagtcattatcgctttgacaataatgatgcatatgggacaacggttttattcctatgtttataaatttaaagttagctttactaacagataagatattttaagatggtgtaacaaaaagatcaacaagaaaaacaaatgttcactttcacatcagcggtcaagtgacgactaacatttaatattctagacatcttcttagccctcttcttaattatcttgtagctctaacgggccagatattacattgggcttttgcgcatatttaactgttttaggcccaaaacaaatgtaattacctttttacctcactcgtcggcgatttactttttttaatcggggacttcaaaattcttgaagccgttgtgttgtcagagagagaagaaagagatagatttctcattttgggaaattagggttccaattttttcgaactaatgttcacgccacagagaaaacaatggatgtcaccggcaatgacgccgagaagcgagacgcataaaatcggcggtgttactaaccctagaaacgctgatagaaaaggaaaggcggttgctttcagtgatgacctagtaataccgactcttcctccgcctccgattggaacactgaccggacaaggcgtttctcgaggtcacactgatgatatggatatgggtgattggagaaggtttagggaagtgggtttgttgaatgaggcttcaatggagaagaaagatcaagaagctcttcttgaaaagatctctacacttgaaaaagaggtaacctttatcaacaatttgaatattctgctctcatgggtttatgatgcaattggtaacctttagctgtctgaaagttgaaatgagtgttttgactctttgttatggcttttgataagtacaaatatacaggctttaacctcttagaattggttcttctgtgcagttatatggctatcagcacaatatggggcttcttcttatggagaacaaagagttggtttcaaagcacgaacaactaaatcaggcattccaagaagctcaagaaatccttaaaagggaacagtcatcacatctgtatgcattgacgacggttgaacaacgtgaagaaaacttgaggaaagccttgggtctggaaaagcaatgtgtgcaagaggtagcattctttagctttaacattatggatatcttcaaattatgtttggttttctacgtgtttgctcttgtgaatataagctttatctacttatgtgatgcattgattttgaggtgttcttcttttctgttgagcttccttagacaggagattcagttttctgtattagttagatgttttacttcgtttgtattctgaattttctttgatatatgttctttcattttatttttgtctgcagcttgagaaggctcttcgtgaaattcaagaggagaatagcaagataaggctgagttctgaagctaaattagttgaagcaaatgctctggttgctagtgtaaacgggagatcttcagacgtggaaaacaagatttactctgccgaaagcaagctcgcagaggcaactagaaagagctccgagctgaaattgagattgaaggaagtggagactcgtgaaagtgtcctgcaacaagaacggctttcatttactaaagagtaagtatagatatcagttatacgtctgaaaagttcaattctttttcttagtcttacgtgtatgttattgttattgcaccacaggcgagaatcatatgaagggactttccaaaagcaaagagagtaccttaatgaatgggagaaaaagcttcaaggaaaggaagaatccataactgagcagaagagaaacctgaatcaaagagaggaaaaggttaatgaaatagaaaagaagctgaagctgaaagaaaaagaacttgaagaatggaatagaaaggttgatttgtctatgtcgaagtctaaagaaactgaagaggacataactaaacgtttggaagaattgactacaaaagagaaagtgagtttgtagcttttgaaaattgcttatttcttatatgacttctgcatatttcgtatatgactttgttttttgatggtttaccctaggaagctcacacactccagatcacgctattggcaaaggagaatgagttacgagcatttgaagagaagctcattgctagagaaggggtaattttagggtatagcttttgtagattgtagttgttgaaaattgtcatacagtggaaatctaaatatcaaacgaaagtaacagcatgctcataataggaatattgttatgcagtggatatcgttattatataaatagatttcatttactctgatagcagttataaaagctttggtttggttttaacagacagaaattcagaagcttattgatgatcagaaagaggtattaggttccaaaatgctggaatttgaactggaatgtgaagaaataagaaaatctctggacaaggaactccaaagaaagatagaagagctcgaacgacagaaagttgaaattgatcatagcgaggagaagttggagaaaaggaatcaagcaatgaataagaagtttgaccgagtgaatgaaaaggagatggaccttgaagcaaagttaaaaactattaaagaaagagaaaagatcatacaagctgaggagaaaaggttgagtttggaaaaacaacagttgctttctgataaggagagtctggaagacctacaacaagagattgaaaaaatccgagctgagatgaccaaaaaggaagaaatgattgaagaagaatgcaaaagtcttgaaatcaagaaagaagagagggaagaatacctgagactgcaatctgaactcaagtcccagatagagaaatctagagtccacgaggagtttctttctaaggaagtggaaaatctgaagcaagagaaagagagatttgaaaaggagtgggaaatattggatgagaagcaagcagtatacaataaagagcggataagaatatctgaagaaaaagaaaagttcgagaggtttcaactactggaaggagaaagattgaagaaagaagagagtgctttgagggtgcagataatgcaggaactggatgacattagactgcagagagaatcatttgaagccaatatggaacatgaacgatcagcgttacaggaaaaagtcaaacttgagcaatctaaggtgattgacgatcttgaaatgatgagaaggaatcttgaaattgaacttcaggaaagaaaagaacaagacgagaaagatctactagacagaatggctcagttcgaggacaaaagaatggcagagcttagtgatatcaatcaccagaagcaggctttgaacagggagatggaagaaatgatgtccaaaaggagtgctctccaaaaggaaagtgaagaaattgcaaagcacaaggacaaactaaaagagcagcaagtagagatgcataatgacatcagtgaacttagtacactcagcatcaacctcaagaaacgtagggaagtgtttggccgtgaaagatctcgttttctagcatttgttcaaaagctcaaggattgtgggagttgtgggcagctggtaaatgactttgtactctctgatctccagctaccatctaatgatgaagtagctattctaccacctattggagttttgaatgaccttccaggaagctctaatgcatctgactcttgtaatatcaagaaatctctagacggagatgcctctggaagtgggggatctagaaggcccagcatgtcgatactgcagaagtgcacttcaataattttctcaccaagtaaaagagttgaacatgggattgacactggcaagcctgagcagcgtctatcctcctcagtggcagttggtatggaaacaaaaggtgaaaagcctctgccagttgatctacgtctgcgaccatctagtagctccattccggaggaggatgaggaatatacagacagtagagtacaagaaacatctgagggttctcagctatctgagtttcaaagttccaggcgtggacgtggcagacctagaaaagccaagcctgctttgaatcctacaagttcggtgaagcatgccagccttgaagaatcatcaaaagatgaattgagtggtcacgtttctgttactagtaagaagacaacaggcggaggtggaaggaaaagacagcatattgatgatactgctactggtggaaagcgtaggagacaacagacagttgctgtcttgccacagaccccaggccaaagacactacaatctgagacggaagaagacgtaagtttcctaacattgtgacaatgagtttaaaggctttaatatgacttcacatgattttgcttaagatatgttgaggtagagagggctcttgtattagtttagtctcggtaggtgaaaattattagtctggtttcactacttttattcacattccctatcatttttggatcttaattctgttcattgattgcctaaaatcttatgaatgaacagtgtagaccaagttccagcagatgttgaggataatgcagctgctggtgaagatgatgcagacattgctgcctctgccccatcaaaggacactgtcgaagaaactgtggtggagactcttcgagctagaaggatagaaacaaatgcagatgttgtttctgctgagaacaatggagatgtaccggttgcaaatgtggaaccaacagtaaatgaggatacgaacgaggatggagatgaagaagaagatgaagctcaagatgatgataatgaagaaaatcaagatgatgacgatgatgatgatggggatgatgatggatcaccaagacccggtgaaggatccataagaaagaagctttggacttttctcactacataaccatcgcacgtggatgatctaggagatgttactttcacatttatgttgtaaaacaatttatagcttcttggatccaaagagacaccccttttgataggggtgaagttagagaattagagaagcagaggcgtgtgttttaaatgatgtactttgaattgacagaacataaaagccagaatccaaaaggataatattgattacaaaataaatgtcaaaggattaatttgcagaaaagcagaacattaaaagaaaaatctttgtcaacattaaattcaataacgctttgatatgtgtgcttctctgcatgctctagtacacatatgtatactacgttataagtattggtaaaattccatatgtgcatatatgtatggttatgggaacaaatgaaacctttactttatgtgacaaaagaggaacatgtaactaaattctcttcttttactttttaaccatttgaattgtaatgagaaaagctattgattcccaacgacctctcgctctctcttcaataaataattacaagaaccaactcataacccaaatagaaagaggacaaaatacatcacacgctctgtttctcctgttcttgttctctgtctgaacaatgttgtggcaaacgtttttttcctctcttctcttactatctctgcttttcggatgtaacggagatgaatctttacctgaagtaactgattctgaagaagctccaatggacaaaagagaacgtgaagccttgtactctgcgattcaaggatttgttggtgattcttggaacggatctgctctctatcctgatccttgtggttggactccaattcaggtttttcttacaagtctctctttccttaaaaaacttgctttatagtttctctagagttatgttttgtacggtcaagtaagtccttaattgtcatagactcttgaagatagtgaagagcttgagcttataatgatgtagaaacttttgagctttagatgttgttgaatcaatcaaacttaacttcgaaaaagcctttgaaatgatgtgtaaagacttttttgttttctagctgtctcaaataattcttcaaaatgctttgtcctctttgaaaatttccataatcggatagtgaagtttaaagcttcaaagcaacaaagtgaatcctattttcatataacatctctttttgggggtttctttaaatgtttcaatggttgttacaattatatgctcattggcccaccaatcattcctttatcttgcagctaagtgctcttcagaaaatccaaacattgaaaaataaaacttttttgtttttggtttcagggtgtttcttgtgacatctacaatgacctgtggtatgtcacggatttgagtttagggcttatttatgaaaactcgcttccttgctcctcaagtcttcagataagaccagagttatttgagctcaagcatttaagatctctctccttcttcaactgctttatctctcccatggtgatagctaaagaggagttgtggacaaactttgcatctaacttagaatctctcgagtttagatccaatcccggtctcattggggaacttcctgaaacaattggaaatctcacaaagctgaagtctttagtggttctcgaaaatggatttagtggagagctacccgcgagtatctgcaacttaaagagactaaagaggctggttttcgcagggaactcgtttgcgggaatgatcccaaactgtttcaaagggttaaaagagctcttgatcttggatttgagccgcaactctttctcagggacattgcctacatcttttggagatttggtttcattgctcaagcttgacctaagcaataacctcttagaagggaacttacctcaagaactaggatttttgaagaatttgacacttttggacctgaggaacaacagattctctggtgggctgtccaagaatattgaaaatatccaatctctaacggaattagttttatctaacaatccaatgggtgaagaggatatggtgggaacaaattgggggaagatgagcaatttggtagttttggacttatccaaaatgggtttgagaggtgagattcctacaagtctaaccaacctgaagaggttaaggtttcttggtctgaacaacaacaatctaaccggttttgttccatcgaagaagcttgaagctttgccttgccttggtgctttatacatcaatggaaacaacctaacaggtgagcttagattctctacaaagttctatgagaagatgggaagaagatttaaagcttcaaagaatccaaatctgtgtcaacctttagagatggtaatgtcagaatctcataaacatttaagtcctcttggagtgaagccatgcacttaagagaaggaagaaggtaatttggtacaataacaaacttgaaaccaggagtagaagtcatcaatgtgtgtttgtgagctcatcaagctatattttttttcttacattttggtaaatatgtaagaatattgtttaatctcatcgagatttctattattgtatttgctataacggtgtgaatttggcccacgaatgaatatgtagacgctttaaaaacaaaggtcttattgggccgatattgtggtgttaaaatcaataaataaaagacatattggcccatgcaggtttcgaacctgcgaccttcgcgttattagcacgacgctctaaccaactgagctaatgggccattttgttgacattatgtattacacgtttaagatttataattttgtggagaagacgaatgatgaaactatgagactcaaaacaaaacaaaacaaaacaaaacaaaacaaaacaaaaaagacacaaattttgtagacaactatttaatacagtgttacggagtgaagtacgagcaagatgccaacatatagacttagacttgtcacaaataattgctctctccatgtctcataaagagaggatcatatattatataattaaacgtgagataagataaatcatatgtagtgttatgggaaagaagaacacaatgtgaaggcacccggaaagaagcccaaaatattctagaattgtggacagaaacaaaaacaaacaaagaaacacaactactatatgaggaaattaataattagttggtttgatgggacgaatagtgtctgaatgttttctcttccaaagagataatgtcaacaaagaaaaagtcacaaaaaacttcttaaacgttacaaagactccaataaatcaaatagttgatttgttgttgtttgagacatcgtaggccatctcatgttcatctttcgatacactgaacttgtttaaacccaacaagttggatcgacctggtggtgtttggagttccaagttggaaataagatgaacgatggatcggatcagttcacttaatactaatcggttttaaattgaaaacacataattcttattagtcatactcatcaatgttcatgattagagaaagatcgtagatcctcgtcctgttttagtgaccagattttgtttcatgtgggaaatatgtttttaattagggaaaagtttcaagtcgttgcttgtgaatgtaacaaggtcggaactcggtctcaaatttatatgagccaatcaatagtaaacattattatcgaagtagcaaattccctcctttttggattttagttgaatccggaacatatatatatctcgaacatgattcttggtttttttaatttatatcttgtccaatctcatttccatcacaagtttaatcaaggaaaaaatgaaacgagatttcttttatggttaatgtgttaacttttgtttggccaccctaaaccaatggagaacgatttaaaacaattaagaaggaatgttagtcatagtattgaaaaaaaaatgaacgataagtacaaaagaagataagttccagaaaataaagaagtacaaaaaggaaagcataaggttgaaaggtgagtggctcaattattacaactttattaattagggcaaacactaaaaattcgtagcccgagaagaagtgaaagagacaagagagaagagaccggtggtgatggtcacgacggcgacgatggtaggaccgccgcacgtggcctgccttacccatgtctccatttgaccagtcaacgtacttcttctctaattattggagttcttcagtacatatctaaaggactaacaggtttattaattcaagttcaacttattaacatgactcttcttttgacaacaccgttctaatataataaggtattacaaaaaaaaaaatgaaataaattgggtaatgttcaactttgatagtagattggtctgcaggttttcttgcatcactagttaaatggaaactttattttatcttttgaatactttactttcctaatgttacaaatgaaactttagttgttctattaactattagttatactaaaatcatgatgtcctttcaaaatcggaaaacggctgattatagaatataattattttagcacctaatggctaatgataacgtcagataaataagagggaccaaccaaactaatgattttgagtattgtgtcccttggtttatatacatagtcgctcacaaattattgaattatatcatccctctcaatacaaatgtattttgagtaatttacctgttatagtatagataattgcatagtataattttagactgtaatgtcaacaagaaattagtactagtgttatatgacttactttgataactcacttgtctcaacagttaatcaccacaaatcataaacgtttgagccaaaccatgggacatgtcgaaaattgtgtggtagctctcccaagaactaaaataaaagtagactttttgttgtcagaaataaaatggattagtttaaccaaccgatccccatgcgtggggcagcgataatcaacaattaactaacgaaatctttattgattattgctttattgttgccacctttgaatcatacatcataggaacagagagttgttggtttgactaaacatatgattaattaattaaactgcataataggagtatcttccacaaaaatacattaattagaaaaagaatagtatgagcactaagggcatcttcattcatgagaaacccacaaaatttctcaaacaaaaaaaatattaatattatattacaatttgattatttgattaaaaaaatatttttgttaaaaaattgaaccaataataaaatgaaaattgtcatgatgggttgtaaaaagtatctcaagtgagaaactttctacactctctccttcattttcattatttttatttttttaattgtgagaaactcttatgaaatatcctcaatgaagatggtctaatattgaaattagaaaaacttaattaacccaagaaaagattagatggactatagaaaagaggtaaagaccatttatgcatttaactgttgtaaatcatttaatatttcaaatgtcatagaacaaagccaaaagctattacaaaattttgtcaactctctctattataccgtcaaatatatttacaatattgccctctcctccactaaatcattgaattttccatatttgctccaaagaacaagaatctgctaaacgatatagagaggtctaatcaaaaacaagtcaaactcttaaccgattcatccacaatctcgcgtagaatcaaacccgatccgccaggccggttaagctccaaacatcacgactcttctccctccaacacacgaaagccttttatacataaagattgatgaggatgaaatctgaagacagattgaggatcaatcgtgccaacaaagaagcatgacgacacatcttcgaatgatgtatagcttagctctttgttctttaagaacagctccaagtcctttgctcgatactcttctctttgaacctcccatcttcatctttgatatatcgattgaatttggcaaaaacaaagcaaatttttcttctcttagggtttgagagatgtattgaaggattaatgaaaatgaggatacaaagaagaagagagtcctttttatagaaggagataaatattgaaacgtggccctacacacttcttattcactacccacttgtgtgttttttgcgttattgcaatttattatcattgaatattgaatgatttatatggtcacaatttcacaaaaccccccaaacatctatgccctatttgtccccgttgttggtatgtatcatggcacacatgcacgccacgtggttgatttattttaattttttggttgtaattctaatttattttttatatataagaagttgcaagtctctcattactacgaggatttttcaaacagacgaaactgggttgtcttcttccacctatagatgttatattgcttctagattattattttctctctgggaattaggagcaactaataaatcttgcttctagatcttagggtggtaattcgcagatccaactatagtttaaagcgatcaaaacaaggttttaattaactaatgctcacaagtcataacaatagtggttttattattttaatattttctacatatgttttattatttatatacagaaaattttgtttctaatttggttttaagaattagtgcatgacatagatatatataggcttatcgcaatgcaaatatttgtcgttttagaaaatagattttttcagtgacgccttcttcttgtttctttctgactctgcagatgcaaatggagtggggcaaatcattctttcttttttgtaatatttttaaccaaacaaaaaaaactcttttttttctcttgtaacaaccatatttcttattttacaactaagtttcttcttcttcttttttgtcgtggattacatcatcgtcagaaaattttaacttttatcatactattgtaacaaatatatttcaactttttctaatttcggtagaattttatggcggtttttttcatagcagaagcttctaaaaaaggtatgttccgcgaggccgggaaaaagattgaattc

SEQ ID NO: 38 - DNA, 112126 bp, Arabidopsis thaliana
gaattccagcagagctgggaacattacaaaaacttcgccacttgtaatctttgacattcagtgctctttattgtagatcatgatcaagcaactgacttcagatatgcttaatatctctgtcatgaatctgtagggatgctggcaacaataacttagtggggagtataagcgatctttttcgcattgaaggatgctttccagctcttagaaacctgtaagtgagtttaagagttagccatcaaaagtagtattttgtctaagctcacttttggctgtaggtttttaaacaataattacttgactggaggactcccaaacaagcttgcaaatctaacaaacctggagatcttgtgagtacttgatcacttcttttgatttattaacatcatttacatgttttttctctccctatcttatcttttttatgtttaggtacttatctttcaacaaaatgactggagcaatacccgctgcacttgccagtataccaagactaactaacttgtaggcctctctcctctactaaatacataactaagaactgatctgaaaaacgacctatatgttcttctgcatccttagagcatgttttgatttaacttcaggcacttggaccacaatctattcaatggaagtatacctgaagccttctacaagcatccaaacctaaaagatatgtatgttcataagctctctaaggtctcattgtgtaagacgatatataacacacatgttctaatttaattcttgatgggatgtatcatgtatgtggcaggtacatagaagggaatgctttcaaatcagacgtgaaggcgattggtgcacataaggtcctcgaactttctgacacagacttccttgtttagttatgtatagcacaactttgtttcatttacagataggaatttggcagtgttaactggttatttaagattcattttctctgttaaagcgagattgtagttgatgtgttttctgaatgtaaaagattccttatccatgtatgaaaattgaatataaaaggaatctggtttgttcttttcactgtcgttttgagaaagcaaagaaccaaaaagctgaagagggagaagaatagaaaaagtgttctttactttacctgcacatctttatgatccaaatatgaaacttgcatgcaaagcaataatctcaaaaacccttaaaaaaccaaaaccctcaaacacatcttctcaagtcctcccaccatattttagtttgaaaatggataccttaatcaagcagacaaggtaattcactaaatctccaaattcagattttctattcagccacatatacatatattgatgtaaaatgttgttatctttgtctcaggaggaagcatccagcttcccaggaaaaaattagagaggttggtagctcaactagagagaaaaaagtgtcagcaaggaagtctgtttcattcaaagaaggtgccacaaaattctgctctgttgttcttaatagcctatcaatctttgatgcttgattaatttcacattatcatatcatgtgtgttggtagataagaagaagccttcaaactggttacagaagcagttctcgaggcaaatgagtggccaaagttatgatcccatcggagaaatggatcatgcagctgcagttgcagccactgcctatgccatagccacttttgaagaaacttggctagagaactatcatgtaacggtttttaaaaacagagtttttgttagagtaaacattttctcgtaatttgagtttgttgtggtttgaaattgtaaaacaaaacagagtggccttgaacttggaccttcttcgtcaaggagcaagagcagaagtgaagaactgttgcctttagaggaaccaagaagcttatcaagaagattctcaggtgaggttacagaataactcaagatcagattttgttattcaactgaaaatgttttctgaaatcagtttacgtttttgtgttgacacagggcaactttcgtttatagattcagagacgaaagatcataaacctcctacactaaagtccccaatgagaaagtcatcttcggtaaaaaagactttctccatgaacttgatgggagaccacaccaaacagaatcaagattcagaggagaaacatgaaagacaaagaaaaccggtttctgaaccaccacggatacaaccaccgcttaggacacgatcagaacctcgtgctccaccgccacctcctcctcctcttctatcaccttcgcctctgcggcttccacctagggaaaccaaaaggcagagttctgagcatactagtcgaaaggatgattctacagctgatgcttgggaaaaagctgaactatctaagatcaaagcaaggtaagtagtctcaattcacaaaaacttatttatgtgtgttatttacactcacatatgtattacacaagcaggtatgagaagttaaacagaaagatagatttgtgggaagcgaagaaaagggaaaaagctcgaaggaagctggacatatctgaggttgataatataatgactttgtataatctaatctcataatcattatattataactggatgataacttgagttcattattctctaacatgttggtacatgaacagcagagcgaactagaacagaggagaaagagaggtttgcagagatttagagaagacacagaatacattgaacagattgctgctggagccagagctcaggcggagaaagacagacagagcaaagagttcaaggtgaaggagaaggccggtgttatccgtagtaccggtaaactccctggaaatgcatgctgtttctgacactaaaacaaaggatttctgataactgtagctagctatatgtatgtatgtgtgtgcgtgagagatgatatgggttttcattaaaaagaaagaagatcttgaaagccaaaagtgtatgttacagagagctctcaaagatactttcttaaaccaaaatcaacacaacactcaaaagacagcaaatatagcagcttcaatcacaacgtaaatagtaaaaaacatgatgcagttaatatggacttctcagtcactagatcaacagaaaaggtttcataatcacaatcattccattcttctagtgttaatttgatggacctcttgatttgttcctagaggcgttactgaaaggtatcataatcatcagcagatgtttcttttccagtaatttaagtgattaacagattccatagtttccaccaaaacttccagtgaaacacttgctaactagtgaagctattctaagaacataaataatgtcaaaattgggccactaatgttgtgagctcaataacttgcttttagtacactgtatcgagcttagttttcaagccccatctagtgttattttggttttgtctttataaaaagcttgtaatatacactaccgacaaaatcaagtgattggatttatcattatcacccatcaaagcttcgaccgacagtctttaatggaacacgataattccatggaagatatttatgtgatatttcgtatgaatcataatgaccacgtaagaaaatttgtgatcgagaagagaacaccacattggtcacactgtatgacaataactgatcactaataaatgtctttttcggcaacgacagaatgatatcaactttagttagcctatcatcaacgtccaaatataaacttttctaacatagagcaacattattaagacaaataatatgagtattaaactccataaactaaagtggtgctgtcaaaaaaaagaaaaacttaaaagtgattagagttttatttatttattaatattcatagtgataaagagatttttatctctttcaatttatgaaatgttttcataatattttgttgtcaaatatggagtattattttattttcaataacaaaaaattataaataaatgagtcgttttcacatttacgtctacaatcacaatgtatgttatttagaacaataattatagtggcttaaaaatcattaatgaaagtagataatagtatactttttctttttctttgtgtggccaacatatccattttctagtctatatatacacatatccatctcttaactcttccatccaaaaaaaacaaaacaaaaaattatattcaagagaaaaaggaaaaaatgaatttcatctccgatcaggtaaagaaactctcaagctcaacaccagaggagccagaccacaacaagccagtcgaaggaaccgaaacagctacaagaccagctaccaacgccgagctcatggcaagtgccaaggttgtagctgaagctgctcaagccgcagctcgtaacgaatcagacaaactcgacaagggtaaagtcgccggagcctctgctgatatcttagacgctgccgagaaatacggtaagttcgatgaaaagagtagcactggtcagtacctcgacaaggctgagaagtatctcaacgactacgagtcgtcacactccaccggtgctggtggtcctcctcctccgacgagtcaggctgagccagcaagtcagcctgagccggcggctaagaaagacgatgaagagtctggtggtgggcttggaggttatgccaagatggctcaaggtttcttgaagtgatttgatctttaattgttgttcatcattttcgtaataataaattaaataactagtatcgtttgtgactagtttatgttgcttcgtttatgtttatggggagtgacgagtgagtgtaataacttctggtgatcatgaatctaatccatctttgttgtgattatgcttaacttattggtgtttacaaaaccaaatcaaaaaatgatcatcctttggattcgaactcgttagattctatatcattaggtttctatgtaaaactagtgtttcatttcttaattcactcatttaatagtgaggtttctggtattgcaagtatgcaactacactactttaaaaatgtgtcaaaatacttaatcatacaacaacaagaaatggacttacagaaacagagagaatacatatatagaaattagttgcaattacaggacattggtgtatactaatcaagaatctgtcataaaacaaacgcttagagttatgaacaatcctctcagtcccacacaaaatctgattacaccgttcatgtctatattcaggcacaaaaccactcagttccacaagtgtcactcttatatctccccaaaacacagaatgacagaatctctttcaaccctaaacactgagttgtggaacataatatcagggaatcttcttccatagataagcctgtctttaaggaccattcacttcaggcacaccacttgaacacaacctatctttaaccacatgaatgtctccatctggtgaacctcctaaccaatcctcttcttcttactagtgagtgcttcaaactctttgatattgttccctcatgtagctgcattgcctgaaaatggctctgttgctccaattttcccttaccaaacatcaccaaagtttcaaagatgatgacgtgtcgtgacatgagatgattttaagtgttttaggcaaaaataaatataaaaagaggtcaaaggggataaaatatctttcttcatgtattcaccaagctaaaaaaaataaaattagtcgatgaaaaatctctatcacaaacggttctcttatattatatctctctctatacgaaaaagttttgaaaagaatcgtactagtacagtaatcatctcatggtcacaacaaacattcccaaagttcaatatcattgtcacgtgaaaggcgcgtgtgatgatgaacgttggttacttgtagttgcagttgtagttgaagctgaaggacatcgttgtcttctaggccttcttgtcatcttaccccaacctgcaaagcttctatcttctaaacacatttcagtttcaccattgttgctttgattgctcacatgttgttgaactgagggaggaggaggagctggagctggaaccggacaatagaccggttcagcagggattgttatggctcgtcgtggtcttcctcttgaaccggttttcttccttgttaaaccggttggagtccaagatcttcctgttgctctcatgaacccatcaaacatttgaatgtcttctgttacttcgtgtttcgaaagagacagaagtccagggagaatgtctctttggaagtctcgtctctgtttcccttttctcgcgtttcctcttctcggtctttggcttgtgaccagagcggttcctgtagtttcctccaatttgaggttttcaggaaccaatggcttaggcatatactcttgttctgagatatcaggtagttgcagggtcattgactcaaagtaatcaatatcttcgatagaacgcgattgattccttgaaaaagtatcgagctttttgtccagattctctttgtgagtatttactgtttctgcaaaccagtgaaggatgatggtttcagaaacttctgacgaagcaacaacttcaacctctctatctaggcaagctgaatagatggcaactattgtttctgctgctaatttttcaaactcaggcggtttctctagagttttttcctcaattgattttacttctgatcgcttttctccagagatattaccatcttcttcttcatcatcagactcaggaacagtttccaaatctatcataggagcctttgaattcagtcttgaactggcaggaacagagcaattttcgccttcatcatcactgcccaaaatgttcaaatcaatctgacacctattactagctgaaacccttgtctcagtctgttcctctgtttgctgatcttcatcccaaagaggatcacacggttcgttcatgtctagcatcctaacgtaatggactttacctttctctacattggattgatctttataagccaatccaggaatttccttgttagcatcgatcttctcagtcaccggattattggaacaagaaccagactttaacctctctagccacataatattctgaactttgtctcctgcctcatctctgatatccaatggtttcaaagaagaacttggaacagcatcattactcttcagactccatttcccatcagctaactcagagttacaaacagacttgggtttattaagccatggtaaagtagccaggtgttcttcatcctttctgacttcaacaacagaagtgtttgaaagtgtcacatttaagttcaaatccctcacaaacttcctctccgagctgtaatcacttcttcctccgttaggataattatagccagtcccagcgactttcgattttgatgaagtggaacactcattgtaaaacatattgtggtttaaccgactggaattcccgcaccctgagtcaaatctagaattgctttcaaactgcaatctatctccaagatacccttgcttctgagcattaccaatcagtgtatcagacatgtttagaaccggatatctctgagctgaagcaactttctgagggaatccaaagctaggattttgccaagaagagtgcaaatggttccaggagacagcagaatctggacgaatatatggatacaaggggcgctgttggtgagaagttaaacttgaatccaagtgattttgatgaatgacggcttcatgactactattggtatcagtatcagcctctaggtcaataaacgttctttctctccagacgactgccttacttggtggacctgaattaggtaaactcataactctttgtgaactgttcatcaaaacttgcataggctgagacaaagaatccagtggtttagccggttgaaaaaatggagcagcagacttgtgtgtgccattataatgatctgcagatggtagatttcaaatgataacatccgaaaaaaaagtaagaaacatgtgtgaccatataagaaaatccaagaatggcattcacaagttaatagatcatcttaccagttcttaggggttggtgtgaccaaacttttggtttgccgttcaaatctggctgcagagggataacaggaatatgctcccttacactacctgagtttagagattttccgtagtcacgaatatggccttgaaactccccattacgcaagtcacgggagtggccataagcaaattcgtttgcttcttgagcatcaactggttcatttaagtcagccaaaccattgcttctactagacccatagccaattctcacaccatctatgcgagattcagtcttcacatctccattaggaagctgactcgatgtactgcagaccctgtgatcctttaactcaacaacttcttcattgtcatcaatgtactcatcagctggaaggcaaagatctatcatctttcttctgattttcgtcggtctaacctcggacacttcaacacttttggaactagctccattttgccatgaaactggaccttgagaattgcttcctttcatgggagaatggccattatcctcaacaaccgacatggatggtctatcgtaaaccgagttcgccaaagggaagctagggattttccatttacgaacatcatcattcgtagcttgagaagaaagtgatgcctcaatctgaacccattctttattaaactgtttccttttcaattcatccatcatatccttctgtgtcctatatacccggtgaagttccaaaacctggttaaaaggatcaaaattcacaaaatacaatcaaccaaaagccagaggaactgataaaaaggtcacagagaaaatcttccactaagttaacctgtgtcttaaaaacagcttcgtgttcgagcattgtccttctcaccacatctttgtcaaacccaaatgtagtctgagacgtgaacccattattgtagcattgatcgttgtttgatgcagaggttttattgtcaccgtagaacaatggccatctacaaccgttattagattctttgttgagatctcccatagaatgatgatatccaccaaataagctttcacagtgcacctttgttcccattcctgcgcacaaatatccaaactttagtaccaaagactaactaacacaaatctgattcaatgacattgaaattggcaacaaaaaacaagcattaatcacatttcctccataaaaacaagaactttagctccatgagctctatctagttaaaacccattttgagagtagcttcaaattcatcaaaaagtcaaacacaaagcaattgtaaaagtgataacactatctatatataaagctaagggttttgactcaaaacagatgagttctaacgccgacgagtcaaaataggatcttgagtaatcaaagttggaaatctaaagttagataacaaagaatctgcaaaaatcttaggacaagattgtaccaaatagaaattaacaaaaaaaaaccaagctttaatctagggaaaattaagcagatgaaattgaaattaaaacagagtttataaaaatgagatttttatttttgttacctcaaacccacatcttcttatcgccaaccttgtctcaaaactttctcagaagaagaagcaatttataaaaaaaatctatgaatcaaaaggaaaaaagtaagaatttttttcgaatctctctactaaagggaagattgagaaacaaaaaaaataaaataaagtgttggggggagggtataagagttatagcgtaaacaccattaatggaaataattagatcgtcatcttcgatctagctgggccactcttctctctcaccaaactaacaaaaagaaaaattgaggagaggaaaaagaaatctgctttatatttagcttcttcttcttcttcttgtatgtgagggggacgatgatgataaagaaggtttatattataggagaagagaagagaagatccgaaaatcagaagaagagagaaaataaaaacaaaaaacgagggctttggcttttgtacagtgacatgaaataatttgtcaacatccggtcttctcttcccttttattctctgctttttcttcaccttttttagttctctcttcttcttcttttttttttaccatcttgtaataactaatactaatattcttccatttttattattaagtacatattattataggataaaaaacaggatttatcaattagtttgactcataaaattcttggttctattttttagggattaaatgatttttcaagataaattttattttatgcttaatttgttatatttatttaaatattttatgttacctttttagtttttagttttcattccatttgaaataaaataatctactacattgagcagtagaagtaaataattggtgaaatgtggaaatgggtatcttctaggttctcttcatctttctttcttgctttttaatgcttttaagagattatataattactatatttttggcaaatctagaagggataaaaaaaaaaaaaactatgatgatgtgtcatctttaaatgaaaaataatgaagcaatttaaaccaagatcatttaaataattacattttagtggttatcgacttatcgtaatgttggtgaatggtgatgctaccaattaaatatcgaaacgtgttagtttttgtaaataaattagatattttaaaaaggaaattacaaagtctttaaaagagtatttattaaaaaagtttattctagatggagtgttcttgagggttttcagattttgaaaagtatacaaataccatttttatataaaaagcaattaatgatatgagtcaaatgttgtttacaacgagtaatactctgtacatggtaacatcactatatcacatataataataacaataaaatacgaaaaaactgaaaatccaaaacgaacatgtcgtcactcgtcaaggataaatatggtaaatccttgccccattaattacgcatccttttgtttaacacattttttcggttaggcttaggcctcatttttttttttataattaggtctcatttagttcaaatatataaatttaaataaagttgtaactaaataaactattgacagcaaacaaaacgtgggtcccgccaaaaaatcttttctttttctatagctctatctcgttggctactgttaatgtggaatatttttgcgttttgatactgaggaattagaagtttagatttctattaaatattggattggtgattaaagttgatagctcggatattgatcggatccatgaggaataacaactatgaagttataaaattataagatcctataaaaaaattttaaaaagatctagtcattctacttctggtaatttgtaccacactaaatgcccaaaaaccttgtgatttttttctactttagacgtttaatatttatgaaagatgaatgtaatttaatccaagggtccaacacacatatattatataaatattaatgagaaatttggcccttaaaagtgtataattaccaccttttttccatcgacgtgaccaaaagtctttgcaaaactgacctgtaaatatatatgcacgaaaaaaaagtttaaataatttcggtattagacatatagaaaaaaggtttggtattcggtaaaaaaaaaaactaacatacggtcttcggctgttgtgtggcatagcatcattatgttttgtctcttatgtcacaaacccacatggttaattccgtattggtatattttttttaggtaccatcggaaattttctgaccatgtctcatttcttactgttcatttccaaaagcaatagtaaaatgcaagaaaaataaatccaactatactatatatgtcgtaaatctacattcattatctgatatcgtgatataatgtcagtacaactcttttccaacagagtttttacctattttaaaacgtttattaaaaaaattgtacgaaaatgaatctgaattataccaatcaataaagaaaataacttcatagaaatgttcgtatatttttataataaattgaacggtctgtattattatatacatgcatgtatcaatagttatattatgcttttatagggatcaagataagttgggataatagaccttaaaagtggtccaaagtatactttcggaaatgtcactctcatcagaaaaaaaaaaaaaaatcatcgagatttataaaactgagtattagtcaagggtcctatcatacttcttatggtatgtcccaccaaattgatttcattgcgaatcaaatagcaaaaataataattctattaaatatatttattttattttattttattttttttctatttttttttctattaaatatacacatgcaacttatgcaactatcaatttcctttagtattctacgaaacaaaattatatatttgttgtcacaaagtttaaaaattccaacgtattttaaatgaaaattatgatggtaaaaaaaatagaattattactctcacattagtcatttacgtaaattatcaatgaaaaatatctatcacttaatattaaaaaaaattgttattgaaattgaaaaagtaaactatttgccactcgtctcccactagctctcctccattctccttttaccaacaaaaaaaaaactgttttaaaataccctctcgtctttaacgtccatttattaaatctatatactagtagtattattttattgaatgcgaattaaataatttctcatgagttatgcataaagatagtccctttcgaaaagtttacatcaatttttgaaaagcatcaaaaacgtagacaaaccacactgtccacacaaaggaatgaatttaaacacttgattatcgtattatagcctgaaaaagtagattccatgaaaatctatagctaatcgagatctgttttaattcgttttttattttttaataccgagcaatgataattatagacaaacaaatttagagaaaattaaactccgaattaatcagaatgggttgtgcatttatacaaatcttgacgaaatttaaaattcaaatgtaaatgattccatctacataagaaaagaaaaaactacatacaaatcatcaatcttggactaattatgtgtgtttgatcaaataatatctccagtgacggattaaagaaacaaaaaaatcatttaaccaatccataacggtacaatggtcaatagcttaaataattttatcaaaaaaaattacaacaagattcaaattatcttgctaggataattaaccgtagttaggttagatggtatatatacatactagattttaacccgcggtataccgcgaaaacaatttattttttaaagttaatatacataaaagtttgcaaattatatctattataaaatatttttatttgatagtttacaattgttattaagtaacatcctgccaaacccgtcccgccaacccgtcccgtaaaaaaaacatttattttattaatgttgatcttatttatgatatgtttatgaattattgtctaaatattttgtaattttgtagtaattaaatgctatcaaatatctctgcggtttgatgtttataatcgaattgttatagtcatggaaaaaagcaatatcaaaaatgataattttgaagtaattaaatgatagtaaatattttggaagttttattttagtaactaatgtggagagattcagggaagattgttaaatgtcaaatatttatttcgaagattttttttttaattatcaaaaacaaacattaaaatctagtggcagccattgtaaataagtcataactacaagatttatttcacaaaatagctgcaaaaatgtatatatagattaagtgtctttcgtatattcaaaaattaggagtttcagtttagaaactctcggtttacactcagaaaatcattcaaacctattcaaatgtagattgaattattgaataggtatgtaattgattatttaattattgactgtttctccataaaaaaatactataaatacaactatgtattataactccctttttcccctggaataagactgatgataagcccattgacaaatacagattttgggcctaaatcaccccaaaaaaaaagaaaagaaacaacctctccattgcctttgtagcaatcaaatttcctaataagggcataattataatgatacacaattagtctacacaaacgagtgagacattgatggtgtaactcgtgttctacgaagtgtgactatttacatttgttcagcttgaagcttatttaatcccttttatttttcttgtcgtgaaaatctaatcacagtatcacactacgtttttttgtttgtcccagcagttaataaacacacacaaaaaaagcttcgatatttgggaatttttgtagttactagacatttttacaaattattacttaatatgttcatattattaatttcgttatggtttctttatttaattaaatcgttcaccggcttgtgtacgaatgatacttgatgctataacttggaatctgaaagagccaatcaccgaattttgtcgacagggacgagagaaaaagggagaaaaagatgctctttttctcgaagggtaatttggtaaattaataaatggcagatgatgtaattaacgtggaagttaggtggttttatttgtctgaaaaaatgtaagttcgaaacggaatcctagattcgtggacacagatcgttatggggattagagagagaaacaaatgttttctttttgtctccagaaaataagagagccatgagttactctcatatcttataccctttttacccttctatctagttgtagattttttttaatcatttctttaattattaattgcgttaaattaattattgttggaatagaaatattattttgcaatttgcaccaaaaaaatattattgtgcaatttacaccaaattagcaaaataaaataaaattatagaccaaactaaataaattttggtgctaaggaataccaacttatgtaggttgtcctttgaatagcctgacctatggttgctggttgcctggatcctatatatgcctagtatgtatgcatgaaagcgtgtacattgtaacaaaaagatacatgtattttatttattagaatttgagaaaataaattgcaagtttagataaataaaattaactaaaacgaattataaaagcctaattaacgagcaaattattcagtgtttatgatatatgatccaaaaatcaacatgcataaaatgttttttatttactagaaattgttgtatgatgtgattggaaaatggacgtattaattgttttgtagtatctacggttctttatgaaacattttgttccaatacttttttttttttggaaaattttgttccaatggtaagtggacaccatatccagagttcaaagttccttttcaacaatctctcctcttttttttaatgttctttcaaaaaattgttttaagaattttacatgttgtaaaaaaaagataattaaagatacaatccataatttactagaatacaattacaacacgtagttatttcaattatcatcggatatctatctacacagctctatttcatagattttccataaatatcatttaatacacgtagttacattttttgtttgtcttatacacgcactttctagaatcaaacaaatgctttcagaaaactttagtgattaattgatcgtagccaaattcatctagcaaattagtaattacagttataataccattattttgaatagtcattatttgttgaaaatatctttaataaattttgttaacttggagtttataaattataatcataaacgttgtttcgatttttgttacagttttctaacaatgttaaattttccagtatgtgtgtgaccctacaaaaatgggaatcaacaagaatcaaaagggcccatcaaagtctccaccaccaatcacctgtgaccgctctcacacttaacgatgatctttgttggattaacggcgcgtgtaatcttgatcccatcacgtgaactttcacgctcatagaccccactgttccaacctcagcaccatcagtcctattcgtcaagaagatttaaggccatacgtaacaaaagcaagctgagagaaacacatcctgtcaataatccttgagctggactctaaaattaggcccatgaaacttaatgacagccaaaaatattgtttgcattatgaattaattatggatttgccactttttttatggcatttgtagactttgaatttttttgaatagtttgtggattttgttttttttcctgattacaaaagtatgatttaacatgcattttatttgttatgtttgggtttagtcggttgtggttgtggttgttcttacaatttagttttttgaataaagtacatatttttaccaaaaacaaaatcttaaatacgtacattttgaaatgttaaaaatgacatattcataaaattttagtaaaaatgatgattttaaaagatctcgatgaaaaatgacaaaaccaacattaatcgcttacattattcgtaaaatttatcatgttttcaaagacatgaaaacattgatctctatatgaccggagaaaacattgatctctcatatcagatcacgtgatcgaacggtggagaaacgctctctacaataaggctttaaagcccataaaacccttaaatatatcaaagcccaaaagaaacgccttttgcgctttcccgatcgtggtcaacttcctctgttaccaaaaaatctgtaccgcaaaatcctcgtcgaagctcgctgctgcaaccatgtccgacgaggagcatcactttgagtccagtgacgccggagcgtccaaaacctaccctcaacaagctggaaccatccgtaagaatggttacatcgtcatcaaaaatcgtccctgcaaggtttcgttctcaaacatttctccactctcttcctctgatcttattagatctgttcattacttagattcctcagattcttttttttgtcacctccacgatgttcgactgatatttgttcttgtcatcattgttaaattcacattttattgcacttttgttttagcgaaattattaaattggtcatcttcagttttgttcgattagataagttttaggattttttcttacacaagttactggatcagctgctaaatgtcattttgtgtcgcaggttgttgaggtttcaacctcgaagactggcaagcatggtcatgctaaatgtcattttgtagctattgatatcttcaccagcaagaaactcgaagatattgttccttcttcccacaattgtgatgtatgtgaaaaaagctcctttgatcactttcatttcttgtttgtttctttcaagtcccatttgagattttgtttttgttgaattgggtttcaggttcctcatgtcaaccgtactgattatcagctgattgacatttctgaagatggatatgtatgtgttcttaaatagcacttgttcctttatatggtttagttacttgttctgttttgtaatcattttgcaggtcagtttgttgactgataacggtagtaccaaggatgaccttaagctccctaatgatgacactctgctccaacaggttaagttttgcatgttcatcacattaaatgttgctagttaattaaaatcaactctatgtcgatttctgaaaatggaagaaaaagtgcagagtaatgagtgacctgattgtgttaatgaaacagatcaagagtgggtttgatgatggaaaagatctagtggtgagtgtgatgtcagctatgggagaggaacagatcaatgctcttaaggacatcggtcccaagtgagactaacaaagcctcccctttgttatgagattcttcttcttcttctgtaggcttccattactcatcggagattatcttgtttttgggtgactcctattttggatatttaaacttttgttaataatgccatcttcttcaaccttttccttctagatggtttttatacttcttctaattgattgattctttatggttgtccaagtgtcaaagtgttccacccatatgattctaaccttttgatgagcgaagtctttactcgtgcgttatgtagagacgtagaagcaataccacaaaagagtataattatagatatatgctaacaaaactcaaaagttaagatcagtttagtattcaaaattgaacagtaaaaggttaaaaaaaatatgtatacttatgaaaataactaaattcatagataatcttttaaaattcagagtttctttttcttatatcaaattcaaaatgaaaacacaaactaaaataaacaacgacacatatcataaggtcttttatattttgtattagatcaaaactattattgcaatcacatttcttgtggtaataaatgaaaggaattctactcctaaagccaacgtgtgtcccacacaaagtaagaagaatgtttatattatcttttgctcttgcaaagtcaaatgtatcttcaaaaagtcatgttgctagttttcttttattcccctcacgtcatcacggttcctcctcctattacaaatatacacacccaaaaagtccactaacatgaaatgctaaagttaattttagaaatccattgctttcacgtgaaaaaaaaaactattacagaaataacatgtatttatacagtttactaatagtcatcaactcatcatatatggtataaatatttgtcgaaaaacagctctcatgatatgtgtaggcttatattcgacagcccattaagacacaaaatgggccttttaaaaggaatgtcagttgtcaatatctgattcgtacaacgtggagtagctgtggccttgtccggttgtctctctctgcctcttcgctccaggttcaccgtacaataataacaaagaccgacgcttttgtaaaagtgaaacctaaattgataaccaaataatttgatcaatttggtacaacttttgttttgactgatgttcagattttcttttcttcttaattggtatagttttattttctttttaaaatgtttggatttgtaattcatttagcattccattctaataagatttatctttttctttttaattatctctttacatgatactactatactatttgtttaaacaaaaaatatagatatacatgcatattccatatttaattaatgggatcgaaattcaacattaaattaatgtacctgtaaaaaattaaatgtacaaaacgacagaaaaactcaaaaaagcagattttaaacgttatattttccaattttctactgcctcctgaaaaattggatttggacatgtctgaacattactcaaaataaataaatttagctagtttttgaaataagaaaacatagtaagtaccgttttgaaggagaaaaaacaaataaagtactttttacacacgaaaaaaaagaaagtaaaggaaagagcttgtttcacatatatctgcagcgtggactttctctactgcgaacccaaaaagttttttaatctttttatgtttccagatccgttttaagaccagaagtacaaaaaaaaaaaagaaactcgaaatctccattaaaagagcctatcgataataaaaagaaaaacaaaacggcaaaaaagtgaagcgaaacacgacacggattcacacaatactcagatatatacaaaaaggattttagattttgattcagaaccaaaaataaaaaaaggaacttttttatttctttgtttgattttttgggttgttggttttttttttgtttgttaattttggggatcgatgtcggaaaaggaagaagctccgtcgacatcgaagtccaccggagctccgtcgcgtccgactttatctcttcctccacggccgtttagtgagatgttctttaacggtggcgttggattcagtcctggtccgatgactctggtctctaatatgttccctgattccgatgagtttaggtctttctctcagcttctcgctggagccatgtcttctccagcgactgcagctgctgctgctgctgctgcgacggctagtgattaccagagacttggtgaagggactaatagctctagtggtgatgttgacccgagattcaagcaaaacagaccaaccggtttgatgatttctcaatctcaatcgccgtcgatgttcaccgtaccgcctggtttaagtccagctatgttgctcgattcaccaagctttttgggtcttttctctcccgttcaggtttttagattcatcaacacaaatttctatcttttttttttttggttaaaaatttgaaaatctatttatggaaactgtatgtttgtgtcttttctttgttgagctgtttcttgtttttgttttgttggctgcttagggaaaaaataacacgttgttgttaggtgttagcaaatctaggtttattccaacaaattgtagattttgtaaccattttgctggtatcatcttaggtcaaaattggagattaggattgagttagggcttattagagatttgagaatttctcctcaaggaaggaactttgcaactcaactgtgttggaaaggtaggaactttcagacagaacaaaaggagattgtggatcaaatactcgtagagatttgggtttgttcaaggtttttatagaaatcctcaggaagatttcttggtgccacatccgaaaaatcctgttcttatgaccttatatgttttgattatggaactctgttttctttagtagaaattgttcctttagacaggcctttgctatattctcttttgatagggttgtcttgtttaaggtctctggctctgctttatcttgactctgaatctgttgaatctgtctttacctattttgatgtgtgctttgatttgttttagcggttcttgacctgatatgtaacattgtgcagggatcatatggaatgacacatcagcaagctctagctcaagtcactgctcaagcagttcaagccaatgccaatatgcaaccacaaacagagtaccctcctccctctcaagttcaatcattttcatcgggtcaagcgcagatcccgacctcggctccactaccagctcaaagagaaacctcagatgtaaccatcatagagcacaggtcacaacagcctctaaatgttgacaaaccagctgatgatggctataactggcgaaaatatgggcaaaagcaagttaaaggtagcgagtttccacgaagctattacaagtgtactaatccaggatgtcctgtcaagaagaaggttgagagatctcttgatggacaagtaacggagattatctacaaaggtcagcacaatcatgaacctcctcaaaacactaagcgaggtaacaaagataacaccgcgaatataaatgggagttcgataaataacaatcgcgggagttctgaattgggggcatcacagtttcaaactaatagctccaacaagactaagagagagcaacatgaagcagtaagtcaagctacgacaacagagcacttgtctgaggcaagtgacggtgaagaagttggtaatggagaaactgatgtgagagagaaagatgagaatgagcctgatcccaagagaaggtaaagttataagctctgttgatggttgatgataatccatatttttcgttttttttgatcagagagatgtttgaatgtgcagaagtacagaagttcggatttcagaaccagctcctgctgcttcacatagaactgtgacagagcctagaattattgtccaaacgacgagtgaagttgatcttctagatgatggatataggtggcgtaaatatggacagaaagttgtcaaagggaatccttatccgaggtaaaacacgttacaacattggttggtctagctattacactctttgaatggcggattctagtgatcgatatatttttatgtattgaaacattcttgtttaatgttctctcttgatccttaggagctactacaagtgcacaacaccaggatgtggtgtgaggaaacatgtagagagagcagcaacagatccaaaagctgtagtaacaacatatgaaggaaaacataaccatgaccttcccgctgctaaatcaagcagccatgccgctgcagcggcacagttaaggccagataatcgacctggcggtttggctaacttaaatcaacagcagcagcaacagcccgttgcgcggctaaggcttaaagaagagcaaacaacttgagagaagaaaactcttgaccgtttttcattacaaaagctttcaaattccactcacacacttgtctgaaaaatctagcagtttgcaggaaagaaacagcttcaagaggttgtagttcttctatgttctggtgtaaaacttaaaagctttttagggttttcagatttctgtttactaatactgtatgtgaattcttttgtacatgaggaagaaaattacagggggatattttgtgttgtatcttttgtgttattgtttcagtaaaagataggtcttacattttgtgtatgaaaatgaaagtatttgttgtaatatcaaacttttttcttttgtttattattacactattataatacataatggcctatgacccaaattttcttgctatttgttcatctttcgtagtcagtcattggttaatgaaatatacagagcaattgttgttttgttatgggttttgaataatggagtgaagaaattatgacatttgtacaaatgaatctttttcatgagattaataaattcccgagcaaatcttgtttccaaaaaagacaattgaattttatcttcttcttttgtctctcaacaatacaaatatgtgaaaacgttctctgtttttgctttttgtctttttttgctctccccattgattgattgattgatctttgtctctctctctgtgttattatgtagtgatcacttcattgtttgttagttaaaagcgttggaatttgtccgtgattcacgaaatcaatcttgttcagcctgacacaacacagtacttgctctggaagttcctctggtgattgagcctgtgtcagaaagaaacaaaatgttttacttgagctacactctaacaaagaatgacctactactaccaaccaaaagtttgggagatttttcaagtacctgaattgttaatcccaaatcaagaatcccgttcttgatacgatccctgaaagattcgagtcctttcctcgaaatgtaactgaatctgtgtatatccaaatctatctcaaagtagtttggtccctatccaaatgatcaataacattaaccacaaggctatggaactgaattatctggtgtatcattgaaaactaaagaaagatctgtatttctaacctgaaagaaatcgtgttgcggacgagaaagaaccggtctatcgttgtaagctgtgataagttttctctcagtagaacttagctggaaatcctcaggatttaccaaacctgccatgatctttaacctctctctgaatggaactgttgattctcttgtgaatccttttactttctccatttcatcttccatgaatctctgcaaaaaccatatctctctgtaaagaaacataacaagttttttataaaagagctataggatctatcatcatcataccttgatggtttctttaaagtgagatgagatttctttgtgatagttctcattgcgtttgaagtacaatactaagctaagtccttcaccatcatagtcaccaaacatagaggttggatacattggaagctggatgttcactatcaaaagattggggatatcgcagacttgtgatgatgccggtttcaaattaggaagctcaatgtgttgagcaatgtggttgatctttttaggacatgcaaaaaggtcgactccaattggtatgtaaggactacaatttggtgcaggacacttttgcttgtctctgcagatgattttaaacaatacaattagatttgattacatacaaagaatgtttgtcttactttcttgatatgaaaatttgaatcctaacctgaagaaattcaatccacggagcttgaaactcgacggagaaacttctgaccaacttccttgactggtcatcttctctcctaaagaacgttgaatcatagaaccggcttttggacggtacaagagcttctcagctgaagctgatacacatttagagataaaatcattcagaaagaaagttataaagattcaaaacttataaagactttttgatcatttctttcttcttacagaattcagatggtgttgatttgctatcaatagatgttcttctcacagaaaccataacaacttttgatgatttctttctgtgatcttgatgatcttcacaagtagtagtcttgaaggtttcatggtgagattcatcagccacttggtttctctttatactaacctcattcttgctcgagtaagtctcacctttgtttccatctattttcaggtaactttcgtagaattcttcatactgaatcacttgtcccattgcagaagcatttgcatctacaaaaaaacaagatcatgttttcagacacaatcatgcacaaaccaatgtctctagttttatatcaagcaaaatttgtttaccttcgaagacactactatttgaaccatcatcagaatcagaatcgatgtagctaaaggaatcataccaagcctcctcatgtgaaattcctaaaacagagaaaaaaataataatgagattcaagaaaacacaatttaggaagaagaaaaaaacagaatcaagatatagagaatgttgcttacggtttccatcgatttggctgcagttccattgaagctgagttaaatggaagttagcattagacatctcagctctcttacacatcatcttggctgcacaattgtcgaaatcaagatgaacatattcgctcaccgcaaaatccctaacactcgcattactcatgcgtttcataggaacatcgggcatagaagccgatattttggaccgacatttgccagatctgccgcgtttctgcttcttctgttgaagcttgttactgagttttctctgagaagaaacacagccacccatattttgttttggagaatttctaactatttcattcaccaaacgaaatcaaatttttgtaaggaacctgtatcaagacataaaacaagaataagaccattaccaagatatacatgatcttgtctagaaatcaaaaatcagatgccaaaaaagatagactatttttaccttacaatctttcagagaggtcacctgtaaaaagttaagtttacataaaagaatgcatcaacattcataacaatgagatgttgtttcatgtatcttcaagacccttcatataagaaaaaaaatcgaatgaggtttattttcttaaatttgttgcttacttgggtctgaaattttgaatacttaaataaacaaattaaacatcgataacatcaaacgcaacaaatgcagccatttgaattttttatgaaacgtgaaagataagaaacaaaatcttgaaaacacaaccaagtattgtttttaacgaaaactctaatcatttgttaaccatgaaatcaagaaaactaaccaggagaagaagaagaacagaagaaggcgaagaaaggaggaagaaagaggattctctatgaaaatcctctgtttcgtctttcttctgctctctgcctctatttgtttctctgtcttttcgtgtcaataacaataataaaacagaaacagaaagagagagatcttcttaagagaaatattaagaaccgcaccactgttttctttagtaacccgttttcttcggatcattcccaaaagtcttctcccccgttaaattctctctctttaatttctctgtttttaattactaatattttattttgtccattttaatgattattattattacagagaaacagtaaattagtgttattggggatgtgattgacccatcaagttcgcggggtaaagaagaaacagcgttttaattacagaacagacgagttatttacttcacgtgtcgccatttatgggaaacaatcttcttattttcttaacctctttaataccttgtcttgtgtcttcttcgtcctcatcaatgttaaatccattcatttacaaaacatgtttaccctatcttccaacataaaacaaaaaaaaggtaaaaagaaaacaattttttccttctaaattagagtttttaatattcaagttcaataaatttagttagagtctataagttaacaatcagctagacgtaactcttaacaaaaaataatagttccatatagaaagaaattgatgatagaaattgacactgaattgacattaaagaaataaaaaaaaagagattcgtatctgaagttctcgaggatcacatgcttcatgtattcgttatcgtattcataatttaaccattgtatttctatattagtatcatgaatataatttaaccatcatctcaacaaaaataaaattagccaagtaatgcatggtatatacagtatactatacacaataactttttttatcaacgtaaaaattatggagggtttctgtgaatggacctagatcatagtagtgggatccttagtttcgcatagacaacatttggtacctcgtggataacaaatggtgatttatgttcaatactatcttgttatagtgatggagaagttatgttattatgtcgttgtacaatacagtttgttatttatttttaatatgtcatcattcataatagattgattgtttatttttgcatcaactaaagccgtctaagaataaaataatctacttaaaaaaaatatagctaaaaagtgaataaaagctattagttagttcaaagtccttttcgtaggagattaattagtccacggagatatattctaatcattgattctttagttttgttcaatagttttcagtattttttttatataatcttctggttgaagctatagctattgtatgaaagagacttagctgattctctatgtgtttgtggaacacaatttatttttaaaaactatatagtccaacgaaaactatttaaagtaggtgagttgctcattttaaattatgtttaggactgccaaaaatttagactaattccatgcactttgatttctatgttttcatcttatttgctattagagatttattacatgttacttctgattaaattagatggtaacaagcttttatatcttaaaattccatttgcacattttccattgcatccatttctaattatacatatagtatatattcttttagtgaaaaatgacgttatcggatggaaaaagtctcaacaattaatgggttctgtttcttttttcttttttttcaactgtgttattgacggctcatattttatagaatggatttttactttcggacaaaaaagaaatgaggatttatggccatgattttctggatttattcaaccatttccaagaaaaagagagattattcaactaatatactgatgatatttctagaattaataagaagctagctaattttaataatgcaatatgtaaagaattttatgtatcaaacgttaaattccgaaaagacctattcaaccatttccgagaaacaaaaactagtcagcacaacaaattagtcacactacacatgtcctaaacaatttgttcatgtaagaatttaaactttttaatgaaaatatttagtatcatgaaagcatgaagaaaaaaagatttttgggtaagaaaataatgaaggccgaaaaatgatcttgttctttttttttcccccaattttatggtattattttgatttccagacgtttacgaatgtttaaatttaatctcctttgaagttgattctcccgagtcccgattataagaagaaaacttgttagaagcgaggccaccatttctcacccaaacgatacaaaattaggttaggtaagataacatttgagtagatctagtttttccaagcaaaccaggtctagtttaataatcgtaattttgaaatactaaaagatcggattaaatttgacaaagtgtattgctcctttttataaatatagtatataactacgatatgttttgttaaggttgatgagaccctgataatatgagtatatgactacagtctagctacaagcctacaagtttctatatgaaagaactagtacaataataactgattaactgtactgtacgatattcaaaagaacttaattgtttttaattagaagaggaagatgagattggcgcacaaaaaaaaaagaaaaagaggaagaagatgagatagtaattggaagctttaaatcccaattaagagaggctacagctgtaatcattcgaaacgtatttacttatatgatgtcaccgtaataaaatttcttgtaataataactttctcatttatctagttggagtcacaatgtctacttgaaccactggaataaacaaaaaaacttcacttgaaaaagtaataaatttgatgacagctctttaactataccaaacggattcatactaacttcaacttctttgatcaattattccaaaccctaaattctagacctaaaatcaaactaaatttggtaacacatcaatttaatactctattagaagaaaactaaactataaatatcgattatgtatttgatcctactatattatttgggaagtacattttaaatgtaaccttaatttttgtaagtaattatatagatatgccattagaaataaaattttaaagagtaaattaatttatctctttaaggattaaaaagtcaaatactaatttaattaaaaaacaaaatacattattattttccacaaataataaccaatcaaaatcaacatataagatttgatatctaaattttaattaatttaatttaattaaaaaacaaaatacattattaatttccaaaaaagtaaccaattaaaatcaacaaattatatttgatatctaaattatcatattaattttttattaattattatagttcacttctcatctttatatgattttatttttgcggaaaaataatatcatcattataaaaaaagaattagagttattttgcatatgccacaatttgaatttttaaaaacgaatataaactgttcaatacatgaaaaaatattataacgggtgaaaaatagatttaagaaaactttctactgagtaacgggtcataatttgaaatatttatattcaatttcatacatattatattgaaaatttataatcttatatattacaataattaataacatattagatgtgattcaatttttaataaaagctggaaaatcctagaattgacggtttagatcgatattaatacaagatggaatactacaagtgaaactcttaaattaactatcaaactacaagtgtataatcttaaacactaaacaatatagataatatcaacaaaacatacacatgagatcaattaaattttaatcacataaaaattagcacaaaaaaaagtattcaacaattaaatttttatcaaatctctgtgttatataagttttgatactatattcgaataatgtaatataccttttcaatttgtattctttaactaatttaatctaactaatatatttgctaatcttatacctatcaaaaccgactatcgtttcttatctctatagtatttttgcaagacttttttggtggatttggataaaagtgtattcgggtcatatggtacattctcctattaaataaatatggtgcactccgatgttattagctaaaatgtttagaatataattcagagtcatatcattaataaaattaatattaataaaataaatgactttttggcaagacgaatttggagggacgggtttttgaatcaacattaataaaaaagtaaaatataattaatccaccgttttaatacgggttaaatctttaattaattattttttaagaccactaatattaaacatatcaaatcatcctaatttagaaaagattatataaaaccaaaaatgttatgtggtatgtataatattactatatataaaattaaacaataaaatataaatgtattagagaatgatacaatgtgcaaaacttttatatataaaaaataattcttaaattttaaaaattactactttaaaaaaaaaatcacgggacgggtaaaaaatttacagaacgggttttattttggaattgggttatatggtggatgtatttgaatcaatatttataaaattttaaaatattattaatatgctgtttaagtagggattaaaacttcagttttttaacaattatctcatgaattcgtggtatagtgttatttaataacaattataaactgtaaaataaaaatattttataaaaataaaatttgcaagttttaatatatattacttttaaaaaataaatcgtcccgcagtatatcacatgttaaaatctagtttatatatcattttgatacttttttaaaacagagaccggtgcagtttagtagttacgtggataccaaatatatcatacaagttaatatagaaattaagaatcagatacgacgttccaaacaaatacttaaacgtgtgtagaccttaggaaacattgccaactggcaactttgtattatactaccaaaatctagatatctataaatctagaggtgtgtatgataatgaatattgaatagtatatgtttgatattcaatgttatactattcagatatcaaatacctggatgtatatatgtcaactgaaaacaaatataattctcttagtatgaagactatttacatctaaatcatatgaataactaattaactttttcttcttttttttgttaattttcaaaaactatgtcatttgttatgtattacataatcacttaagatatatataaaaaaaaatgccctaacgaatttcgtccacaacatatgaatcgagctagctatttagatatttctattatgcatatgatgaatcatagattgataaacatattatatattttttgaaaaatggtagttcaatttcttttgacactaattaaacatgaaagagacatgtccttcgggtgtaagaatacctaaacagacaaagcagagagtcataaatatcttatgattataaatggaagagacatataaaaaatgtttattgtgtactaatcccttatatagtttatgttggacaactccatattaatttaggtttacttatatttcggttatgaaactctaaaaagtattgtctcccactatccattaggacaaactggcaaaggcaaccacctcaacaacatcaaagaacaagaattattcaactgttctacaaaactatactagtactattacagttgtttgtagcatatacttttccaaatagaattttatacgattttcttttccatattttttgaaaatgacaagtgatatgatttgagaaaaaacaaaaaaaaaaaacaaatttatacagtgaggcctgcaagaccataaaacaaactaaagccgttcattaaggttccattaattgggcctatatttttctcgttatattatgagcctgttataggcccattagtaataatttatcgggttatgaagtaaattttcagataattaagggtctcaagtataaatatcttaaataacagacccatctacctggaaatatgagtatttgggcagagaggggtgttttcgtaaattcaagtacatactttatttttatttttttgctttcttcgccttttgctccctcctcgagaatttccgatcgtgctttcctcaaaagcatttctgtttctcgtcgtcggagcccgacgacagatctctgaatcgctggagaaacagtaagtaaatctacagatctcgtttcttcgaacttcttcttcgtatactatttgtttgtatcgttccttcgttgtgcattgatgttcttaatgattactagaatctaagtcagaagttacctctatttgttcttcttctatatttgaactagatttcgttctagcgtcgaacaaactcctcgttttctttgattcgcattgctggtgattttcctgaatttcgagatttagcgagacgtgtctcgagttctcttgtgttgacgggatttttcttatctggagaactgataatagtttcatgacactgtcactggtctgttgaattgtagtttaaacttattccatcggatatagtgactcttaactctataagttgctgattttgtagatgggtttagtgttatcaggtttattgatgtaacaacgagtttacaaactttgctatttagggatctgtaggaattcgtttttttgggggctcaaattgttggaaatagttgcttagctattcacaatctaaatgtgatttgggaaatctgcaacatatgttattactatggaagaggttactctatatagttactaaattatcagcatggtttctgaccattatagaattctttgcttgtggtttatttgtttgaatcaaagtggtttcattcagagacagcgttgtagattttgattatctctgtaatgtatgatgtgaaaagttacgccactttctatcttattagctcttgaaatgcatctattatctgttttaaaataagattttttaaatttaatttgtttttttttgccagtaatgattgagtttggcctctatctgtgaagggtatatgctccggctgtatctactttatattctgccaggaagattgtgagcattgaagtgccttgggctctggctgaagatttgagcagattaaatgggtcgcctaaagttgcattctggaatcaaggccattgaggaagaacctgaggactttgagtgtactgattcaagtaatacaaccactttagcatgcatgattgatacggaaattgctgctgttttagcggttatgagaagaaatgtaagatggggaggtcgatacatgtctggtgatgatcaactagaacactcgttgattcagtcacttaaagctcttagaaaacaggtgttctcatggaaccagccgtggcatacaattagtcccatgttgtatcttcagccctttcttgatgtgatacggtcagatgaaactggagcaccaataaccagcattgctttgtcatcagtttacaagatcttaaacctgaatgtaattgatcaaaatactgcgaatattgaagacgctatgcacttggtagttgattctgtgacaagctgtcgatttgaggtgacagatcctgcatcagaagaggttgtgctaatgaagatacttcaggttcttctagcatgtatgaaaaataaagcatcagttatgctaagcaatcagcatgtatgcactgtcgtcaacacttgttttcgtgttgtccaccaagcaggaatgaaaggtgagttattgcaacgagtagctcgccacacgatgcatgaattagtgaggtgtatcttctcgcatctcccagatgttgaaagaacagaaactacacttgtcaacagagctggtagcatcaaacaagaggtatggtattggggtccttgttatttcctttctagttggttacaagtcagtttggtcctgtaggatgttctgagattaaataaaaacatgatactacagtagctaggttcctttacttgcaacctagaaaattgaaaaagcagagaaactatttaaatagaaatgataaagagccatagatttggcgatttgttaaatataggtctgcaacttactcttgaacttcaaaattatgtagacgcttgttttcattcagataggaaaatatatttttcctagtgcgagtcaaagatcactactagagaatttagaccagaaactctgtagatagtgaataattaatttcatacggaataattttcccaacaaatgctggattttaagccttcttcccttgattcatatatcactaattattgtacaataattagtgatggtgttttgcatggtcgcagaaagctggagtagacagtgattatgccattgtgagtaaaccagtcgaggatggaaatgctaattccgagtatgatgttgaaaattctatggcaacttttgcaactggtgctcaaagtttgatggatgatggaccagttggccctggaagcagaaagccggcttctccatatgatttgcatataatgacagagccatacggagtcccaagtatggtggaaatttttcacttcttgtgctctttgttaaatgtggtcgaacatgttggtatgggatcccgatcaaacaccatagcatttgacgaagatgtgcctctgtttgcgttgaacttgatcaactcagccattgaattgggtggatcgtccatccgccatcacccaagattgttaagcctaattcaagatgagttatttcgtaacttgatgcagttcggattgtcgatgagccccctgattctttcgatggtttgcagcattgtgctcaatttgtatcaacatctacgaactgaactcaagttgcagcttgaggcattcttttcatgtgtgattctaaggcttgctcaaggaaaatatgggccctcgtatcagcagcaagaggttgctatggaggctcttgtgaatttttgtaggcagaagagttttatggttgaaatgtatgccaatctcgattgtgatataacttgcagcaacgtgtttgaggagctgtctaatcttctctcgaagagcacatttcctgtgaactgtcctttgtctgcaatgcacattcttgctctggatggcctaatcgctgttattcagggaatggccgagaggataagtaatggattgactggtttggatttgggtcctgtccatcttgatgagtacacgcctttctggatggttaagtgtgacaactatagtgatccaaatcactgggtttcatttgtccgcaggagaaaatatatcaagagaaggttaatgattggagcagatcattttaacagggatccaaagaaggggttagagtttctccaaggcacacatcttttgcctgacaaactcgatccccaaagtgttgcttgcttttttagatatactgctgggcttgataagaaccttgttggggattttcttggaaatcatgacgaattttgtgttcaagttctcaatgagtttgctgggactttcgatttccagtacatgaatctggatactgcactccgactcttcttggaaaccttcaggttgcctggagaatcccagaaaatacagagagtgcttgaggcgttctctgaaagatactatatgcaatctcctgagattctggccaacaaggatgctgctcttgtgttatcatactctattatcatgcttaacactgatcagcacaacgttcaagtaaagaaaaagatgacagaagaggatttcattcgcaataataggcatatcaatggaggaaatgatctacctcgagaattcttgtctgaactctttcactccatctgcaacaatgagatcaggactactccagaacaaggtgcaggctttcctgaaatgactcccagccgttggattgatttgatgcataaatcaaagaaaactgctccatatattctggctgattcaagggcttatcttgaccatgatatgtttgctatcatgtctggtccaaccattgctgccatatcagtcgtttttgaccatgcagaacatgaagacgtttaccagacatgcatcgatggattcttggctatagctaaaatttctgcctgtcatcatcttgaagatgtgcttgatgatctggttgtctctctctgcaaattcacaactctgttgaatccatcatctgttgatgaacccgttcttgcatttggtgatgacgcaaaagcaaggatggctactatcacaatttttaccattgcaaacaaatatggagattatatacgtacgggttggaggaacatattggactgtatcttacggctacataaacttggacttctgccagctcgtgtagccagtgatgcagctgatgaatcagaacattcatctgagcaagggcaaggaaagcccctcgcgaattccctatcttcagctcatctacagtcaatgggaactccgaggagatcttccggattgatgggaagatttagtcagcttctttcacttgatacagaagagccaagatcacagcctactgagcaacagcttgcagctcatcaacgaacacttcaaacaattcagaaatgtcacattgacagcatatttaccgaaagcaagtttctacaagctgaatctttgttgcagcttgcgcgtgctctcatttgggctgcaggtaggccacagaaaggaaccagttctccagaggatgaggatactgcggttttctgtctggaattgcttattgcaatcactctaaacaacagagacaggatcgttctcctatggcaaggcgtctatgaacatatagctacaattgctcagtcaacggtgatgccctgcaacttagtggataaagctatttttggtctacttcggatctgccagagactacttccttataaagaaagcctagctgatgagcttttgagatctcttcagcttgtgctgaaactggatgcacgtgttgcagatgcctattgtgagcaaattgcaattgaagtcagccgtcttgtgaaagccaatgctaatcacatcaggtctcaggcgggttggagaacaatcacatccttactctccatcacagcgcggcacccagaagcttctgaatcaggatttgatgccgtatcctttgttatgtctgaaggaactcacctgtatccagccaattatgtactctgtgttgatgctgcaagacagtttgctgaatcccgcgtgggacagtccgaacgctctatccgtgcccttgatctaatgggagattcattagaatttttggctaaatgggctctctcagctaaggaaaacatgggagaagaagatttcgggaagatgtcacaagatattggggaaatgtggttaaggcttgttcaaggactaagaaaagtgtgtttagaccagagggaggatgtccgaaaccacgctttacagtcattacagaagtgtttaggcggagtagacggaatcaacctagctcatagcatgtggtctcaatgctttgacaaagtaatcttcacggttttggatgacttacttgagatagctgctgggtcacagaaagactaccgaaacatggaaggcacattgcttctcgcaatcaaacttctctccaaagtgtttcttcagcaactccaagagctatctcagttatcaaccttctgcaagctatggctcggtgttctaactcgaatggagaaatacatgaaagtgaaagtaagaggcaaaaaaagcgacaagctacaagaatcagtaccagagcttctcaaaaacatattgctggtgatgaagacgaaaggcgtgctattgcaaagaagtgctcttggtggagatagcttatgggagctaacatggcttcatgtgaataacattgcaccgtctatgcgactggagctattccctgatcaagaatcctcacaacttggtgatgatgaaaccgtatcgaatggcttatcttctcctgaaaacacaactggttcgtgaccttacaagtgagatcattaggtgagtttctttcgaatatccatataagtactgtgaaagtgaaagcttcttatgtaacacctctctacgtttttttttgtaatatataagtctttctaattcagagactcgtattaattaagcaagtttcttaattacgactttgttaatcacggacctttggaacgaggtagaaggtcttgaacatgtgtggaacccaccaaaggaaaaatatcagtagattcaggagagttgttaaattttgcctccacgagtttttttcttttcttcttgttgagtcgtttacgtcacgtcgagaattttctcttttcccgagaaaattaagaaaggatcgtttgattttctaagaagggaaagataaacagtgaattagaaagagaaggaagtttcaatggaatcgctaacatctatttctccttccataattcttcctccggccaccactactacgatccccgtttcaacttcacgatcagtgttgattcgtcttccttcacgccgttcttcttaccttttcggcttgtccagctccgggagacggatttcgatttctagaagaagacacttcgttagctgtaaatcgaccggcggcggaggaggaggatcagataagcttggtggcgatgaagaagagagcgaggaagttgagaaggcgcttcacttggatggtacgatccctgggacttccgatgagtttgtaaggcaagtttcgtcgcgtgcttacgacatgcgtcggaaacttgagcagacgtttgattccactagctatgacggtataatctctatcgctctcaattcctgcgtttactttgattttggtgatgcaaaattaatactttcgttgatgcaactaacttgatcagagtttcttaaagattgtctaggaagtttgggaactgtagtagtttgaaattcccttagtgccttgtttttgttaacaggagtcaaatcgttttgttgaacaatgtcagaatttagtcactgtgtcacacacaaccggtgaagaagctctccattgatagatgtagtgttagttatgattcaaaagtttgtgttctgcataccatttctttagttccccaggagaagagtgcttcagctgaactatgatgaggaaaattgttcatttctagattccactcttacagtaagattgcaagcacggttttatcatctcatctttcacatagtgctgatgcataggaatatcaaagcaataggaacataagtgttttattcaatttaagcttgtattcatctaaagttaataaattgatgttgttcctttagtgctctgtatctttgactgagtgatttcgttgagaaccatttctctcactgtggcttctcacaatcttagtgttggagtccaacccatggagaggagattcgaagcctgtatatgtattaacacatagagaaaaccagatatgtaccatgaaaacaagaacaaaccacaggttccaactctattccactcaagtttttttttatagttttagttttcttctccctatgacattagcaatccttataaacagtgaagtagaaaaagagcttggactgttgttccctagtaggatcagcaaccagacaaagcaggctagacccaaaactaaattcgatatgctcgtagaagacattcgagatggagtactggtaagtattctcactgaatcactttcaagaccttatgaaacccagacaacgtgatatgcctagtttttatctcaaaggttttcgaagatgtgaatgaggctgttagatactgtgacctattacaagggggagggaaagggtgtgaaggtgtcgctgagattgaggcctcctctgtaagattatgagacaaagatatcatctaattctagaacttgttgcctttaaacatttgaaatgatctgcttttttttttttgaataggtttttgatctttgtcggaaaacaaggtctctggcagtgctcttccgccgtggaagaacaccacctacacctcagacgctggaacgtaatctcggatcccggaagcgttctcttgaggacttgagggataataaatagcttgtgaaacaatgtattaattttacttgcaataattgaaaatactttgtatagactaaacagtaattaaccgtgggtgatactgtgtatatatataaaatgcattttacttgtgctccataacttttttttgttccttataattctcttgaagttgcgctcttttctttgaaggctttaaagctaacactagtaggtaatgtattacttggtcaatcaacatgtgagtatttatagtatctatgattagttgacaaaaaagaccattgtatattgaacttcttaacatgaaaaatagtgacttttttttgtttagataaaaatagatatgctaaaggcatatgctagtgtattattaataaaaatcatgtgatagatgtgattccatgttatccggatcgttgacttgacttagtacccataacgtttattatataattcatatagcattttatgattgtcaaatttatatttatacatatgatagactattatgtcaaaaagacaggtaaagccactttgtttacttattctttcttaactcaaaactccaaagggtaaaatcaaggtgaccattactctttcagtttcaaaagattgtattattgtaacaaggtgaccattactcttaaaatttattcaaaaataaccaaatctaaactaaaacgtaactaaaatttgatattattcatgaaattctaagaacaaatccaacatgatcccttaataatttccctttagtagtctagccttcttagtcggtcactaataataaagagtaaagagaccaaaagagagaagtcttagataacggtgacagagttaaaaaagaactcactaaaatagacggaggaaaaagtcatcaattcaacttgacggctaagttaacggcgattatcttcgttcacacaagcaacacaaaagagaaaacatgaatcatctctctctccctctctccggttccacagtaaagaattgattcctcaatctcacgcggaagcaaaatccaaattctaaaattctaagaaaccactctaatcacatcgctctatcgatcaaaatcgaaacccttattcaaaaatctcttattttttccatttttctctcaatcatctgaatcggttttgagatgagctccgattcaccggcggctggagacggtggcgaacaagccgctgcgggaacaagcgtgccttcaccttcatacgacaaacaaaaggagaaggcacgtgtgagtagaacatctctgatactatggcacgcgcaccaaaacgacgcagctgcagttcggaaactcttggaggaagatccgactttggttcacgctagagactatgacaaacgaacgcctctccacgtggcgtcgcttcatggatggatcgatgttgttaaatgtctgcttgagtttggtgctgatgtcaatgctcaggataggtggaagaacacggtaaagcctcttcctttttattttgaattttgggttgcttcttcaagtttcttaactttgttatgattctgatctaaaacttattgttgtatttgtgggtatttgcagccactggctgatgcagaaggagctaggaagcagaaaatgattgaactgctgaaatctcatggtggtttgtcttatgtgagtttttgaattcccttttctgatctttgtatagctttaggttagacattgttccttttgtttcatttgttagggtaggtgatgattgctattgaatatgaaaatgttttttgcaaaatttagaaactttcgtatctctctgaagtagctgcttaatgcagtgttgtttgttattctttagtgtttctattagtcatttttgttgttgtgtgtggatagttgttcatatgtagctgagtaaattcactatgcagggtcaaaacggaagtcactttgaaccaaagcctgtgccaccaccaattccaaagaaatgtgactgggaaattgaacctgctgagctggatttttcaaatgctgcaatgattggaaaggtatgatttgtgcttttgcttatccgtgtttagttcaatataatggagttttgagcaaatgagtttcttttggctaatttggggttggtcacattcttttagggttcatttggtgagattgtgaaagcctattggagaggaacaccggtagctgtgaaacgtattcttccttctctttcagatgatagactggttatgtaagttcttacttctctcttatatcccaattattattgtcgaagaagtttctagcttttagctgatactttggtatcgctctcacctaagattcttgtgtttccatacttgttgtgatatacagtcaggacttcaggcatgaggttgatttgctagttaagcttcgccatccaaatatagtccaattcttaggagcggtaaccgaaagaaagccccttatgttaatcactgagtacttacgcggggtaggttttcactatccgctttctttttcttatgcaatttttcttcttggctaaataaatgattcatctttttgacagggagatcttcatcaatacctcaaggagaagggcggtcttactccaacaactgctgtcaactttgctttggatatcgcgaggtacttgaagttttaacattcgagatattatgtgagaatttgttcatcatatttagcctgagtgttttcgaaaatttgttgttacagaggaatgacatatcttcacaatgaacctaatgttatcattcaccgagatcttaaaccaaggtaatcaaaatcgcttcatatatatagctccttagtttcttacttcaaatccgctgctcataaatcgcttcttgcattttatatttcaggaacgttcttctggttaattctagtgcagaccacttgaaagttggagactttggacttagtaagctcataaaagttcaaaactctcatgatgtctacaaaatgactggagaaacaggaagctgtaagtgttgttctatagtaaaatcggaggtcctctgccttcttttcctttcatttctttaacttcaccttctttgtttctcttcttcgtgcaacaaaaccagatcgttatatggctcctgaagtattcaagcatagaagatatgacaagaaagtcgatgtcttctcctttgcaatgatactttacgaggtactaagatcttaactataaaacttcctttctctactacaaaaaacaaaaccaaagttcagaaaatcttaaccttaatttcattaccacattgtacccagatgcttgaaggagagccaccatttgcgaaccatgagccatatgaagcagccaaacatgtatctgatggacatagacctacattccgttccaaaggatgcacaccagatctaagagagtaagaaaaatacgaggccatatgcaccggtattactctaccggttatctaactaattttctcttttataggttaattgtgaaatgctgggacgcagacatgaaccagagaccgtcgtttctggacattctcaagagacttgaaaagatcaaggaaactctaccatcagatcaccattggggcttattcacttcataatacacaaaatccattatttaagcacaaaaacaaccagaaacaagaaagtatcattctctgtttgccttattaatctctgtttcatttcttttgtaaagattgtttctttttcatcttttcatttgctttaaaagagtgtgagatagaaagcttttattgttgttacatggattggattgagtttgcaggttaatgagaagttcatatcatatcagacaggataaaatgtctgtttccgaaaaattcagtaacaaaatgaaaaatgagttcagtagtgtatataaagctatagtcatagggttttcaatacaatctctgccctcaggagatggtaatggttttcagataagcttctttttctggaagaaagtcttcaagtgccaaaactgaagacctgcgaccgataaacaaactgcaagcgacacgaaactcaaccatgccatcttcgaatttgtcgctatgttcagattgtgcatttcttcttccctgtaatataccaaatgaagaagggttttgagttttgattcactctcatcctctgatcaagtgacttcaagggaagacaggttttgttgtcattacctgtcgcggagatagaacatctcatcgtggattccattcacggtttcaaataacttcttaacctcaaactccatcgtctggccaataaataaaacaagatccaaccataacaaggttaacaaaacattccttcaaaaactctgcaatctctttaagaggctatgttacatttcaagctagtcttgctctgtagtatgttaaagcctagtcctatctaccacatttcaagatagtaattttctgcgtctgttaaagcctagtcctatccaccttcatttagcagggaaagaactcctgaatgagctgaagaaatcgatggggttcaaaggtgaaactaatgaagctattttctcatatgcaagactgcagacacaggtcagtaacacacgagccctgtcagcttaattcatggccttgttctaaccaaaccaatgcaccaacataacctataaaccaagactacatagcatttctcacttcagatataactttccactttccagcactatgtcttggtgtaacttaggcagctatcaaattctcacacatccggcgcaatgctctattgttcatgtcattagaagcatcaaaatctatttcctctaaagagattagtttgactaagttaagacttcaagagtaaagaaaaagcgaaaaacttacttcgacttggctcttctttgccacattcgaccaatccttggtatgaatacccgtcctccaatcaaagtcaatgatcagcgtcgtctctggtttgtgatcgacggcggagaagcaacttatgtaatcccctgtttccacagctacaaacgagaattgtcccgattctactccgtccgattcgtgataagccgtcccttgtggcgatgtgaccttaaaaatcaaacacattgcattatactgaaatcgccggaagaagaaattgaagggaaatgcgatccgatcggatgattattaccctgacggtgactttatgggaagaaggaagaggatgatcctcgtgagggtttataatgctgtattttccgatggtcattgcgtttgcgtgaatctcctctgagatgcatttcgtgtgcccagaaagtagctcgtatcgtatagagagtgtcacgggagataaaattgagaggatcaatagtacgatcgagctccgacgatgattcatgacggctccgatatagagagaaatcgatctgacggatttcaaagtttagctatttttcttgttaaacggaaggaaggaaacaaaagaaagtcaacacgtgcattgccacgtgttagtatttcattcgttaaaacacgtggagtactaccctctggaattgggctttaaaattaaggcccattaataatgttggacctatatacttgtagtggatcacactaaagtaagttagaagtaaataaagaaacaaataacacatccagattttataattcaagcataactacatatgacttggtaatgttaattttaaacttaattgggaaattttgttgaaaagacaattgtactcgagtttttagtaaagaataaaatagtaatctttccttggaagggatgttaataatgcaacattgaggtacgtgtcatgatttcgtttcagtttttgttttgttttacaacagcttgaaaatatctgaataaaggagatgaatataaacagtggtttgaatcgtgattagtgcaataaatagatgacagtaataaaaaaagtacgggagaacaattaggtgaatccgttgacgaatgacaacgactatcaaaaaggcaaaatgtgtcatctttctttatatgtttttcaatgttgaatattcttgaaatctttatttatcatatgtttttctgatcaatcattatccttgaaacctatttttttttttttttggttatagaataatctttgacatttaatgatatatataatgaaacaagttaggaaaattgaagctttctgaattaggaaataaattgtgtaagcaatagaatgagtttcttgggaaaacaataaatagaagaagaagaagacactttgacggttaattaacttattttcccatctctcaccgttaccacctcttttttttttttttccgtctcgtgatttttttttcttcttctgaatttcgaaagaaaaaaaaactcctcgagattcaaaccatttgacacaaaggagagaagaagcatttcatttcgcgtttgtcatctaatttcaatttctgacatctcacaagatcggagaaatttaggttatagtaattttattctcatgaagcggcgacgacgatcgtcggaggagggagatggaagttagatcggagagtaatattactcaggcgcgaagcgataagcttccgcttccgccggcagttccgaagcctcgtgtacaagtatggttcgttagagtttgctccagcattttggtttggacgtgtttggttcagcttttcgccgccggtgagctttggcattcccggatcttcactggtttaaccaatcagatttctagattctcagcccctgttgagccagttccattgccacctcctctacctcctccgagtcagttttctctctatttaggggacattagggttcgttggtgcttgagagagtttaacgagattgttgattttgtgcagggaattatacaagcaatggtattctacttgtatcctgtaatggtggattgaatcaaatgcgatccgcggttggtgactttgctttaattctctttttcttcttctttcagatttgatgtttttccaaattctgatttttatgttgtgtttcagatatgtgatatggtgactgttgctcggttattgaatctcactctcgttgttccagagcttgacaaaacatctttctgggctgatcctaggtactctatctttggtgtttatagaatcactcatgtgtcttatatgcttaacattttttagcaatctaaagtatcctcatttttgtttgcagtggttttgaggatatttttgatgtgagacatttcattgattcattaagagatgaagttcggatcttaaggaggcttcctaaacggtttagtagaaagtatggatatcaaatgttcgaaatgcctcctgtgagctggtctgatgaaaaatattacttgaagcaggtttgtcttgtttatcactagttttgctgttttggttcctttgactatccttgttacaagatattacctaaccatttgcatatgtgattggttaatttcttgttcaggtattgcctctcttcagcaagcataaagttgtacacttcaataggactgatacccgcctggcaaacaatggtcttccgctctctctccagtggctcaggtgccgggtgaattttcagggactaaagttcactccacagcttgaggctttgggatctaagttagttcggattctacaacaaagagggccatttgtggctttgcatctgagatatgagatggacatgttagctttctctggctgcactcatggttgcactgaggaagaagcggaagagctaaaaaagatgaggtttctcttcaaaagatttctcctgaattggtgctctggttataggtctttttagttgttaattcataggtccattctgtgttctttaggtacacatatccctggtggagagagaaggagatagtctcagaggagaggagggcgcaagggctgtgtcctttgacgccagaggaggtggccttggtattaaaagcgttgggatttgagaaaaatacacagatatacattgcagctggtgagatttatgggagcgagcatagactatccgtgttaagggaagcattcccgagaattgtgagtctaccagtcctggtttcccttttcttgctacaaagaatgctcaactgcatcgtcattacaatgcactttttcttatcagttttactcacctgtggttataggtaaagaaggaaatgctattggagtcagcagagctgcaacagtttcagaaccattcgtctcaaatggctgctctagatttcatggtatctgtggccagcaacacttttattcctacgtatgatggaaacatggcaaaagtcgtggaaggtcatcgtaggtaaattatttgtggtgtcgaatgcattcaatttcatgacaactaaaaaggtggtgttaagaataaccaaacctgtgattctatataaccattattggtctatatctgatttgaatttgcagataccttggatataagaagacaatcctgcttgaccgtaagagactcgtggagctactagacttacatcacaacaagaccctcacgtgggatcagtttgcagtagcagtcaaggaagcccatgagagacgagcaggagcacctactcatcgaagagtaatctctgacaaacctaaggaggaagattacttctacgcaaatcctcaagaatgtctttgtgaaggtacaaattgccacgacctgtttggccatagaaatttaacacattgaagtcatgtttttagcatattatatctcattgcttccgcaagaggacggcatgtcaaacacttgaacgggagctgcatagttccttccctgagtttttccatttttgtttgtaatttttttcaattttcctgcatagttgctgatcttgatttatttagttttacgtaaattaagatgtaactaaaaagaagattatgtctcatcttatagaatttcaaaaagcctgcttttggcaatagcctaacatacaaattgtggtctctcaactctgatgtcttgaggttgattcaagtctatgtggtctgagaccaaaccagtaaagattttctttctagccttgagtttgttctgcaggataagctatacaagctaagctaattctcacttggtttcccagaagataatatccccttgttcgccaaccaacccaagatctttgagccttctctcttggtaatactctaaaatgtcaagttcaagctctctatccttgaagatttggtcgatttgctgaagcactctcttctcaccaatccttatcttgagagccatttccaacctaggctcaagctttcctttgtccagaagcttctcatcctacaacagacgatgaagacgagtaagaaatgagtgttaagctgcaaagacagtacaagtaagagctcgaacatatatacctcttcaatggtcgtatcaaaaccagacagagcagatttgcaggcatctctgacaacacggcatatgagttcctcgtttgtacgacttacaggcaattcaagatgaccccatatggtgttattgaagatagattctaataagaaagcatctggaccgccaagagccacaagccgaaggtactgaagcataccagcgggaagagtctggccgtctactatgtcaaagtatccggtctcacccatcttgttactctcagcaatatccaacttatccccaaagaatgggtctgattctggtatctctattgttaaagtatatgagttccgtttagggtttgattccacaaaaccatagtcgagagcaagttctgcattgcttttgttcagatcgtactgaatgtatacctatggaagagatcatccaaacagtattaaagggcttgttcttacactcttgagggagaaaactaagtagacagtgtttggagcatacctgctcacctgctttaacataaacaggtgacttcaaggaaaataagagatctctagagaaaaggccggctcctttgatctcgtatgcataatcttctgtctttatcgcggggttatggtttatctgttcaaattcaaacattgaagtcagagattctctgctgagccaagcatcaatgaatgaagattattttctgaagttttcactagacaatatctgaaacaagaagatagcttgccaagtctgcaagagggatcaagacaaggttttggccacggagacgagaaaaagccctcgacttgaggatcccaaacgcccatatgaagtcatcaagtgttatgcgggatgagaagagatctttgttaggcagtaatatctcttgttccagtttcaagaattcattctccacatactctttcacacccaatgtggtgctcaacagttgagtccctgagccaaacaacagtaaccacaaagttaataatgtacatcatcatcagctactgctactcagaccaattggtatgaatctaaacaatgatcagacttttcaaagaaaagggtaagaaaatggacctttaagctcagcaagctcctcttctgacctgtactggagacatttcacgaagaagacatctcatcagcttagtgttgatcagagatacaattgatgatcagagaaggacaaaacccaccagaagacagtagaatcagtagattgaggaagcatatcaagataaactctccatgaagactcttcttcatacttctctctgatcaaaaacagagctactgaaacccacggctttaatccgccgcataaaggtccaatcttggaagcagtcactgtctctgggtttatccacaatcgcttgggaatctccaatacgacctcgtttcttccaatatcacgcctggctacaagtcccaaaccttccggtaccaccgcaggttctgccacagacttcccggatacgactccttggtctctgagccatttccagaaattccgaacattttccggcaactctgagcttgaagctgaaatgggtctcaccaaagatttcttgggtcgagaaaagagaaaggaagggttttgagacttttgaattgacgggatacggagaaaacccgacacgacggcgacggaggctgacatggtggttttccgatggcgggtagtatcagtgaaacagagagtgtgtggataacaataatatcacatcagttttttctaagttgttgatgagacaaaaatctagttattctagttaccaatgttaaaggcccattattctaaaaggccaaggcctacattttatttttgttctgatgtaattaaattgttaattgtctgtatttattttcatttttaaaaaattatctttttaacttatggtagcttcaacttctttttcttttttttttttgtcatctcaacctttgtaagaagaaaaatggtcaactatagcttcaacctcaaatctactgacttgacacttgagttttaaataggtaacatctcatggagatcccaatattcattctaaattcctccaagataatgcaacatgttacaacaacaacaacaacaacaacaacaacaacaacaacaacaacaacaacaacaaaagagattggccgagacatatatgtagtatgtacccaccatatcacacataccttcataatcatcatcatcatcataatatcaagtggtctaattcaaatgtttttgatttaattatgtgtttaagtagttcatatttaattgtgtgctaaaatacttattgtaattgaagaatcaaatatacaagtcttattcactattcttaatcaaatagaaattagtcttaaatttgtaatttagggggtacaatgatccactattctccatcaacgtagaagacaagtaatttactttgtaatataggtaatggtacgtacgtagtaatcacatgtaaaagcggaactttcctttctcttgttttgccggcttgaccacgggatatgagaccagtaaggtacatgtgtaatgtgatacctatcagaaaccctattacactcttatcaaaaaacaaaacaaaacctattacactctctcggcttaattaagattatgatcaattccaaatatgtttctgatataactttaattattaacgagaaaaccaaagtttattgctacttttttccgtcgaaatggccgctattttaagttttagacaataacttggtccatgaaattaaggtacaacgtcgatattgattaagatcagtttacttttgctaatataacgtgttaagtttgagatgggagacacgtgaatgacttttcattactttcaaaaattgttcaaaattccaaaattggcaacaagactgttttagttgttaatatgcaattagactgtttcaatagagtgtatttttctttgtcaaaatgtaataagtactaatttgtcatacaaaatatcaaatgtcaagaacataaactcttctaacggaaccgcttgtcgcgccgaaactcgtgtggtaaacctgaaaaacaactcactaatcgcaattttaaatcagagactgagaaaacacttctcacgaaaaccacaaaacgcggtcaatatcgggatgacgacatgatgtggtggtcggattgacacaattcaggttggtcaacaaaattcatccctctaaaatatattttcttagttcgttgccaaacagatatcttacctttactcttttttttttttttttaaaaactcatataaataggatagttattaaatttaactacaaatggtattgtatatgtatattctatggctaggtgaaaaggcttcctttagttcgagaaggtcaaaatggatggctaattaacttttatatacaaacagtatatgcctaacatttaataaggagagactcagattccttgtcaactactcactattgtctccatgactctttaaaaaatatatttttatagaatcttagtattcagaaattaaaccgtagcctttataggataacaaatgtagatgatgttaaatatgaaaattggctccacaactgtccatgaggcataaataactcgaaaacttaattagtttgatcttacagataactaattttttgtcacatttattataccccaaagtatcttaataatgcttgtcggttcaagttcatattttttcctcggttcaaaatccaggctatttatccgttcttttttaattaccttcatgataacttgtcaattttgtatttcttattcatgatttttctcatgcacatacctaatttacgtcgattaagatccatgcaacgttcataaaataatgagatagtatattagtattagtatcacatacataacgatataatattttacaatgtatttgcatgtaaagcattttcaacaactactacttaatccactttggttctgtgcaccatatcgaccttgagccgcccatataccgcgactagggtcgtccactacgaatataaaaatttatcgttataaatataaataattgatatatttcaatgattgatggattaattaatataaataaaacatgtcaatgtaagactaaatgactaatcagcgggactaatcaactcctctttttttttaaataattcaactggtagatcaacgcgggtttttaatctcttgtaagaactagtacgaatgtacgataataattccagtttctcacccgaaaaactgaagcataatgtttgctcacacactgacacacactgtggttaaataaaatatcgaaagttaaatttacaaattgttttatcgtaatacttgaaaaaccaaagattatattatgtaattataacaaaaagagatataataaattactggatttcaaatctctatatttttgtctccactttatcaaaaaaaaaaaacatcagtctccactctccacgcgccttttagtcgccctctctgaatacactacagtacaacgttgaaaagaattcaataaagaagatcaaaaagcaataaagttaatccttactttaattagaaacaattttctaatcataaacctttatcatatcgtcaaaacatatcatgaacgacttgtctctctctgttctctatatatatatgactcctcttcttcaaagttcagacacaaacataaactagcgtttaataaaaaacaagaaaaaatgaagttcggaaaagagttctcgtctcagatggtgccagagtggcaacaagcttacatggattacgattttctcaaaactcttctcaaagaaatcatcacattcaaacgaagaaccaacaatgcaccttctcatggtggtgccaagaccggcggaggattaaaccggaaattgactctataccgtgcgtttagcggtcttgtctcaacgccaaggcataaacgtagtaatagctctcatgatgttgaagaaggtgtacagttgacgggatcgatgaggtcggggccgattcttgtgaacacgaccgcgagtcatggttatgagacgacgtttctgatggccgcggaagaaggaggagagtacgaactagtgtttttccggcgactagacgatgagttcaataaggttgataagttttacagaaagaaagttgaagaagtgttgaaagaagcggcgatgcttaataaacagatggacgctttgatcgcgtttcgtgttaaagttgagaacccagatggatggagatgggaggaacggacggtggagatgactcgattagcttccgatattgctacttctgcggcggctctctctgcttctactccagccggagctaaatccagtaagcaataatcaatacatatctatctactcttcacctaactcacccactttggacataaaaagacaggaatttggtccaaatttatgtctaggtactatgatcatatttgttagcaccaaccaaatacgaaattgatagtaccgatacatgatttagcttaatcaaatcatactataacaaattgtaccaaaaccggattagagttgtttcatttttcatcagacttgaacaagaaacaagataaattggtattttaaattttgttagttttaaatatactcactaacaacaagtgaactgtaattccatttttatattttttgaatttgaatattccatatacttccaattgaactttttttttagtttattttactcgtttggatttaaaaattctcactgaaggtaaatgatttttatatttcaaagtaaaaaatttagtggttggtattttcatttccacttgagttattttatattcatgtatattagatttgttgtctattaaaacaatgatttactctctatctcacattttttttttttttcataagataataaaataatctgtttttgaacttctaaacgtttttccttgcggcttcaacttccatgcaagctagatcattttatacggtactgtaccaaaaaccggattatgaaattaatttccggttcacttaaatctcacgttaccgtagtctcaaccaaaccgaaattttgaatatgtagtgaaagttagaagtcaagagcacatggaagcaatccaagaaggaggctcgagcagagctgggctaatggaagatgatgaagaagacgaagacgaacaaaacgaaacctctgtggtatctaccggagcaatcgataatgagactactacgagcaggatgagaggagcgagaccatctccgatcgatgtacttggtcgagttaagatcaacaacacaaaagagacacctcgttccaccattaaaggagttctcaaagtatcaaaacagacagatttaaaattcagcagagagaatctgatgaaagtcgaagagagtctcaagcgtgctttcatcgagttttatcagaagcttcgacttctcaagagctataggtgcgtatgggtttcaaagtttgagtctttttatgattatgattgatgggtttttgattttgatattcgattatgttttgtgtagttttttgaatgtattggcgttctcgaagatattgaagaagtatgataaggtaagctttgagatttttgagttgaggttttttgaaggttttatatgaatgactgcaatgtgttcgacgaaatgtcttttacagataacttcgagagatgcaacgaagccttacatgaaagtggttgatagttcatacttgggaagctctgatgaggtaagaggtttatgagatttttcttatttgataataaagtaacttcatcaattcctctgttttttattctcgtatgattgctctgttatgataggtaatgagactcatggagcgtgttgaagcaacattcattaagcattttgctaacgctaatcgggcaaaagcaatgaacattttacgacctaaagcgaaacgagagagacatagaattacattttccacaggtgaaaaaatcagtaacttgcataatttgggttttagtatcattgtatcaaactttgtggtgcttatgaggaagttggtttcaggtttctcggctggttgcgttttttctcttatagtggctcttgttgctatcatccgtacccgaaatctcttggaaatggaaggccagaaggaatacatgaatactatgttccctctttataggtaagaacttagtaacttcgccttcttaagaacgtatctcgagcattcaagttggaatgtgttgttttgaatgttttcttcgttgttgttacttgcagcttgttcgggtttatcgtgctgcatatcatcgtgtatgctgctaatatatactactggaggcgatatcgagtaaactattccttcatatttgggttcaagcaaggaactgaacttggatacagacaagtcctgcttgttggtttcagcatcggagtcttggcattgctttgtgttcttgccaatcttgacatggaggcagaccccaaaacgaaagcctatcaagctagaactgaaattcttcctcttatcctacttgctgtaagtcccaaaacccggaaattcgactttttaactgaaaaaagaacggcataataactttgtgatgtttgttgtcgacttttgcaggctatgttcattgttctagtcctgccattcaactacttttaccgctcgagtcgctttttcttcctcacttgtctgtttcactgcctcgcagctccactttacaaggtaaatcagggataaaacaagctcatcaactaaagagaatatggtaaaaatttgaaccgtccaatattcattcgccttttcctatgcaggttacattgcctgatttcttcttgggagatcagttaactagccaggttcaagcgattcgaagcatcgagttctatatatgttactatggttggggagacttcagacacagaaaaagcacttgcaaagaatctgatgtctacaacactttcttcttcattgttgctgtcatcccttatgtctctcgcctccttcaggtaaagcacatagctactcctttcaaaacgaataatacaatatcttgcagtccataacgaaacttgttgttactcatacagtgcctgcgacggctgtttgaggaaaaaaacccggaacaagggtacaacggactcaagtatttcttgactatagtggcggtttgcttgagaacggcttacagtatccaaaaaggtcaagtcgcttggagggttttagctgctgtcttctcatttatagctgcaatattctgtacttactgggactttgtccatgattggggtcttctaaaccggacatccaaaaaccgttggcttcgagataaactccttgttcctcaaaagaaagtatacttcatagcgatggtgagtctcatgcaaaaacacttttcatcaaatcaaagatgtttcacagcaactaatcttagaacatgtatcaggttttgaatgtcctgttgagatttgcgtggatccagacagttttagatttcaacttttctttcatgcatagacagacgatggttgccattgtcgctagtcttgagatcattcgtcgtggtatatggaatttcttcaggtgaaaaaaaacttcaaaactcacattacctgagtccacaagctttgttgcattaatattccaattagtaactctctgtttttgtttggattatggaaaacagattggagaacgagcatttgaacaatgtcgggaaataccgagccttcaagtccgtcccattaccgttcaactacgatgaagatgacgataaagataactagtagtttcagatagattatgataaaatttggaaaaaaaggttaagataaattaagattgagtggcataaaatggactacgtgttttttattttgatcgaatgtgagttaattagcatcattttattattgatatcaattttgtatcatttatttaattgatattttaatttgtatcattttataagtgatgctaataacaaattagtacaacgattatctgttgatgtaaatatataggtttctatcaatattttaaaaataatccaaatcattatagatttctatcaattaatcaaattgatgctaaactatttaataaaaacatcagttattataattgattctaaatcatctatatttgtctcatttatacaaaattgattcaaaatagtatcacttagttttgtgatacaatttaagtgatttaattcaatctttttttttgtagtgcatacgcaccaaataaaccatcgcataaagatcttaagattctaaatcaatgatccacaacaagatcccgaacttgattttcacaaagattaaaccacaacgtaactctgatcggaaacttacaatcttcacgcatcttctcgctcaacttccttgagctcccattatcaaatcggtccagtcgtcttcactcctcatgatcgatgatgcttcgagagggattgatttctacggaaaaattctctgagattttgagagggaatgttcagtttaatgctttcgagaatcgtttatatagctagtcattctgaacaaataaaccaatggatcggaaagcaaatgaagagagaaagcaaatgctagtgtattttaatacaatatgaaaccacaaagaagtaaaacttttcagcttgatcttcagacaaactagaaaatgcataaaccagattaccagaagtaaacactagaaaaagattctgtttttagaagcaaaaaatcacactcacatgaagaaatagctaactaaagaaaccacaaacaaacacaaaaatcctcttatagatcaaataacctatcgaatcatatacagaaggaaagagtattaattcagatggaaacactcccaagccccaactgatattccttgtaaacaaagaaaccatcaaaaaaccctagaccctcttaattaatcattctttcgagagaaaggcttgaagctccttctctatgtgttcttgagcagtttttttggccgcaagaaacggacgatagtgatcagtgagcatccataccatacatttggtcatcatcgcaaagactccaacgttggtagcttcatcagtgcaatcttcccagtcagtaaatggttccttgcaaccacctcctctcatgaacgctgaaaacacctctcctttctcttcttcttcccttacttcatttggggatacggattcccctggatctcgccaaacagttgacggcaagaaatccttcatcatcagttttcttcgcatcgagaaagggaagatagtaatcagaatgtctctccatacacttctccaacatcgtataacacaaagatataggttccttattcttcttctcagcttcctccacacaacctttaaaggccgtataatgtttccttggatgcaccttctttcataaacacttgtaatcgattttgccaaagacttcacgaatctcctactttctctggctagacttgttttttttttgagatttggtatcggaattctccggtttcagatccgtggatgacaattaatcagtgattatcatttcattaggtcagagaattacaatatatgtagggatatgataatttacaattaagtatttgataattgcaattttttaaaatattcgataattacagtttctttacgcatgtagggatgtagtcatgtagggatgcatcatgtctatataacataagacatattgggatgcatcagaatcatataacataaatagtttggaaccaaataaacgttgaacgaggcttttctcacaccatatatcttttcaaaacatactaacaagtcaaaaattgatatccatgtaacttgaaaatcatgcacagacaatgctacctttgaatggtcattaaaaaaagaagctaaacacacttcagatccaaccatatatgtgatcaaagccagtgataaaagtcgagtcattcttggcagctaacgactaaggtaagcaaagaatcatatggtcatgtatggaggctgataacagagatgaagttctgtaatgtttcacatctccctacaaattagaaacacgacatacatacataccaggcaaaactgggatctgtaaaaaaaactatcttcgaggagatatcaaccaaacagaacgtcatcgatcatgaatgaaagtgttaaaaacaaatgctagtgtatcttaagcacaaagtgagtcaacatagaagtaaacttgatctttagacaaactagaaaatgctggaaccagaagctatcactacaaaaggtctgaccttttctgtttcagaagcaacaaatcacattccaatgagaaatagcttagcaaaccacaaagaagacaagatttcttcactgaaccattaatgggtctcaacaaaagtcatgacctttaaagagcaaattctctctcgaatcatataaaaaggagtatgaattcagatgacctcaatcaatcaacttattaattagagaagaaacatgatcatcaatgggatcttataagttatgattctaacaacgaactttcctctgttcctagagaacaatttttatccccaaattccaatcttttgatattcccataaacaagaaaccataacaaaattacccttgagcttgcttcttcgcagctacctcctcttccgagatcttctcttcttcttccttcttcttctcagcttcaagctccttcttaacctctgcttcagcagctttctccgcagcgagaatgggctgatagtaatcggaatgttcatccatacacttcttcaacatcgaagtgacttccatacaattagtaacaatatcttccttgttcttctcagctgcttcaacacactcttcccaagcaacaaacgaatctttgcaaccacctcctttcataaacaagcaaaacccacactctccttcctcttcaccatctgcgtctcctcctcctccttcttctggtttttcatccgattcggaatcttctgggtctctccaaacagttgatgaatctccgagttcctcagatggagctggagtcgacggagacgcatctccgagtttctcagatttagctggaggagcttcttcgttgttttgagatttggggtcggaaaaagtctctgtttttggatctgtggatgatgtaattcccatttttctctcaggagagagtgagatcggatcttatggaaattggaggattcaggaggagaaaaagatgtctctttttaagggttttaaggttctctctcggtgccgccgccgattctctttacaagccagagagaaatgatcaatcgaaacgtctttatgttaaaacccctcaaaaacctttctattgaaccggatattctaaaccggaccaaaccgaacttaaacctttgttaaaccgtaagaatttaaccaaagtgaatatgataaaacaacaacaaaagaatgatctgtccacaagacgattcaagaataatgtattgttaagatttcaacatcaatgtttgttgctaattaaacacaagtctcctatttgctacaaatcgaatatagacaccaacatcattcgttttatagtaataaaaggaagataaatatagggagtaatcattagattaatattacagtcgctttcagatttcgtcaaatttcacaggcagacaagtttctttgacttggtcactataagagttgtaaactctttgataaataattgaatacagcaattatttcaaatctccggtgaagtttttctgggctctaagtatgaagacaaagctcatgataacaatcttctcttgcttactactttggtcgatgttgttgttactatcattctccaacatcttcaaacaccagcttcttggtgctacaatcaacggtatgatcaatcatcttttgggtttcttagtcagaaatgatccttttcacttacttttttcattttcttgcagtaggttcaaaggattctgtaaaaccgagggatagactgttaggaggacttttaaccgctgatttcgatgaagattcttgcttgagtaggtatcagtcttccttgtatcgcaagccttcgccttacagaacttctgaatatctaatctctaagcttagaaactatgagatgctccacaagcgttgcggtccaggcactgatgcttacaagagagcaacagagaagcttggtcatgatcatgagaatgttggagatagctctgatggtgaatgcaaatacattgtgtgggtggctgtttatgggcttggaaacagaatacttactcttgcttctgtgttcctctacgctctcttgacagagagaatcattcttgtggaccaacgcaaggatattagtgatctcttctgtgagccttttcctggtacttcatggttacttcctcttgattttccattgatgggtcagatagatagtttcaaccgggaatactcgcattgttacggaacaatgttgaagaatcataccattaactcgacaacaatcccatcacatctctatcttcatcttctccatgattacagggatcaagacaagatgttcttttgccaaaaggatcagtctttagtcgacaaagtcccttggctggttgtcaaatccaacctttactttattccatctctatggctgaatcctagtttccaaaccgaactaatcaagctattcccgcagaaagacaccgtcttctaccacctggctcggtatctttttcacccgacaaaccaagtctggggtatggtcaccagatcctacaatgcttacttatcaagagcagacgagatactagggattcaagtacgggttttcagcagacaaactaaatatttccagcacgtgatggaccaaatcgtagcatgtacacaaagagagaaactgttacctgaatttgctgcacaagaagaagcacaagtaactaatacatcaaatccctccaaacttaaagctgttctggttacatctctgaatccagaatactcaaataacctaaagaagatgtattgggaacacccaactacaacaggagacatagtagaagtttatcagccaagtagagaaaggtttcagcaaacagacaaaaagcttcacgaccaaaaggccctggcagagatgtacctcttaagcctaactgataagcttgtcacaagcgctttgtcaacatttggatatgtagctcaaggtcttggagggttaaagccatggatactctacacaccaaagaagttcaaatcccctaatccaccatgtggccgtgtcatctccatggagccttgtttccttacacctccagtacatggatgtgaagccaaaaagggaattaacactgcaaaaatcgttccttttgtaagacattgtgaagatcttagacactatgggcttaagctagttgatgataccaaaaatgagttatagattttacaaatcgaaacagagcatctttctgattgtatgtaaaggcaaatgtatacagcagatgtattaaaaatcaaaacttggctactgcaatttggttacttactcgatccagaagttatggtccaaaggcaatgctcgaatacatggttactgcaattttaacagaacaggaccttctctgtcggatttgtgaggtcatgtcgatgttcttcaaaattcaagcactctcctaacttgtaatcgctcttcgttcacttcttctcaaaatagttaggttatctggagaaactggggtctattgaattattatatgtcagctaacctaaactatttggagaagaggagatcgaggcgtttacagattttgtgtttagtaaagacactagcgagactctggtgaaatagacaaaacaaaacaaaaataatcctaattttataggtttttggttaatatcatgtgtaatttattattatttttaaaatgtttaaaagtaaaaaaaagagttataaagctgagtttttaacaagtgtcaaaaaaatgaaatttgaattttaagttttagattttcaatattgcatataataaaattctggaaataatcatattattattttccgtataaaatagtcaatgttaccttacctattaaaatgttaatacatatcacaaaattaaatgctaaagattgttttccaagttaaatttgaaccattaagctgtctttggaaaaccaaataatatttacttatgacaattgacctaaactatatacattaaacagatatggaaataatcataaaggcataaatcttttcaccttttttttcttcttctagaaaacagtcaatattattaaatacgggcataataacttcttactatgaacgtttagcaattagcattaagctctctttgttgaaaaaaaaaaaaaaaaaaaattctctgttcttcttttgtaattttctttttatcaccttcttgttcttctttgtttctattttttattggcttttttcgtcttcgttcaatctgaatcattttttcatgactattttttaagttgcgttttcaattataaaaaaatttgtttatagattgattgacaatatggacaccaaaaaaccatccgatccatatgttcgagaacaaacatgttctcaaagatcaattcaaccaccaacaaatcaaggcaaggtacgttatgaatttatatatgaaactttataatttgttttctgttcatatttaagtacacattcaatatatacatattcaaaagatgaataaaacttcatttgataaaaattataatcttagttcaaaggtctatattgataattccattagaattcttaacatagttttcatagaacattcattcatacctctaaaaatccctgtggattggtttaatctgttttaatcgttgatttcggttggtttagtgaaaagttcagcataggcttttatctcttgattttgggcttagttgttaaaggcccatgagttcagattttctatttcaaaccgttcgaaacagagtagacctaaacagagtaacgaacgactctagtgaaggtagcttgttttgctagcaacgaaagctatttttattggtcattgcaatacgttttcataatactaataaagcaattagtggtctagtagcatttttttattggatggtagatgcaaaaagttttctataagaaacccgactagattagccaaattacatgcaacatctttaaaaatgatttcgagaagctgcctaaaaaaagaaaaaaggatttgaaacataacccattttaaaaccaaaacataaaagttgaattggcctatcaataagttgtcaaaatggtaagttttggataggctcatcactcataaatcaattttgtttactctctttattcttagtcaacaacgcgaatttccggatctgattagtattatttccataaaataaatgaatgtatgatttgtcaatttgaaaataatacatgacatgtgatgtattgtttggattccaagttctcaccattttgaggattattgctttactacaaaacaagtccctagtcacattggtcatttcttcgttagtttaaaattatatataactcaacttgatgattcacataaatcgaagatcaagacttttctagtttaaaaaaaagtggagtcacgttacgtagttcgttgattgtcacaacttaacaatgacccattagaatattcaaaagacttagtattatatacaaatgcatgtttcgtcacctttaattaagaataaagagttgtaatcacgctagatatataactcttttgaatcaatctcctagttatagctgatcatactaaagtcaacatgtatcacatctttcagatctccagcgaagttttcagagcttttggtttgaagatgaagattctgctaacactagtctttagtggcttactaatttggtctgtagtgttagtttcattctcaaacgacttcaacaaccaacttcttgttgctacttccaacggtaaataaaatcatctatcttttgtttaactcaagaattgtcagaattgctgcttatgactttctatttcttgtaacagtttcaagggaatccgaaacaccgagagatagactgatcggagggcttttaaccgcggatttcgatgaaggttcttgcttgagtaggtatcagcaatctttgttgtaccggaaggcttcaccgtacaagccttcggaatatcttgtctctaagcttagaagttacgagaagcttcacaagcgttgcggtccaggcacggatgcttacaagaaagcaacagagattcttggtcatgatgatgagaattatgcaagcaaatctgttggtgaatgcagatacattgtgtgggttgcggtttacgggcttggaaacagaatacttactcttgcctctgtcttcctctacgctctcttgacagagagagttgttcttgttgatcaaagcaaagatataagtgatctcttctgcgagccgtttccaggtacttcatggttacttcctcttgaattcccattgatgaagcagattgatggctacaacaagggatactctcgttgttacggaacaatgttgaacaatcaagccatcaactccactttgatcccgccgcatctgtatcttcatattcttcatgattcaagggataatgataagatgttcttctgtcaaaaggatcaatctttagtggacaaagtcccttggttgattgtcaaagccaatgtctactttgtcccatctttatggttgaatccaactttccaaaccgaactaatgaagctgttcccgcagaaagaagccgtctttcaccatctcgctcggtatctttttcacccgacgaatcaagtttggggcttgatcacaagatcctacaatgcctacttatcaagagcagacgagacgcttggtattcagatacgggtattcagcgatcgagctggatattttcagcatgtaatggatcaggtcgtagcttgtacacgaagagagaaccttttgcctgaaccagctgcacaagaagaaccaaaagtcaatatatcaagaagccagaaacttaaagctgttcttgtcacatctttgtatccagagtactctgaaaccttaaagaacatgtattgggaacgaccgagttcaacaggggagatcattgaagtttatcagccaagtggagaaagggttcaacaaacagacaagaagctacacgaccaaaaggcgctcgccgagatgtatcttctaagtctaactgataaaatagtcacaagtgcaaggtctacatttggatatgttgctcatagtcttggaggattaaagccatggttactctatcagccaacaggtcctacagctcctgatccaccgtgtattcaatccacgtcgatggacccttgtcaccttactcctccgtctcatggatgtgaacccgaatggggaactaactccgggaaggtagttccttttgtaaggcattgtgaggatcgtgggaacgatggtcttaagctatttgatgagttatagatcttctttaatatagctgattcaataggattgtgagttattgaaacagagaatctttgatgaattcttctgattgcatgtaataatcaaattttaatctttgtttctttagagtcgtctataataatcattattagtgtcctggttcagtttttaattaaacacacaaataagagaatcatattttcatgcttaatgaataccttaacagtttacagtttcatcctctgtattaatatgttaatgcacagaaacaattagttgttaaaaacatttacaaggcttgtttgctttattataataactctgtacatttacttacaattcaaaatcaataaggctcctgtagccctgtgtctgagagctttgaaaatcctctgtttcagagtttcttaatcctcgtccttcttggtgaggttcgtgctttacctgaattcctgcagcagtagtgttgtagattaagaaattaggcgatttcatttcaaatcttctcacatttaaaagtatacgaaccaagaaaacatcatttagtaaatgtgaaaacataaaactagtttctacctttatgattcctctgttctcaagctcgtggttccttcgttgtctttttctttcccgaggaagaagtgcattgacatgaaatgagctcacatcctcatttacgcgttgcagatcccaaatttattgtcaactgataaagaactctgttctcaatacctataaccgtgtttccacattctcactttgaccttttagatataggctctcttcataaattcttggatcacttttttagatcgaagtctcttggcctttaatatagcatactgtactgtagacagggaagctgtagttggctcaatgccctttccccacatctcttggataagtgtgaccgccttatgtacgaatccattcctacaacaactagctattagtgctgtgtaaggcacaacatcaggctccaatccactttcaatcatttcagcaaaaattctttctgcctcttgaagatcctgaatcttgcactgctgagcaattaaaaacgtgtagtagacaacgtctggtttaacatcaaaggccttcatttccctcttcgtatcaaactttggaatattgagcaaaactgtgcatgttaccacatcaggtttgattcccattgtcttcatccttataaaaagagcataggcttccttcagctcgtttaaccggcagtatgtgttaatgactgtaaaagtgtacaaatcagggatcattcctctagcaactaaaacattaaattctgccgggcttctctcacattattaactcgacaccaagcaccaattagctttccatacatgctcttctcaggttcgactccaagttcccacattctttccagtaactcttgagctttgctgatataatcattctcggcgcaaagactagtgaatagtgtgaaatacacactcttgggtagaggacattccagactaatgaatcgttcaaaggcctgatcaagacagccagcttcacaatagcctttcaccatacttgcatcattttcccgagatttatgttccaatctctcataaaaagcttcagcctcgtctagtttatctgcaacaatcaggccttcaatgaccatgttgtgtgtaacagaagtgggttctacaccccgatcttccattagtttcagcgaatgcctcttgtacaagaccattcctagccaatccaccagcaaatacgttatatataacaatatcaggtgttttacctgtcccgtccatttcaatcatcaaattaaaggcatcaaaacattaaccttgaagacagcaaccacctatcaatgtcgtgtagttgatgacatcaggagctattcctttacccgtcatttctcggaacaagcttcctctactttgccaagctttcccaaagcaccaaatgcaacattgtagcaaaccttatcaagagaaatgttcatctctctaaactctttaaacagatcaaaagcttccgagaaatttcccatctgacaaatgcattgaaggattgagcttacaatcacacaatgtattctttttcttttcttcaccattttgttaaaaaaatccaaagcttagatatattcagattcttgcgatatccctcaattatggacgagttaaaatagacatccggatcaatcccaagttcctccatgtcaagaacagcttttttagcctcttctattctcatctcattacataaaccacgaaccactctgcgatatgcaattccaagatcactcttatccaccagaatatttgcgtccctcaatggttggagtacaagattagctatacctgccatctgatttaaacagagtccttcaatgaaattcatataaaacacactacatttcctaggctctgaatttaacagtctactaagaagcttctctactccttttgtatcctcattcctacacaatgcttgaaccacaagcacataagtatttgcatccgcatccagccccagccgctctatttgcatgaaagtagccacagccatattgttttctccagaagcaatcatacggttcatcaaaaaactcaatgcttgtatatctggaacacaccctaggggactagtctggaaaaatatatcgatagcttggtcaaacatatcaagattagcataggctttaaccaaggcactggagagcctgctcaacaacagcaatgacccttttccctcctcttctgcttctccaacggcctttaacagatccatgacactgaatccgcgtcctttatctccttttctaacgagttccactagaaaattattcaatttctgatccaaaccacaaccaaaaacgattctgataacagttgcataagcttggacactaggcaaaaaagtcacatttctttccattcgtttcagaaacgataaagcaagataaggatcatctttcaaactagctaaaactcgaagaagctcaatttctttaaattccaaatgctttacaatcaaagttaccttctttcacttgctccgagtatgagattatcgggttcgcccgggaaagtgcaggaaccacgtacaatcgcgacgagggtgctcttcgaatcaatcctctcacatgcgagagtaatgaaatcgggataacccgcatgagatattttccgatcttgtggctgccgggaaaaaaaccctagcagaggctaattccgacgacgattagcatcagagattttctcacttatcggagggtttttacaccgacaccgaaccgactccaaccaaatataaaaataaatttgaaccaaaaccggttaacgcggtcgtactctaattgtgtgtaccaacttttttagcttaaaagcgcattagtgtctttaataatatttaaaacattaatcaaatgtgttggttctttaaattggagatacttcttaaaaatgtctctatcaaacatttatgacgtggtgtctttattttgtagacattcaaaaattaaaataataatttcttttttatatattatattttaagtttggaaagacattctctttatatgtgcagtgaaatactcttttgtttcctttgaattcgccataaattaaaaaagaactattataaaatggtttaaaatttgataatgatagttggtacttggtaacaacaagtttgggtttggtaaaaaaaccaaaaaaaaaagtttgggattggtcaaaataaattcaacattgcttcttaatgagataagaagatgaaggtcgtgataacagtcgtcacttgtttatttcttttgtcagtgatgcaactctcattcttcaatattttcaattaccagcttctggatgctacaaccaacggtaaaatctttaatctttaggtcttgctgttgttactcaagttttctcctttgactcaatatttcatttttcttaggttcaaaggattccaggaaatcaaaggataaactgttaggagggcttttaacagctgattttgatgaagattcttgcttgagtaggtatgagtcttccttgtatcgcaagccttcaccatacaaaccatccagatatctcgtctctaagcttagaagctatgagatgcttcacaagcgttgcggtccaggcacagaagcttacaagaaagcaacggagattcttggtcatgatgatgagaatcattcaaccaaatctgttggtgaatgcagatacattgtgtggattgctgtttatgggctaggaaacagaatacttactcttgcttctctgtttctctatgctctcttgactgacagaatcatgcttgttgaccaacgtacggacataagtgacctcttctgtgagccttttccaggtacttcctggctactccctctggattttccactaacagatcaattagatagcttcaacaaggaatctccgcgctgttacggaacaatgttgaagaatcatgccattaactcaactacaacagaaagcatcatcccctcgtacctctgtctttatcttattcacgattacgacgattatgataagatgttcttctgtgaaagtgaccaaattctcatcaggcaagtcccttggttggtcttcaactcgaatctttactttatcccatctctatggttgatcccttcttttcagtcagaattaagcaagctattcccacagaaagaaaccgtctttcaccatttggctcgctatctttttcacccgactaaccaagtttggggcatgatcacaagatcctataatggttatttatcaagagctgatgagagacttgggattcaagtacgagtttttagcaagccggctggatatttccaacatgtcatggaccagatcttagcctgtacacaaagagagaaactattacctgaagtgtttgtcttagaaacacaagtcactaacacatcaagaagctcgaaacttaaagctgttcttgtcacttctctttacccagagtactcggagattctaaggcaaatgtattggaaaggcccgagttcaacaggagagataatacaaatttaccaaccaagtcaagaaatatatcagcaaacagacaataagcttcatgaccaaaaggcactcgctgagatatatctcttaagtttaacggattacattgtcacgagcgactcgtctacgttcggatacgttgctcaaggtcttggaggattaaagccatggatactctacaagccaaagaaccacacagctcctgagccaccatgtgttcgtgccgtgtcaatggagccatgtttccttagagctccactctatggttgtcaagctaagaaagtgaacatcaccccttttgttatgtattgtgaggatcggatcacgggtcttaagctagttgattcaaattagaaatcaaatttttttattactttgtgttgtttgatctgaaatccactagcttttatttttgtgtgtgtacttggatcactaaattcaaagttttatttattaatttaatgatttctatatagtagtttaaatttaaataattataacatgcctttcttcaagatttttttccttcactttggcgaagaatgataactccaactactacaaagaaaaaaccttactacaaattaagtgatattgaaatcactaaaaacacttctcaaacaatatatgggagtcatttcatatggtttatagaaattatatttagttataaattttagtgaatacaaatttacatattatattccacaaaagtaaatataatttttagtaattaaaagtgtattaaattttggaaacatattattgaatcataaatagtgatatatatacagtattctcttccataaaatcattttagtattactaaaagttgtttcaaaataaaaaaaattaacatagtaattattaaacattggcatgcaaataaactgattattaaattagatctcttaacatgtctttttagtactacaagttagtacctaagatttcaaatgattcatgcaaacctataagatatctttcacctcgtgatgaccataacatgaaaccataaatctatgcaacaaagtagaaaacaggaagaaaacatatctccaatatgataaagctcacgatagcaatcgccacttgcttagtactttgcttggtgctactactaccatcctccaacatatcctaccgccacaagtatgatcttccaaccaacggtaacaagatccttcaatttttggggttaatttatttcaaataaagagaaatgctcactttctttcatgttgaaaaggtttaaatgattctgaacaacaaagtgagaaactgctaggagggcttcttgctacagggtttgaagagaaatcttgcttaagtaggtatgatcagtctatgagcaagccttcaccatacaaaccatctagacatattgtttctaagcttagaagctacgagatgcttcacaagcgttgcgggcctggcacaaaagcttacaagagagctacaaagcagcttggtcacaatgaattaagcagctctggtgatgaatgtcggtatgtagtgtggatgcctatgtttggtctaggaaacagaatgctttctctggtttctgtcttcctctatgctctcttgacagatagagtcatgcttgttgaccaacggaacgatataactgacctcttctgcgagcctttccccgaaacttcctggttacttcctctagattttccattgaatgatcagttagatagcttcaacagggaacactcgcgatgttacggaacaatgttgaagaatcatggcattaactcaacttcaataataccgtcacatctttatcttgatattttccatgattccagggatcatgacaaaaagttcttctgtgaagaagatcaagctttccttgataaagtcacttggctcgtcgtgaaatccaacctttactttgttccatctctatggatgatccctagtttccaaaccaaactcatcaaactattcccacagaaagaaaccgtctttcaccatttggctcgctatctttttcacccgacaaaccaagtttggggtatggtcactagatcatacaatgcctacttatcaagagcagacgagagacttgggattcaagtacgagtttttagcaagccagttggatattttcaacatgtaatggaccagatcttagcctgtacacaaagagagaaacttttgcctgaactggccacaccataatcacaagtcactaattcatcaagaagcccgaaacttaaagctgtcttggtcacatctctgcatccagagtactctgatcacctaaagaacatgtttttggaacaagcaagttcgacaggagaaacaatagaagtttatcagccaagtggagaaaagattcaacaaacagacaagaagcttcacgaccaaaaggcactcgccgagatctatctccttagcctaaccgatgaacttgtgacaagcacaaggtctacatttggatatgtagctcaaggtcttggagggttaaagccatggatactctacgagccaagggacaagaaaactccaaacccaccatgtgttagggccatgtcgatggagccttgttttcttagagctccgctccatggttgtcaagctaagacaatcaaaatccctccttttgttaggatttgtgaagattggaaaacagggctgaagctagttgatgtttcagatgaactttgattgttgtaagaattcatcttcttttatgtttttgaataaataaataaaaaccttcttctatgttcatcattgttcctagccctacaattcctaatcaagaactggaactgatcatcaaattgtttattacctttagaaatctatctgatctcggtgaatactatctatcgtcgctgcttacaacacccaccgtcttttgattccaaaatcggtgagtcagatcgcgagtcgagttaggataaactcgctagggtttgtcgtcgtcaactaaaaacatgagcacgtgattagcaaataagcccctgaactattaattatcttttataatttctacaaaagtatgttaatttaaaattgaacctgattctcgatgggttaagtaaagtgatgggttaatatgttacattctgaagtttaattacttatctaattaacctgaaataataaaataagatttggtacaaaatccaaacaaatattacagcacaagtgatgacattttttttctttttctgagaaggctgataagctagggaatattattggttcgtatatattatcggagcctaaatctatttttgggtcgtttaagtctttgatgtttatataaacttgagagatttgccggcatgcagattcatgctcagtttaatctttcttaatcatctgtcgcttataggcttgtatagtcgtggatgttcagcatccacagattaatctggagctttaagatctctatccactggtcctaataggaatgagaagattgaaattctcacttttgcgtctatgcatttatttcactctatacgcttcacattgcacaattcccgttgctccatatctattttaacctttgtccaatgttataaagaatagcctcctccgagagaatggcgtaacaaatgacgtaaaccaaagacattctctctctcatcattgatcaaattaattaagtagttaattcgacaaagacgtttcaacaagcaggaaaaaacaaatagtatgtgaaaacttaaagggtgaatcacgtgggattacgagagaaagagtcacgtttatatcgagacagctaaaacacccaacacctacgaaagacttttttgcatggttggttcaatcttctttcttgctagatacgagagtatttaatatcaattaataaaatattatttaaatgtctaaaattgataaaacgctcgtctggttggtgagatattggaatgtgctaaaacatttttcacgggattcgagtctcattcgaaaaataaataacatcattttccaaattaagaaaacctatgctttcttgttattgaagaaagtgataagttctgacatgtatctcttgcgtatgacggattaagttctggccagacattcaaggtcctggcagattaatgcagtctcaactaccgcacagctctagcttgacacaccatgtgttaggaccatgttgatggagccttgtttccattctcctatgtcttatcttattatatataagcccttgaattattgattacatttaattatattcatatatataatacattgtcttatcattgtaactcgtatgcatgtatattcgagcgggatgactggaatagaaagcgtgcgtgatactataagcacaacgaaatttattacattattcagggtaacaaaaaataaaaatatgagaattaaaatatttgaagacagatatatgttggtacatttaatagtccgcttaatctatctttgggacgtcacttaactcatttatggttatgaacttgagagattcgccagcatgaagatgcttgctaagtctaatctttcttagtcctccgtcactgataggcttgtatagtcgcggatgttcagcatccacaaattcatctggagcttcaagatctctatccactggtcctaataggaacgaagcaatagtaatcctcatttttgcctctatgcattgcactctatgcttcacattgcataaccttccattgctccatatctatcataaagtttcaaaaaccaaaaaaaataaagtttaattttcatgttcaacatatttttggaactatatactaactacgggtgatatcatcccaccgtagccatgtcaccaaggttgacaagaagcgtgttcggcaatgtgtgtatggggaaaaaggatcctgaagagttgtccatggcttcaagtccaccaacatcctcatcaccttgaagaattgtcaagaaaccaggatccgtgtgtaatatcacaccgagttttccaacagaatccggtttaaaatgatatttgttcatccgaaattggcttggccatcctctcaaaaaattgggctctaccactccgtagctctccgctaatctccttgctagactcctcgcaagatcatcagtagcttttgcatactttagcaaaatctccctgcaagccaacaaccaaaaaaaaaaaagacagcatatattaatgtttcaaacatttttgatggatccaaaactgttattgggaccaatataattgtacaaaaaatgataacgacgtcatcaaaaacattataaaaaagataaattaacctttgatctggcgaggcgtcgagtttatcacaaaaactattgacagcttgaggagatgccatgtcaaaaagaccaaatgattcataaaaaggattgaactcacttagaggcttgtaaccattccctagtaacacatcggtgtttcgcagtttcatctcatatggacgttcatggagatctctaacagtcttcttcatctcagccatcaaagacaaagaaactccatggtttatcaccgtgaaacatccccatctctcactcgcttcacggattttctcattcagaatctgatcattaacctcttccaagtctattgttggaatgactccatttacttccgccattatcttcaatgaaaaggcttttctctagtcaagcaatttggacagctaaaaacagtcatcagagaaaaaagaattacatataagtcgaagaaaccctagcaatgatgagttttcagaaatggtttattttctttatatgatctactcaaagagttttcagaaatcagaaataaagagtaccttaatttcgtcgggatccttattaattatctctagatttctcgagaaaaacgaaggagtaaatgtattgtaagatgacttatcgaaggcgagattattatataaagaagtcgaagtattttcgaccatgcacagaagtctgccgtagtaattaataaaatactctccacgctttccacgtgaatgtgacactacgggcataatgtggttcctttgtgttaacatcatatagatacatcatacatgcaaatacgaatttgcatagggatgcaactattagagtcaaccggtaaaacaaaaatgaaagatattggttcctttgtttttgaaagatataagaagacaacgcaacgccacctcttagcggtttgagatacatgtggcgtcatgggccggatctagagccaccaaggaaggtgcatctgcctcctatgcattttagatatccaactactcttaaagctgcacgccgatggttcttgcataatttgtgccaacacatacacacaatatgcaaaaattagttcttgttactggccaagtagatcaatctaccaatggtttggagataaggctcaggatcaagtacaagtggcgatttgggaccaaaccaggctgtttacttccggactccatctttaattaactatatagtaattttctttttcttgagagaatgtaaaattttattcgatcaaaaaatatggtacattataagcaacctttagtagaatattttgaaacttggaagcaaagaaaaacagagctttagaactataaaaacagaattaactccatagtaactaaatatgattttgataaaaaaaaatttctctagaagtaccaccaacaaacagaggatcaatagtagtagtattgcatccacaaagatctcaaggtaaaaaagatcatatattgcaacaatccaataggtaatacattttaatacatctttatttctcattcttaggtaagaaattgctgttttctggctccatagcgctaccatcttaaaatgccatttaggtcatttatctagtcctgcatgggttataagcttgagagcttctccatcatgcaattttttagtcattctaatatttcgtaccccttcgtgactaataggcttgtatagtcgcggatgttctgcatccacaaactcacttggaggttccaaatctgtatccattggtcctaataagaacgaggcgatggaatacctcattgttgcttctttgcattgcactctatgcttcacattgcacaatcttccgttgctccatatcgtagccatgtccccgaggttgatagcaagcgtgtttggcaacgggtctatggggaaaaaggttcctgaagaattgtccatagcttcaagtccaccaacattttcatcatcttgaagaatcgtcaagaaccctgaatccgtgtgtagttgcacaccgagtttcccgactgtttcgggtttaaaatgatatttgttaatccgaaactggctcggccattctttgaaaaagtcggtctcaaccagcccgtaactctctgctaatttcctcgctaaatccgttgcaagtccattgatagccttcgcatacttcaccataatctccctgcaaccctcaaactccatcaagacataaaatcaatgttccatcattttagaccaaagaaaaagaagttaacctttgatctgcagaagcttcgagttggtcacaaaaggtattgacagcatgaggagaagccatgtcatagagacctaatgcttcatagtaaggattgatttcgtttggagctctgtaaccactccctaggagcacatcggtgttacgcactttcacctcgtatggacgttgaaagagatcaataacagtcttcttcatctcagccatcaaagacaatgaaactccatggtttatcaccctgaaacatccccatctctcactggcttcacggattttctgattcagaatcttatcagaaacctcttccaagtctatagtcggaatgatgactccgtttagttcccccatatcttcaatggagaggttaacaaagaaacctaaggccaatattatagagaaagaaacatcaatagagagagtgacgtaatcaatgagatcagtgtagaaaattactttgaagaaagacaattctctctgatcaaatcagtaaagtggtctgaattggacaatgacgttcaacgaatcagaagaaaaagtttaaaactttaatagcttaaattggctaatgatctataaagtgacgattcaaccagctaaaacagtctaaatcgaagaaaacccggtaactaattaggctgaattaacaagataattcatcagtacttcttctggataaacttcaattacgtttaaattgaagaaaccccagtaatagttaagctaaataaacaaaagatgatttgtcacgtttgcttattctgggtaaacatcaaagagttttcagaaataaagagtaccttaattccgtggggaatcttgcctctagatttttatcgagaaatcagaggagttgattcagtgtagagttacttattgaaggaaagaaggaaaaacgaaatcagaaaattggatacagttttttttttttttttcgcgttcacagaagtctactttattatagaggagaagaagaagaaaaatgacgtcaatatgtttgggcaacgatttccacgcgccaaatttcgatttaatacatggacaaatgacacacaaaattttctaacttaaatatacatacgatatacataaatgataaatctaatattattccattatcatataatattttgtatgtgccaaacatcacgactttttttaattgcaattttgaaattcacatattacatttctatggaatattttattaatctcttactttttaaaatatttttttgcttaggatgtccaatctaatttaatcaacaaaaaaaaaatgataaatctatgggcctacacttttgggcccaaatttatataactcttctcgcgttaatcagaaactgatgctacttctcaaggttcttacaaaatgtgtaacaactaacaagtaagaactaaagaacacaaatctcaaatttgcttttccagtttctcaggtctagaaggaagagattcctgccagcagtctaaacttctcataggagacccaaaacacgaactgccacggtccaagccttgcccatgtcgggaagaaacctttccacaaagctcttattccttcaaacttaaccgtcttcaccaaacagtcgtaagaatttctgtacacagcattttcaccctggttcatcatcctcgtcttcaccacatcagctggacaactcaaacttgtcgaagcaagacccgacattatagaagcaagagtgtgcgcaaaaatgttatcctcagcaatcttcttatcgatgacaaagtgtttggcgtgatcatagcaagctagttctcccatattcactagaaatgctctctggatgtttggaagaacacctttccataacccttttactccttctgattgtaggattttggtaaaagcctcgattggtcccgagtacctcggtttcaggccttggctcaccaatctaccatctgcttgcattctcactttgaccaaatcagctggactagccactacctgcatttctagtatggacacaataagaagcattttagtgtggtgtaggtataaacaacactcaaatgtcaattctaaagatatcaacaacctaaaagatagctacatttctcacttcagtagcgtaaaaacaattgaaaatccttaataattaacttcgccggaaatctacgagtttccataggtaatcagtgatctgagagaacttaattgtaacacataggagacaacaagcaagcacaaattttggattaaggatctgtgaaatacattgagacgtctatgactaggatctgcattggttcttatctctgaaccaacctaaagtagcagctaactttggaatgaaacgaacattgaaagcctataaaacttgaaacaaaatctccttctaattaataccttcttctacgaaacatattcaaaggaaactatacatagagatcgattgttcaattcgaaatgttaattctactctaagcaactgttaatccagatccaatttacagtcaaaacatgactctaaagatttaccggtgaagaaacaccgttacctgagctataacaccagaaaatcctccgacgagagcctttgtggcgagaggaagagactcgctattgttagtttcagatctgacgatgagtcctttcaaattctcgtatccaatgattctgataggcgtgtagaacaggtgtctgataatcgccggagatagacctttgtagagaccaatcactccttcctttctcgcaatctccgatacgactccgaaagcgccaatccgatgcgcaccagaagcggatcccgaaccatggagctgcattctagtctttgtgagatcaatcggaaacgtaactgactctgcaaccatcgcagagagtgaagcaagcaggatcctggttccggtcggtgcttctctggtcactcggctccgctccattttcaccggatttgattaccactaacacaatgtccatcacagagaacacaacttgattctatttcgtagtcaacgacatcgtttcggtcatcagagtgtatttgacgacgtcgtttccataatattgggctttaaagtcttatgggcccatgttcacaaattctaaaatacaaaactttagagataacagccgacgtggcaaaacatgaaagaccgagtagacattatagttttgagctcctcccatttcatatccttaagaaaaacaaaaacaaaaatcaaatgagctccttcaccaccaccaacactccgccaccgtatctcctccggaaaatttatcatcgccgtgtaaaccaaccgttctccgtcgtatgttgcaccggagaaccccaacaagacatcttcacccgccggagaaccttgacttcactaataacattcacggtcatcggcggtgctacgtcatcagcattagcacaggagaaatgggggacaaggtcattcataaaggagaaatattttatgccgggactatcacctgaggatgcggcggcgcgtataaaacagacggctgaaggattaagagacatgagggagatgttggaccacatgtcgtggaggtacgttatattctacataagattgaaacaggcttatctgtctcaggatctcaccaacgccatgaacatcttgccggagagtcgccggaatgattacgttcaggcggcaaacgagcttgtcgaaaacatgagtgaggtatacgttatataattaatgaacaaattaaaaacagaattagtaatttttaatgctaatttaaggtttgattgttaataacactgaatgttgcgttttgtaacacatgatcatatggaagtcaaactttaaccacatgttaatattgatatctttcataattttgatataacagttggatttctatgtacggacgccaaaggtgtacgagtcctatctttactacgagaagacattgaaatcgatagacaatgttgtggagtttcttgcttaattcagttgtattgtatatatgtctttcttcattcttcacatgaaatctctggactcgttacattagatataaaattaaaagacttaataatgtatattcaagaaacatttcgtttgcgtgatttctctgcaaaatcagatcgatatatatatgtgcatagatatcttagtggcgagagagggagatagcggaattgataacaataagcatgagtaagatcactgcgcagaaagaaccgatgagagatcccgagatgcgttcacagaatccgtcaaattgctggcagatcggtggccaattagcagttgtgttcccctcgtgagctaaatacacggtggctgttgctgcagatgctccagagctaaccaaagccagcatcacctgattatatatagaaaccataaatcataacacttttgagtgatcaaatttaaatttatatatgggttttcattaaaatgttagctttcttgggtcacaagttagttggatatttggtgccctgttttgttctcttaaagagggagatatttaccgtgtcgacaacgagcaagatgattctcgaggttttagcttgagtactgaagatatgaaagatactcacaggtagagaaagaaccaaatatccaccagaaatggcgtttgcaaccacgaaaaacctataaaacagagcagtattattatatatacacaatcaaattcatgattcatcgatatactgatcactgaatattttacatgagcgttggtaagtcgctgtatttaactttcagaagtacgagctgactcaaagagacaacagattcatgtgttgttcccatggcaagcgcgcttcctatagttccaaaaacagcaaataaccgcagaacgaatccaagaaccgatattcctttgtttataaccaactttggctcaaaagtaatcaatttcctagatgatcttgaagtttccccagcttcaatctgttttgcttccctagcttcaatcccttgtgcttcctcagcttcattatgctttgcttcttccatttttgctctgtgactgtttactaaacaaaaagggtctgcagtttatataaatctccacagtgaaacacttcaagaagtggttaagactttgaagtagctgattataatgaagaatacaagataaaaaaaatgttaaagcataattaattgtggaattcacatataaagacagagaatttaggtttattgctgaggacatataatgagcaaagatttatttgttatcttgtgtttttgcttatcctctctgtacctgctctatattgttacatcaaacaacaaccaataagaattctcattttggcattgtattcatgtccgtagctaaataataatctaagctataaactttgaagtgtttactaaatttgactgtgattttttttagaatgatgaatatattttattcgtagagaaagagagaagaaattcaaaagattaaagctacccagattgaattcagtgctttaaggcacgacgacaacttatgatgttttgtctttcataggcgtttttgttcaagaggttctttttgaattgtcccacatcgatagtttagaagagctttagtcatagctttgggtataaaatagaagctgagccgtacgaacaattcatacctttctcggccttttggctaagatcaagtgtagtatctgttcttatcagtttaatatctgatatgtgggccatcggcccacacgatattaactctattttttgagggagatagctcactaagatagcttgctatctgggctttcgcgagtcgcccatgcgttgcactattgcacgggcttggctcaacccgccaattttagagtcccaatttttaagaatcgattcttcttattgcaccgtcaaggcccaaggaataccgatttggtgagattctagcttgcaaacgtaacttcatcccacatcgacgattatgaggatatctagtgtatttatatatacatctgaactttggtaagttcaactcgtcactgtacgaagtgattggactataaacttgtcaaagttcaggcccagataagtccgcgggtcacttttccgtagagatgcggaacctcggcaacgagagaatctttacgtcggatagacatatggctgagacacgtgtgtggagccttctctcggacgaatgatataatatggctgagacacgtgtttggagccttctctccgacgaatgataatatggccgttcgttacaaaacagttattcacttgggtctttcttctgaccaaactgaacggggcttacgttccagtgtcaacatctctttttttgagatttgatgtacaactaagaaactgatggaaagcgtaagcgtgagatttttcatatgaatgactaagacttctgtaatcttgtttgtgtcctcttcttctcacctactctatagtgtacatccactaacttgaactaaaagtataattcttgcaagaacaaagtaaagtggaaaagatccagagtatctagacattaatctcaaaaacaataaaaacgtagagagtattgaattggtattttttatgtaatgcaatagaataatgaaatgttggttactagaaatagaaattttaaaaaatacttgcgaaaattcaaagagtataccaacgtaaaagaaaaaaagaacaaagatgaaaacacaccatctcttgtttacatttcttatgtgaattgcatagacaacttttttttcctacaagtaacataatattgtataaaaattgcatcaacattgaagttctgaacactctcaatcttcctctctaagattggttttcttgatttaagaaacatggtttcttctcttagaattcgaattctgcaaaagcatataaattacttaagtgaatatctttgattgattgatgcatattacatttgatattttttaaaaaaatcttgtggaccagtacataccagtttactgtggtcatcgcgttttgcgtatttggatttgctcgaactttcagtcacttgagggatatatggaaaagatgttggtagcaagacaagtccatgatccatgtcgaaagagttagctcttaatcgcaagattacttgcgtgagagctttcatagcggcatcaggacttcctgtaatctaaccacagcaatataacaggaaacattggcttagtttcactttcacaaaggaaacaaaaccaagtccaaacacaatccgaatgtgtttattacctgaaccatctcttcatcttcacgagcaatttttggtacatcttctttttgaagaatacgaatattagctcttgttacactcctcatctcagatataactgctccaccttttccaatgagacacccgatttgggaactcgatacaagtaaacgcgtagagattgctaaatcatttgcatctttaccaactttctcactgcatcgctgttgtaagcgtattgctgcattcaccgctggagattgatcttcgtagaactacatacaacaaaaaaggtcggtttaaatatgaaataatctttgtatgatttataaaagaaaaagatttgcattacctcttttgatgatatgaaaatgatgcaatcatcatcatcagtttctgaggtattgactctaatagtagcaccagtttcttgcctgatctgattaatgaaaccaccgccttttccaatcacacctccaacgttttcagctggacagatgaagcaaacacaaaattctcttgcatctgctatatctctacgcacagcgtagtttctgtgagagctcgtcagtgctgcagacattaacattgcaccaggttgatgcatggaagaacttgaagaagacaggagtaagtgttgaaatcttgaaggattatcatgaagcagtgaagcaacttgataaagagcttctctaacaaccaaaggctctccaattatctgaaaattaacaaacacagaatcattagctaaattcataattcaaatcttttttctctaatcattgtgagtgtatctcaccagaagaagctcatcatgactcaaagtcaaagcacaagcaggaagatgatctttgataacacgaatctgagcattggtgtcgttacgaagattctggattacttgacctcctttcccaataacgcaaccaatttggtcagacggtacaagcatcctcacggttaccgtttgcttttcaccaagatcattatcatcatcagtaccatcatcttgatcagcgtccgctacaaccatgtcatgaaccttgaaaagagcatccaaagcaggacaaacaagctcaccatcatctccaaaatgattcaactcctcattagtggaatacatggtaacaacacgctcctcacaaccaggtaaagcctcgtttatcctcatgtttgatttagtctcagaccttatctgcttagcaatctcgccgcctttcccgataatgctcccggtctttttcacgggacacaagtagcggtatacagtgtcttctgaagcaataacattttgatctgtttcatcatgaagatttcttctcttacttcctccatttccagtaaactcagattgcaaattagatctcttaccatgaatgttcctcagagtactagccattttaacaagagatcacaatgcctcaggaagctggagaaaatatgaaaaataatttagagcttagtttgttcatatgatcctttatatataatcaacaaacactaaagaaacacacaaaacagagtccttgagaattctaaagatcagatcttggcactacattagttaaaatcaaagagccaaattttcagacataaacacctttgacttgtttggtcaactatgctaaatcaagaaacaagattattcaagaaacagggattaggtcaaatctctcccctcaattctagctctttatgcaaaattgagacaagaaaactacacaaacacaaccgatcaagatccatgagacatcaccgacttattaaggaaacattttacatgacttgttgaatctacaacatttcattgaattagagcttgggaacatgcaatgcttacagataggagctttcactggtcgatctgtctgttttgccggaaaatgtgaccgcttcttcggctgctgctagcttcaatggttttattttggcttcttgggtttgaaagcagagaaatacaaagtttttggggctaacgtctatatattaaatataaatatctgattacaggtggctttttctcttttaactgttcttcgggacgtgacggcacgtaaactactacttaaaaatatatatttaaatacatatatatgtacctgaaattaaaatattttatgacggaataattatagttttcttagaaaaacataataatttcgttttatttgttcttcaaaagttagcgtttatactgattagatcgtagttttggtgaattacataaatgtattttaaccaactttttaaaattatcaccaactacattgaaaatcaatgttcaaccatcattatagtttggtgaactaatattttaatgtgctaacgacattataaaaaaaaacagcagacgatttttcttttatttaagcatttttagtgtcttttatataacaggcttttggtcaaatagaataacactaacttgatgaaatatttgataaaaggaataaaactaaattattatgactttgttatattccacttgtgtccggtggctttggatgattgtgtagctgtgaattagaattacacaactactctgaattagtcttcgttagtggagttttctgcatgtgagctagatttgaatacaatcatatcgaaaatataaagaatgatcaaaagtagtttctttttccaaatagtgatcagaaactagaattaaaattatctgtaatccatatcaatatgcgtagaaatttgatagtcaacgtcgtaatatctctcaaaagagttggagtcgatatcatacttttgaaggcttgaagcagcccatgccatgtatcgacacggaatttcagatagataatttaccggtttattccggtttacagactcaattatggttaacacttaacaatatactctaataaagcttttacccctaattcacctgtagttttttcagttaaagctaatgaaacgactaacgagtgcccaactcttctaaatatgtgatccttcattattccgactagatatatcagttgattgctcattcattattaagtgcatggcacttgataccaaaaatgatattcatggtttagtgtaggattcaaaatttgcatatttgaacatagtgttgtattaattttctttgactcaaaattcaacgaattcatttttcatccaaaattaaatgcattccaactttttaattttgtcaacaaatacattcaagtattcaacttacattaattactgctttgcttataaagagttacctttttgggacctttaaatttaacttcataataaaattaaaaaaatatatatacataaaaaacacaaaagataaagtaaagttagatagacacagtacaagtaaagaagaagcagatttctcccctttccaagaaattagggtttttggcttcgatcgaatttgcggcaagtaggttcaatttcttccgacaacagtcatcttcttcctcatttgtctctccgagtttcgaagcagtaagctctttactttactcatttttgttgtcactggaaatttcataatgcattgcaacgaaaatctctggtacagaatttcgacaatgtgggttgttctttttccttgataatcttcttcgtgaagaaaaaaagtattttggaaactaaagttcagatctttgcttgtcgtttgatgagtgagagattgctgggtaggtagattaattctatgagtttccagatttgattttgtgaattggttctgtgtggtgtttatctagtaagctttttgtacaatgtgtaatgtttgtttgatgattgaaagtttgaaactttggtgctattttgattactcaggtgagctaagctaaagaacaaggaacaaaaccaaattatgtgtttgcgagatctgtctcatagtttatggagttggagaggtgtttaagcttggtattgagaagctatactgttgtcagcttgaggtgtttttagcgaaagggtctatcgagtgaatagaagttaaagtatgggttcgctctgttgtgtagctgcgaagtcagatagatcaaattctacaagtggggacttttcatttggcctgcatgagccttattggagactaatacaagtttctctcctccttcatcgagatgggacgtccatggattaatggatggtattagctgttatggatcttccacatcatcaaatgctaatgttcttcgtagtcccgacctttctcaagctcttcattggacacctaacgattttgaatctgctacaagaagaggtttgttgcactcaaattcacattctcctctttatgatatttacatctacggaacttgaacagtgtatctttttgttttttcatttctctatgcagatcagattgttaagcaactaccaggtacatcaagaaatgtcggtattggtgactctgaacctggtcgtaactcctcaagccggcgctttttcttgtctaagccggttcatcctatactgcatccttctgataatgttagggatacagcatctgattctgcggatgcctgcagttggagcagcgggaccccaagcagcattgattctgtggatgttcctgagccagttcttgattggaataataactctaccaaagcacaacaagtagcagcttcaagtacatttaaatgcggactgtgtaacagatacctctcgcagaaatctccgtggggatctcggtccattgtaagaaaccgagacatgccgtcacaggagtgctttcatgtcaacatgtctttcacgtggaatgtcttgaccaatcaactccaaagattcaacgcaatgacccactgtgtccaatatgcaccaaacaggaaggagaacacttcaaatcaaacaacattgtcccgaggcttaaaccgctttatgaagatgggccatcttcaagaccatggggctgtgctcaggccggtgactgtgttgaaagtgctgtcaatgtgccccctaaaaacaccatgatgatgataaaccggaaccggataaggaaaagcctctcattgagaggaaactcaagcaaagatttttcaagaaaaatgaagagaagtaactcagttgccatggaaaatctggctaatcaagtctcgcttgttcattctagagggaaagagaaagtttcatggtagctggaggaaaaaagcagagtgatcaaaacgtcgatttttctggcctagttaaacatttaaccttttgacaagtattgatcttggaagaccagtgaagtactgtagagtattcattttggaacatctgtaagcaaatttgtttagagctttgatgttgttattcatcctgtaatcatctctgttggagaccatcttgaccggtttattatccaatctagaaggttttttggttcggataattctctgattttgtggtctcatagaagaacttcaagttagattgaacaattgagcaaacaaaaatcaagatctacatacaaaagttgaagtactagtcatggttttatagcttatgccataatcgaaactaatctaatcagaaaacacattatactgactttcttacaacaccaaatactctcttgattattttctagatcattattaaagacttagagttaaagaggttttggtttcttagcaattgtttcgacatctgcatatgcgtttgggacgacccaagatgacaacagggttatcaaaacattcacaacgtaagtttttcttgttttctcctggactgccttttttattcatcgcttctacgcacattttcttccgttattgccacatttgccagggaattctcctgtgaattcacatactcctgcttgctccacatggatactttccacctctattgttttatgacaatgacaagaaagttttaaattaattgtagagaaacaattttagataaattgataaatgcaacaagagttaaaataccattgatattgttcataacgaagaacatgagaacacaagaaaccataaacaaagtagcccatttcatgatttagaagaaagaggtttttgttacttgcataaacttattgtttgatttgctctcgtgataagtattttgttcgatctctaacaacacttggaaattaaatatattcaagataggataagaatagctattcttattacattatggggaagaataaaagaaaaagaaaaaagagaggtggagccaagtcaactagatcgacaagatagtgatttgattttagaaaaattcaaataattatccaacaaagagagcatgaatcatgatctccaaccatatatgcgttcattattgtaacaatttttttttggaattatttattcattgaccaccttctcagaccatgcgttccacgacacaaaatactcacttagacccacaacctcttccatcaaaccaaacaatcccttttcctcagacaaaactttgtctctgaatctgaaaatcaagattagacatgtctcattttgtgtttctctttattatttccatgttcattaatctgtcacaaggtattaataatgtagactatctccttgtttgaaaatactatagtttatatgcagtgaaggttttcattaactgttgtttgacgttttcaggagcgcaaatgccttacatgactactgatccgaaagaagtttccggcaagtcattcgattacatcgttgttggaggcggaactgcggggtgttccttagctgctactctgtctgagaaatactctgttctggtcattgaacgcggtggctcgccttttggagatccattagtagaagataaaaagtactatggatactcattgataaatacagatgaatactcatccgttgcgcaaagttttacctccgtagatggaatcaaaaaccacagaggacgtgttcttggaggatcgagcgctatcaatggcggattttacagccgagctagcgatgagtttgtgaagaaagctggttgggacaaggatctggttcaagaatcttataaatgggttgagtctaaggttgtcttcatgccggagttgactcgatggcaatccattgtgcagttcggatttcttgaagcagggttttatccgtataacggatatagtttggagcacacgcaagggacaaagatcggtggaagcatatttgatcagtgtgggaaaagacatacatctgcagatcttttgggatatggtaaaccaaattgcatcactgttcttctaaacgcaacggtaaagagcataatctttgatgctaacaagactcgcgcagttggagttaggtttatggagagtgatgggaactcaagtaagagctacaaagttcatgttgagcagcatagaggcgaggttatacttgcggctggggctttaggtagtccgcagattctcctcttaagcggtattggacccgagaatcatctcaatgatttcgacattcctgtgattgtcaatctcaaagaagtcggaaaacaaatgtcagataatccagcgatctctcttctcgttgatagattctcgcaaaacctcacagtcgatccacctcaagttgtagcgataacagaaggttttaaattcatactccaatccctggttcttccaactaacattaccacaacaagaaccgctatatcagccaaaatcgcattccctaaatccaaaggaagactcaagcttaacaacactaaccctagggagaatccgtcagtgacgttcaactacttggaaaacaaggcagaccttgacgcatgccaagagatggttttgcatcttcaacacgtggctaggtcaaagactgtgacgtttttcttggggacacaagctcaggataagctagtggcaggtgacgaagagcttaagaagttctgcataaagaatgtgagaacttattatcattaccatgggggttgcgttgtgggatctgtcgtgaatgaggaatataaagtgaatggtgtgaagcgtttaagagtcgttgatggttcaacgtttgaagaatcaccaggaacaaaccctatggcaacagtattaatgctgggaagatatcaaggaatcaagatactcaaagaacattaggaaaggttgtttagcccttaaaatattttgaaccaaaacgatgtaaatgcaaaaatgttcatgaaaaagattttaaaccaaaacgatgtaaaaatgttcattatagtttaaatccaaatgagaactgaaatccaaatgctcgtatcttgtaatatagcttttgtttcaaggattagatgtttggttttaaatcttctccatcgaccattggtattaatgtctcttgaatgtgtatatttcgttttgatacagtccactacacattgctctagatttttcagacaatggtggtcgtctcttttcgtactctcttatcattatgaatttcaggttgttagttttggatcttttggttaaggttaatttttttttttaaccattatcaaaaaaggttaattgtccatttttctaactaattttgttgcctcgtcgtccactcagatttttagttggaacaagaaaaggtaaaaatcataattatccagggccatgacttaaaggcatgaatatatgattatgcaaggaaaatttcataattatccaacaaagagagcatcattgtctctaaccatgcgttccttattgtaacaaactttttcaatattatttatttgttgactaccttctcagatcattatgtctacactctcattgctttaagagacacaaaatcatcacctagactcacaacctcttccattaaaccaaacaatcccttttaatcagacaaaactctgtctctcaatctcaaaatcaagattgacatgtctcgttttgtgcttctctttatcatttccacattcattaatctgtcacaaggtattaatgtagagtatcttcttgtttgaaacaaatatattatatatgtgcaataaggtttttcattagatgttgtttgatgttttcaggagcgcaaatgccttacatgaccacagatgctaaagaagtttccggcaagtcattcgattacatcgttgtaggtggcggaactgcgggatgctccttagccgcaactctatctgagaaatactctgttcttgtcattgaacgtggtggctcaccttttggtgatcctttagtagaggaaagaaagtactttggatactcattgctaaatacagatgaatactcatctgttgcgcaaagttttacctctgtagatggaatcgaaaactacagaggacgcgttcttggaggatcgagcgctataaatggcggattttacagccgagcaagcgatgagtttgtgaagaaagctggatgggacaagggtctggttcaagaatcttataaatgggttgagtctaaggttgttttcatgccagaactgactcaatggcaatctgttgtgcaattcgggtttcttgaagccgggttttatccatataacggatatagtttggagcacacgcaagggacaaaaatcggtggaagcatatacgatcagtgtgggaaaagacatacatctgcagatcttttgggatttggtaaaccaaattgtataactgttcttttaaacacaacggtaaagagcataatctttgatagtagtaataagactcgtgcggttggagttaggtttatggagagtgatgggaactcaagtaagagctacaaagttcatgttgagcagcatagaggcgaggttatactcgcggctggggctttaggtagtccgcagattcttctcttaagcggtattggacccgagaatcatctaaaggatttcgacattcctgtgattgtcaatctcaaagaagtcggaagaaaaatgtcggataatccagcgatctctcttcttgttgatagattctcgcaaaaccgcacactcgagccacctcaagttgcagcaatagcagaaggttacaaattcatactcgaatccgaggttctcccaactgacattaccacaacaagaatctctatagcagccaaaatcgcattccctaaatccaaaggaaggctcaagcttaacagcactaaccctagggagaatccgtcagtgaaattcaactacttggaaaacaaggcagacctcgacgcatgcctagagatggttctgcatcttcaacatgtagcgaggtctgagactgtcacgttcttcttggggacacaagctcatgataagcttgtggcgggtgacgaagagcttaaaagcttctgcataaagaatgttagaacttattatcattaccatggtggttgcgttgttggatctgttgtggacgaggagtataaagtgaatggtgttaagcgtttaagagttgttgatggttcaacgtttgaagaatcaccaggaacaaaccctatggctactgttttaatgctgggaagatatcaaggaatcaaaatactcaaagaacgagaagagcaagaagatacatttcttagccctcaaggtagcccacaaccacagccataacacattgaaatctttgtttctgttgtagtttgcttcaatgagaaagaatcaagttgctgattaatacttacaacttaagcaaccaattttattgaattcgaaattgatttcagtaaacgaaaacgaaactatacaaaacattctagcaaacctaaacctaaacctagccccatgttgcatcttgagggttcgagtcacttttaacttcttcttcctccgtcttcttagtttcttctgtcgccggcgttaatggagaaaccaatccaaatcccaatcttcttctcttcttcaacttcttcaacaggcatctcatacctacacataggacacgtggcgtgcctccctaaccactcctccacacactttgagtgaaacttatgtttacaaggcatctccgccgccacgtcacctttagaccactcatccaaacaaatcgcgcaagaaccaccatatttctccttatcttctccgatcacgacacgtggcatattctccacttctgacttcaacgccggcgacctcccttgttttccaccgtcgctaaagaaatcgtcgagtcccgatcgcgatccgatcatcacgaaccttggactcaacggatctccccgtctcgttgtttgatcggtagatccttggtcatcatcgtcttctctggcggctaaagctacaatcaccggcaaaaatcgagagagaccatcacctcttccttgtataattctctcgaacatagaagaaaactcaacgaaatcattctcagaagacatcacgctagtacccaaaacaaagagaaaaaaaccgagacttttttgttaagaacagagaaaaggagcgaactttcttggagaaaaatctcttaagaagaagaagaagaaaagtcgaaagataagacaattgaaattggagaagatagtgtttgagattatatatgttagcagaagattacagtagtttcatgaaaagaaagttgcagaagactctagaaccattgacgacgcttaagactttccatttatttttagtttcttttaaaaacaatttagtatttattatttaaaaaccttatcctctttcataaaggacaaaaaggaaatagataattacgctgtgagaaattttgcataaaggtacgaacatttataattttatttacaaagttccagtttttttggagtgttgataaaacccccagagattattcctgcacagaaggtgtttgattaaattccgctgagggtaatgttctgactttcgatgctttacgaatgatacttggcatggctgctttgacttctctttctactgttcagtttagagtctctgacattctcggaactcgtttgaaaccttatccccagtttccaattcgaataacaagtgagtggtataattcgtcttactctgttcttcttccatgtttattatcctctgtttcgcttacttggttcatgatttttcgacccttttatcagctatgtctgtagtaaagccgtttgtgattgaagcgagagggaacactcgagtggagagtccgaaaactaggaacaggaggagcaggaagaaggtagctttctagaagtgctttcatataataatgcacaaaagtttgaattttttttgccgaacttgttaataagtattttctttcattttgaaacagtttactggaacacaaacaaaaccaagactttcagtgttctgttcagataaacaactctatgctatgttggttgatgactttaacaaaaagtgtttgttctacgctagtacattgcagaagtccattcgcggagatcctccatgtactgtcattgtaagtttagccaccagaaaatcttgaatctgttgtgtctcttgaaaaatcttcaaactttgataagagtgtagcgccgcgtaagcagcatttaatcagagtttgctttgttggttacgcggtttacagtattggtggcattgtctttgcttcactcttgaactttgataagagtttagccggttaagtaacatttagttggagtttgttttgatatctacacggtttattgtataggtggcattgtctttgcttcattggtcatcagttgtttcacaaattttctgtcttgattgagagaatggttggatttcatagaggtgacggcatcgagttccagggttagatagaagagactagtctagttgaagttgttgcttgttatatttgcagttacatttttacaatgtaataagaattcagggtcaaggaaactcgatcttgaacaatggttttccctcttggtctcattacatgtttaatgtatttcaggaagcagctaaacgggttggagaagagctcattaaggcttctattgacctcaagattaacgagatatcgtcttatgatcgaaatggaaataaacgaggcgaaagaatgcaagcctttgaaattgcaattgcgcaacacgggttcttaccgtagtaggtataactcttagctcaaagcctcaaagactcatcacattcattttagttatagaactcaaagactcatcacattcgtcaaacttatagaagcttcacctgcattctcttattgaaacacaaaaaaactcttttttttaggtagttgaaacagaggacatcacacttagagactcattaagagaatctctctcaggaagacttggaaacttgatcttggaagcacatgatttatccggaacatacgggcattccacaaactcttttgcgtaattatcaagacatatatagatctggaaaagctgcttattcccctttacatcttcattgcattcgatacccggtgcaaatccgatcgcgcatttgatcgcatttttgatctcgtccaaactgtaaaacccatcatttggtttaatacctacacaaaaacaaacaatgatcaatctgcataattgtttccacaggtttatcttctttttcaaaatcttttatgtacctttttgtataaggatgttgaggagatggactttgtgtttgaatttgagattggtacggaagtaagagtgttggtcgaagatagattggacacaggtgccatgcttattccactcgtgttcccatagatttgtctcgttacttggacatgcccacactccccactctgtccatttcttttccatttggcagactagatctgatatctgttgtttttccgaaattcagatgctttacaagaataaatttgtataatagcttcacttattctagtttcagagtcggaagatttcaacaaaacatatcagttagatactaatagagatagatctatgttaaccttggagatatcgaagagattggtttggtcgcaaaacgcaggccaagtgccattgttgaactgaggccagagtccatggatgataaaatccgacgctgtgttgcctttcgttggagggcaacatcctttttggctatcgcatattgctcctggccactgcatcatataacgaggtataaaaatacggtaagatgtgtgtatatatacatatatgtatgtaagtgttgttggaaacattacgtagttgacccagtagaagaaattgaagtctggttctgtttgagacgaagacacgacaaggctctgtaaaattaacaagcttacgatgatgattcctctcatgtgttttgctctctgtgtttcttgattattttttgtttccttgaatttatttcccaatctatatgtaaaaagggaaaggtacctcacaatcaattgtttccaaaaatgaatatataaagaatattttcttaatttgtttattaatttattattctcaacttggttctccacttgtctaaaaaaatataggcaaccttaatgattacgctgcgtcattaattctctttgtgaaacttaatcggatggacttttgtaacagataaatgccatgcaacaatgctcttggtaacattggcttgaactgggatccgataatgccctcaaaaggagattaaacgattctactacattccgattattgtttctataatactaaactaaataatactttagcacattattaaaaaactattgtaccgtgactgaccaaattctgttaaacttatgcattagccattagggctgaagttttatgaaacgtatgatgcattaggaattttaccaatatacgaaggtttatcttatttgaattttagattttagaatccccatgaatttggtttggactctaaaaaggagaagagaagttacaaaagataacaagataagagacacataaatacataattaagacttttagcaaaaatacataattaagatctaccataacaacgaaactgaaaacacgtaaagatataaattagaacttagaaaactggatttgagatggacagcttcctctaggcaaaactggacattcgataaactcagttcctgacgtatcaacacaaatatagatctgatgaagctgggcattacgctccggatctttgttacattctattcctggcgtaaatccaattccatcttttatcgcgttggtgatcttatccagattgtagaatccatcatccggattaattcctacatttacgaaaagaaaatggtcactggtgagtttaaaatgtacacatgaatagtacatttatatagtgatttattagtgtatataccggagtttttgaggatttggaggagatttgctttttgtttgagtttaagagcattttcaaagtactcatgttggtccattacggattcggagcatgtaccgtgtttctcccattcgtgttcccaaaagttgaacccttcgttgcttggacatgatagtgttggccaattctttttcaaactacttacgagatccgatatctatacattcatatacatgatagctaataatcgttgtttaagaattagaagaaaaaattacactatcaattatatatacctgagatctatcaaattggctatcgggatcacaatttgatggccatgaaccaccgttataattaggccatagaccgtggataccaaaatctgcagcgggtttaccggatgttggatagcaacaagcacgcgatgtatcgcaataggctccaggccactgcagcaaattcataaaatttcacattcagtttatatatgtactttgtcaaaaagaatgaataaaatgattactggatcttagtttaaaccagaatatatatacctgaagaacgaagtagaagaaatcaaagtcttcttgaggacgtgaaacgaaaagaccttgaaacactagaagcttgaggagaacgttaacacaaccctttgctcccatctttcttctcttcttttctgcgattgcatgattaagacgtttcggtttcaaaatttatagacagataaaaatgccatttcccttgtaataccatttttaattagttattcatctacgtgattagttaagagattggcatattctcttaagtaattcatttcatatttccgaccttattgaaaagtcatttttgtacgttttacaagtagacagtaaactcaatctcagaatttagtaaactgattgttagaagtttttttattttatttggtagcccttcattacgcgcaattgtcactatatatgtcacaatttttaattaaaaaaaaatagttaaacatgtagactagtttttgagaaactttatgattacaagattgttaatttacactatgttagaggacttttatatcccataccgcaattgcatggtatccaaaggatcgcagaccaactatcacttaactaaaaatataaaaggaccaagtcgatcggcaaatcgatccgagtggagattaaacaaaaaaggattgacttgaaaatatttccaagggatatccatttctatgcttaactaattttaaaatatgggaaggaattatagtatcaacgtacgttacaacttacaacatgtgagcacgtgacccaagcttcaagaaaatctcaaatattttatttatttatttttctaataaaaatgttaatatttcattagaaaatgaaaaagttaggaattacaagaatgtaaaacctatactttggtctcatagcaaaaaagaataaaaaacatggaagcaaatatcaatcggtccatcgacatcaacaaaaacagttaagcttttgaaaacaatgaatcgatacaacaattttaatgaatcgcatataagacacctcaaagaggaagataatgctgtcaaacggcaaaggtcgaaacaatgaaaacccaagtggatggaagcctttcaccggtaggccgagaacactgagccgtcaacggcgaaacacacatagcacacgaaaatctcaaatataaccaactaatgtacattttaacatggaattatgaattatatgctaattaatgctttgttaaggatccatccatattccatagcttagcaaaaaaggatccacccacgattagcgttaaacttaaacttaaacatgtcttatagtaacactttaacagaaataagcaaacatcatataaaagagctagaacatagaaaattaatcaataatgaaggagaaggaaggtacgtggaattataatttaattaggaagcactactaatccacttcccgatgatatgtactgatcctggtcgtggtttaacagctaggtttggtcaaccaagccaatgtaataaggtttgatttgattatttttgttgatttttgatttgatttgatacctaactgaatccaaagtttagtagtttaccatccatgaggttacttggattaaacataatgttgactgtaaaccggtccggttcatgaaagaaagacttgatacgttaaaaccggagtcaccctgtatcggtcagaaggacccggaaatcaaatggttttgaatgtgacccgaaacaacccaaacccgacccggtccgaatttgtgaggaataggtgtgtaatttgtaaaaaggcgctcccaattttcttctccactacgaaaacggagactgagagcagcagcgacgagcttcatcggccgtcgtctccgacctcactcgcgatctccgattacaaaaattagatcctcgattaagaattcgaaacatcaaaatttcatcaacaaaaaaaaatcagttactggatttacgtttcgtttgcgtcacagatcagatctccatgatcccttatccgctttcgttgcggttccttaaaccttgatgcaacggtctaatgctcgttccaggtcgaatatcaattcagatatggtagatcctcccgaggttcagacttcacctggcaaccaccgatcatcgccgtccaccgccgccaaacccaagtcgaaacgaacaaaatcgattatcttcgtaatcgtcgcttgtgtaactattgccttgggtttattattcattggctattcaattttacgctccggaaggaatcggagagtttcacttcactacagcgtcattatcgatggtgggagttcagggacccgagttcatgtgttcgggtaccggattgaatccggtaaaccggttttcgatttcggagaggagaattacgctagtttgaagttgagtcctggattgtctgcgtatgctgataatccggagggagtgagtgagtcagtgacggagcttgtggaattcgctaagaagagagttcataaggggaagttgaagaagagtgatattaggttaatggctactgctggaatgagattgcttgaattgcctgttcaagaacagattcttgatgttactagaagagttcttagatcttctgggtttgattttcgagacgaatgggcttctgttatctctggttagttcttggaacttcagttgttgtttaagactagggaatcttagggtgatcattgacctctacattgtggaagtaaaagataggattggagtggtgtggatttatgttgcaatgatacttttgatgaaagtttcattttttgttatatagtagcttagttgagtgctagtaaaataaatgagatccattggctattgttggtgttataattactagaaatcttggaaaattttcaggatctgatgaaggtgtatatgcttgggttgttgctaatcatgcgctcggttcgcttggaggtgaacctttaaaaacaacgggaattgttgaactcggtggggcttctgcccaggttttatctcttgtcaaatctgttattgataagaaaatatgcgtatgatgccatttatcaggtttaggataaacctttacttgtatggtaatagattaattgtgagtgatgactgtttattcattcgtttaggttacatttgtgtcaactgagcttgtgccttctgagttctcgcgtacgttagcctatggaaatgtctcatacaatctctacagtcacagcttcctcgattttggacaggtaactcatgagagcagagttttttttttctctttgagaagttttgttcttggttggcccttttctgaagtttggtgtttggaaacttaatgtagttttgtccctatttactacttagtgatctctgattttctaagattcctcaagattgtagaccgtgttaccaaaagaaatgatttttgtccatactaattttcaaaaagctattaattttagtcgcctctgcaggatgcagcacaagaaaagttatcggaatcactatacaactcaggttaatttttgacaaatccttaaaataattgctctttggagttcaagcagttgaaataaacttctcttccctcaaaactcatacagtgtttcaatcctagcagctgcaaactctacaggggaaggaatagttcctgacccttgtattcctaaagggtatatccttgaaacaaatttacaaaaggacttacctggattcttggctgataaaggcaaatttacagccacccttcaagctgctggtaatttctcagagtgtcgatctgctgcatttgccatgttgcaggaagaaaaaggtaagagcatcattgttggtataggtgaatatcgttcctgtgtacaattttcttatgggtgcagttttggcacttttgtatacagggaaatgtacttataagcgttgttctattggatcaatattcacacctaatcttcaaggaagttttttggctacagagaatttcttccacacatccaaggtatataatcctttcaatttcatgttggtcgatgccaagattccgtcagaatgtgaggagaattgtttgaacattggtctttaatttctgtctggatcagttctttgggttgggagaaaaagagtggctgtctgaaatgattttggccggaaagagattctgtggagaagaatggtcaaaattgaaagtgaaatatccaacatttaaggacgagaatttgcttcggtattgcttctcatcagcatatattatctcaatgcttcatgatagtcttggtgttgctcttgatgatgaaaggtaaatgttattgcacaagttcaagatcaatcaatgttggttttctgtgacaaagatataaacaaaaagtcgaacctatgcttgttttgtctacagaatcaagtatgcaagtaaagcaggagaagaagacataccactagattgggcattgggtgcttttatccttaatactgccacagccacttttgattacagtggtaaatctagaaaaattcttgacttgagtaatgtagccaaatacaaaatatgacatttgttactatataaaacaaaattgtttcagataaaacaagtaaattattaatcatgtatatgtatttacgtcaactcgtgtttggagcttcagtcttcataaatctctttttgtgaattagttagctactataaaaaaattaaagaccaatttgaattagcttgtgtgaaaatgaaaatgtttaggaagctcagtccatgaagctatctgtgttgaagtgtattacaataatttctcaacaatcaatgagacaagatcaagaaccgtttatctgcaataacttctcaacatcaatgagggacaagatcaagagacgattgtgatggagaaagaaagtcaagacaattatgatgtgatttacactgtcaacacgtgtatcatatactgtagtcctcgataaaattaatactataaagattacagaccgatttaaaattcattaccacgatatgcatgaggacaactatttgatagtttttttttttatttttatgatagacaactcacaactaattgatccgatgcacaataatgagcttatagtatttatttcgacatttcgattgttcaagtcggatttcggagatggttttgtgatatttggctcgatcaaaattgaactcttgatggggatcataagctaaaccacgaaaatactcatgcttgcaataacgagtaggagagaaactgacccattgctagtgattcgtgtatccttgtgttaggttacacacgtttttttaaccactcaagtctacgtcacaaaaaaaatcaatttaccactaatattttatcttatcctcaattattgacccgtactataatttattttatagactagatgtagaatatattatataatagccaatagggatcggtgggaagagattcatttctttaagttataggtctggagcggccgttttgaacttctgattattaaatcagattctagactaattaagaagcaggcacaaaaagaaatagattacgtttcttattttcttgcgttgttttcactacatttattgctattgcgttacgtttttttaaactacgtttattgcttaatgctagtatttgattatcttgttaatataattttcgttacggttctttagacgttaatgcaacgatcccatgctccttcctgcaggttgaaaaatgacaccggagacggatgctctcaaagttcagatcctacctaagcaccagtcattgccctacacagtcacgaaggccaagtcgaaatcattgatcctgctagttgtcgtttccgtgactatcacgttagggttattattatatgttttcaactcaaattctgttatatcttccggaagtttgcttagtcggagatgtaagctccggtacagcgtccttatcgacgcagggagttcagggacccgggttcatgtgttcgggtactggtttgagtccgggaaacccgttttcgatttcggagagaaacattacgctaatctgaagttgactcctggtttgtcttcgtatgctgataatccggagggagcaagcgtgtcagtgacgaagcttgtggaattcgccaagcagaggattcccaagagaatgttcaggaggagtgacattaggttaatggcgactgctgggatgagattacttgaagtgcctgttcaagaacagattcttgaagttacaagaagagttcttagatcttcaggttttatgtttcgagacgaatgggctaatgttatctctggttagttgtttttttttcttgaatcaattcttcattttggataagttgggaaatgtaatcattgggaaatgattcaggatctgatgaaggtatatattcttggattactgccaattacgcacttggttcgcttggaactgatccgttggaaacaacggggattgttgaactaggcggtgcttctgcgcaggtttagtcttgtctctctcgttggatgctagagtactagaccatgcatacatttacgctatatatagctggctttctctttttctttgtataaatgtaggtattttccgtccaattttggcagaaaaaaatgatttgactttttttttttgatataattttcatcacaaattttgtaatttaagacgttttttgtcgcttgatgattcaagattgggtttagatttttttaacaaatttgaaacgaacatttttgatgcaaaaattggtttgaaaaacgaacaattccggattaagaaactaacaacaaccgaactatactgcatctagatctgaatcttgatgttgactttagatgtacgtccggattaagaaactaacaacaacagaactatactacatttggatctgaatctagatgttgactttgtaacatatttttagacttcaactgtggtatatggtcgaattgttagtgatgactatttgtgcatatgtttaggtgacatttgtgtcaagtgagcatgtgcctcctgagtactcgcgtacgattgcctacggaaatatttcatacacaatctacagtcacagcttcctcgattatgggaaggtaacttttgagacaagaggatttgtgtctttgattccttgttttttaaaagttgtttggaaacgtattaatcgctgaattttatttcttttctttttctcatcaaaattgtagataataatgctaccaaatttgttaattttcaaaaaagctattaacttttgtctccttccaggatgcagcactaaaaaagttattggaaaaactccaaaactcaggttagttgtttttgataaattgttataattgcacttttgagttcatgtaattgtaataatattatttttctctcaatactcatcttcggtgttacaattcatatagctaactctacagtggatggagtagttgaagacccttgtactcctaaagggtacatctacgacacaaattcaaagaattattcatccggattcttagctgatgaaagcaaacttaaaggctcccttcaagctgctggtaatttctcaaaatgccgatccgctacgtttgcgcttttgaaagaaggaaaaggtaaacaaagagcattattggtacgtatagctgaatgttgttcctcgtatcgatttttcttgatctcttatgggtgtagttttgttcctttgtgaacagagaactgtctatatgagcattgttctattggatcaacattcacacctgatcttcaaggaagttttttggctacagcatctttctactacaccgccaaggtataatcccatgacgtcaagattatatgtatgaatttgtgggggagaaattgtttgaacattaatgtcttatatattttcctgtatgaaattaatctgaatcagttctttgagttggaagaaaagggttggttgtctgaattgattccagctgggaagagatattgtggagaagaatggtcgaaactgatattggaatacccaacaactgatgaagaatatttgcgtggctattgtttctcagcagcatatactatatcaatgcttcatgatagtcttggtattgctcttgatgatgaaaggtaaaatttactgcacaaattcaagaacattgtaagattaatcaaatgtgggtttttttggacaaagatataaacaaaaactatacgtttgtttttgtttgcagtatcacgtatgcaagtaaagcaggagaaaaacacataccactagattgggcattgggggcttttatactagatgttgtaacacccaattctgattacaatggtaaatctagaaaatatcttggcttttaagtaacgtagccaaatacaaaatatgaaatcatagttttgtattttacgttaaactgtgtttgaaagtaactatcatgtcgtcgttccttttcatgaaataagttagctaagttcgtaggtgtgtatcttcccctgcatgggatcgactcttctcgtttgtgggattgtattattgtaataaaactctttgtttggtttcttctctcaataatattgttacaaagttgacgagtacaaaacaaaaagaggaaggaaacaaattaaaaaaaaattactcataagaaaaagagagagaccaaattaaagtagaggtggtacataataacatgaaattcaatattgtttttttgtttttttgttttcattctgattttgattatggacacgaaatctaagattacagagcaattatgaatggtactgtttaagaaatcggcccacagcgagtgatgatatatgatcctttgttcgcatgtccttctgttttgcacacgttttgtaaatgtgcttttactttctttaactattaatttaggtgtacaacaaaataatagattttcaaataccagttaccactagtttcttatccctggaggattggttacgtgaaatatcttttaggtctaaagactagagcttgtagttataggtcttcctctggactcctatttctcagttctcactgattataaaatcagattctagactaattaagaagaacaggcaaaacgaatttgctattggcccgttacgttttttttcctttaaataatttttacgttttttcactacgtttattgctattgctataaatttatcttctcagttttcgttagagagtcttaaatgctgatacaatgtttgtatacgttccaggttggaaaaaaataatcggatatggatgctctcaaggttcagattctacctgataaccaatcatcaccttcgtccacgcacatgctcactaagcccaagtcgaaaaaagcgacaaaatcgattgccatgctaatcgtcgcttccttggctatcacgttagggttattatttgttttcagttcaaattcagttatgttctctgcaagttttcttcggagaagttcacttcactacagcgtcattatcgatgccgggagttcggggacccgaattcatgtgttcgggtactggtttgagtctggaaaacccgttttcgatttcggagaagaacattacgctagtctgaagttgagtcctggtttgtcttcgtatgctgataatccggagggagcgagcgtgtcagtgacaaagcttgtggaattc

SEQ ID NO: 39 - DNA, 83351 bp, Arabidopsis thaliana
aagcttctaccttgccaccactagatttgcttctgctactgttgtggttagcagattgatccttggattgctttgcattgccagttacaacctcgaaaatggttgggagatcatttatcatctggaagagcctcttcctgaaaggaattaataagatcagaggcaagataactaaaccatttgagtctataatatcagagaaaacaaacaatgttacttggctattcaacaaacatgatctttgacctaaattcttaaatctcaataaattttggttcagcttagatggaattcaatacatttgtaggttcacttctctctactgaaggagaaaaaatgatgatcacttcttcagggttgtttcacagaaacaggataacatgagtttagtgtgccagagatcgtcactagtatctacaacaacaactacacggtgtttggatgctagaattatgcagctactatactagtcattgaagctttaccaaacaagcaaaattaacaaacacagaacactgagcagagaaagaaacttacctctcattcttgccaaatccgaaacgtgcaccaaagtaaaatgcaacagagataagccatgaatcactgtgaactgcaaccaaagaaatccagtctttttcttgcattccgtcccttgcgaaattgatgcctaacgctggttcaggaagctcaggagggacctcctcaacgggaagattaacctcccatgtctcatttggaagtccataaagacacaagttttccttctctgcattagcaaaaaacgtaattcactaagaagtcaagaagagaaaccacaaagagaactaacttcatcttaggtacaaatctcacaaacacttaaaaagtctataatctgttcaaacatcatgaaccaaaaaaactgttcaaacagacaacaactctgacaggaagataatcaaagatataacacctaacagaggagtcaactagaaaaaggatcataacaacaagtctactgcagattagatgtaatcaggaagaagctaactaaaacaatctaacagaatttagaaaaacaaaagctgggaacaaaaagaatccgtgaacaaactcatgaagcaaaaaaaacgcatgtccaattacaatctcttccctaattcagacccgaaaggaactcttgcactgaaaaatcttaactttagcaaaaaaaaaaaaaacacatcttcctataaacaagataagaaccaatgcgttaggaagctatatacaagactttaaatgggtaacgaaataactcaccagggtcacactgatggtaaaacttctgtacatctgcaaaacaaaacacacaacaaaagaacatgaataaacccaaaacaggaagaagaaagccaaaatcttttgggggtttttttctcaggaaattaagaaaacccaattgaagaaacgagcactaaacatataaaaaaaactcgcaaatctacagaaatcatctaagattcgatcaaaagaaacagagtaaatagagaaagagagatcgagctgaccagtagagagagccttgatgagaccagctctacgaccacgaaagtcgctaaaaacctcttcgacagtgcgaggtataggatgctgaattccttccatagtattgcttcaaaagccaaagactttcacagatgagaatgaatcagcctcaccaaagaatgcttccaagtatcgagatgcactcagaaacaaaaaagccaagatcggctttttagtttttccttttgagggaattttgtatagttcgggggagagtgaaatctataaactttcggaggaatttatttcatttggggaaattgagaagagagagctgtgctaagaaaaaaaaaccctaaaaacgaaaaggaaaggagacaaaagacaatttgagggatttggaagcattggaagaatagattaaagcgacaacatctcaactttttttttttttttttaaagtcacaacctgtatttatctatttatttaattcactccagaaatataaagtcgttttacttttcttttgttttgggtcaatatttatgtgcgcttttttttcctgaggcatgttctacaacgaactgaagtaataatacagtaaatttctgccagttttactgtgattaacgtttaagaactgtactataatatccatatctgtcgatcaatataatggaaaggctaaagattaaaaaaaaataatgattttaaacaaaattgatggttttacaatattctgtcattaatctctagttaataatgagttaaattatactactaatagttaaaaagaatgcttcaagcttaataccgtagagagagcgagggtctttatctgatttgtttaatcgttaatgttttttgttattattttggttttgtttatactactgttttacatgtttttgttaattttcatgtgaattatattcaaatcaaactctacaaagctttaatacatagaagttagaactacattaggatggatgactatgtatttcctatctttttgcagattagaatttgcgggtaagtaagtaaaatgaggcgttgatgcttttatcctcaaaagaacaatcagttgtttttatgaagaagaaaaaaagaagaagaagttagtcacagttgggagatacttgacgtgtatcacaagttgtcagatacttagcagaaagattaatggtataacgtcgaaaccaaagaaacattttgatcttcataccaataattaagtttccggatgttgtctaagaatcagtttgctccatttcacgtttcgaccttattgacatgttgaatcatcagatgacacatggaaatgattttaaaacaatatgtatttgtttggtttgctcttcatcatggtctaatgagctatttgcatacagcattttttaacatggttgtctaatttgggatgtaagtgtcgttcttttgtataaagttgtttgatggagtttcgtattgtttgattaattaaaaggtagtttaactaataaaatttaaatatatttacgaataattaggattaggaacacattcacgtacttgccacattaataaaagtagactattaactttgtaaacatgttattaatcaatattaaaaatatgctactgtcacatgactcgccttccaagttagctaactattagttaacttctaatatgtacttattagatataataagtataagttcgaatcaatctattgtaataccaatgtggaatgaattcataacaaactatctttctctcaaggttcattcgtaatagattcataaacattcgatgaataatgtagtatcagctgaccagtcaacaatttttgtaaaatactaaggcaacaaaatcaagctgactattcaacaatgggcctaatctcacgaaaacgcccaatttgaaatcaacgaagcccataacgcagtggtcttctccgtccatccacctgaagcccacaattgattatggagatcatcatccgaaatcttcaaccaaatcatttcaacacaaggccctcaaccccgaaattcgatgagaaaaacttttcaacattttgtcactgaaatacggttcgcataatataatggagttcgggtaaacctggtctgaaatttgattacgaaagggctcacaaatgattttactagtcttagttaattaagctcgaggataatggggcaatagttgtaattacaaaagttatgggtcatatttaaaacataataaaaatataaggaccataaactaaaaagtttcagtgtatcttgcatcaccgaggcaagtatgccagtagcctctccaagcatttcaacaatctttgccttccacccgaaggaaagccaatcctataaagagggacgaaatcagatgtaacttagcttgcacatccccgaaaacaccaatattcttaaagattccacattatttcctgaataaagaagaaccaaaaggaacatggggttcccttacctcgccaacaaaagtcaagtaagtaccaatattaagagcacgcccatgacaatttttgctatctttttatttttttgtacgaatactcttcagatctttttcagttgatgtcaatccaaactttaatcatgagtctatcacaatgttgttgaagtacataaaacaaggatttataaacgagttaggagaattttaaaccacaaaagtaacatagtttcacagaattgtatcaaaatatcattattgttgttatatgtattcatgaagtgaaaaaatattaaaatcttataaataatcagttttatacacaaaaatatataaattgatatttcgagttacaaatgaatctaaccataaaaattgtaactacatattatggatctaattttcttaacaatacaagaataaacaaatagtaaatataaattagcataaagaacaatcaatataaatttttcttaacaattttcacaacaaacccacgcatagcgtgggtactcatctagtactattaaatcctagatcatcttgaatttttactacattcacctgacccctacagtcttcctaaatgtgagagagaggaataaccaattaaggagggagggataagttacgggaaaaagtagcaaatgaacgctagaatgtatcttacaacaagataccaaggagtctccttttgatgtaacagaatcgttagagacttctctatcaaactaccaccgtccaactcgatcatacaatccagtttagcctgaagtataagtgtaatgacaacatcagaaaagtaagcgcacatgacatgatgccaagtttacaaaagcaatctttaccttttcctcaacaaaagcaccaaaaagaccattgtgtttgcagtcgaggggagctgcggaaccaactcttccggataccaaaacaaggagattcgtggtgttttttgcaagcaaatcatctgaaaaaaactaaaaaggattatattaatccaaaaccaatgcagatgaaaaataaccagaagtcgaattattaaacaaaaacatatacctaacgatttcaagccgtccacacgggtaatacgtcagcccaaagagttaactctcctgagccatcataggaaataacacattacaaattgattgataaggcgttgctaacattcaaatatcgaaaaggactgggaatgagattgaccttttaattttacggccaaagagataacataatgcaccagcgaatgaaagaaaaacagtagattccatcacctacaaaattaaacaagagtgcatcacacgatcgttccagagttgatcttaaaattaaaataaaaacaaaaacaaaaactgaattttaattttgacatcagcttagtctaagcttatactagtgctttcaattttaatttgcctttggattaaggtcttgtgacctctgcttttattatatctattagtattaactattagtcattgactttatatgtgtatatgggaaaaatactaaaagcctaaaacagttggctggttcgggtgtatcattgagaattttgaattttgataactccttccttggatcattgatgataaaacttatcttcaattctaaatccatttacaaattcaagattttttttttttgtctcatggatgaaataatcatgtgttaagttcaaccggagtgtaacatctctaaagtaacccttgcagtggcacaaacgaaacaacactctgttttattcatcaaggcatatccgttatcgcctttacatttacacatgcatttttttgtcacattttcttttttgttgaaaggttttattttggtcgcattctctaatccattttattagaaagctttctgcttgtagggtttcaccattttagcttggacggaaaatactgcaaataatataataaacaccgattaaactcgccggcatagaccaaagtttgctatataaaatttgaaaacacattttaaagtatatacatactaccttgttggtaagggagagataatatggtttcacttcctcaacgtttacgcggactttgcttttgctgtagagatcatacttgttgaacactttaagccacttcatgttctctctgtcttcattgttcatcaaatgcttgtatgcttctgatttgtgaagagctgccaaccaaaaacaataacaataacccgtagttttataatctagactcatctattaaccaataaattcaagcaaatcagtctttgtgtttcaaataccgtagaacgaatggtatctgatgatgaaaagaccggctgatggtaaagtagtttgattctccttcgcaacctgtgaaattcagttatgtacatcatatagattattcttacatgtcggtaaatcataaacacatgttgagattgtaatgaacttacaaggtacatgtaatcatcatgtccccaagacattaacacattgtcgagcccacagccttcagtgtatatcccatacttagagttgtaactcgggttatcatagtctggattctccttgaagtactacatcaagaaacccgcaatggaatcaatttttcatatgttttgaaactcaaacaaagtttttaaattgtgtttaaggaccttatgtaccttgtggtgaacaatagattcatcaaaagcacatcccactggaaatgtatcaccgacgacagcccactgagggagctcaccaaatgaagagtgaagaagaacttttccaagatctgattcacatacacaccaaacacaaaatcattaaaccggtaaacgatattttaacgtgatcaaaccgaatcagggagtataatttaccgtggataagaccggtcagatggagccagtcttcatcagggtaatcttttctgatggcttcagctgtctgaagcagatgctcgatctgaggttcgtccaaatcaggatcactctcgtcgataaactcattcagaagctcgcaacattcccaaatgctcatctccgtacgatttagcttctcgtattcttctctcatcttcctcacgaaatcaacggtttggccaatgtgattgactctgtaaaattcctcaacacctcttctcctttcactctcagcatcataatccctttcatgacaacaacacaagtaaataaagattaaagatttgatcttgcaatctctgatgtggatatatctacctgaaggtgcgaccaaaagagttggtgtgaggagcctcgaaacctgcatctaacaccaactctgtttcttcctctttaccattcccctgattcttctctacaatctcatctcctgcatctaaagtaactcaaactcaatcatcaaataaatctataataagatcatttcaaaacagagcatagagaaagaaagatccaaagtaaaacgagtacaaaggatcacgaaccgttctgatcagagtggcgatctatgagaatagtcatggagattcttcagatccagagaaaccaaaactagggttttgttgttgggtgatgacggcaaaatggagaaaggaaaatgatggtttaaataggtgaaaagcgagccctgaagtgggaataaaggaagaagtgagtccttggccatattttcatcagaaggactctcaaagtgtccttctatggcaaaatatgcaaaaaaatctcaccttttttattggaatagggttcatgcagagaaaacagaaaggctaagaaacagctgtaaccgtttagatgagttagataacgacttggcgcgtcattaatctttttaaaatatgatatttgcgtacgcgtcagacttttttaatccactaattattaactacaaattttgaatttgttattctatttcacaacagtccgacttcaaaaccacttctatgttgagtaataataaatatctgctgattattttacacgtgtgaagactattagccgtagaaagatcacacaaaagagaagaagaagaagaaatcacgtcacttttatagtgggatctacatgacgtggcttcataaatgacaattttgttttctatgatccgatggtgtctctgagtgttgtagagtatagacgacaaaaaaattaaaagaggaagacgtcttccacatttgtattttcttacaattccgtgaccaaacaaacaatcccacaattttaagtcgagattcacggtttctgttgtctctaatttaaattcatattacaacaaaattcatctaatagacatgtattgtattgtatcagctctcttttagagttttctctctttaacgattaagcagacttcatttagaattgaacaaaattttgtttacataaattctcatggcagacaaaatgaagaaaaatcataaaataccgattgtaattaattaataataaccgaaattagtacgtgcagatatcacctaactttcaattaaccaagtggaaaagaccggtagagaaaagaccaaccagtcaacaaatgactatttgcatttcttaaaaaactacttcgtatgaactgacaacaagccaatgtccataatatatcatcaaaataccaattgttcttccgtctcagaagtcagaaccagaagctggatatctcagtaactatgattctatcattctcacaccaaactactttgaatcagtataaacaagagagacttatactaatcaaccgcattgaattagttagagagaaatcacaatccattgttctgaaaccccttacaatttacacttttgtctatgaaagaaacatgaacccctcggtttaccggtacctacacaatattaacttccggttttaaccaaaaaaaaagaaagacagtttatcttttgacccctttttcagctgtttcttatgtttttctctgttatagtatcatccagtaaaggttacctcagtgtttcgattctctgaacatgttcattggatttgatggtactgtgtgataccgcgttttggcggaagctttcttaggataaagaggaccagagacgatggcaatatctccaccaactgtaagtaaacagaacacactttttgtttagagatttttaaaagaagcttcatatttagattctaagattcacatagtgtgtctatatacacatgcacatatatggtagctgaagaggtgaatggaaagcttaccaagtaatatatgaagtttaggattggatgatctaagacatcaagatctgctgcatcgtcaaacgcatcaaagcacatctagaccattaacagaagatgatatgaaagatctggttagctgtggtttcggagatccaccaacacagagaattcaatcaacaagatatggtctaatggtatcaatagtatgatgtgtatatctttaccatgatacatctgatgaggaaacatgtaaagcatatggttgtcacgtagccaacctgcaattcgtacaacacataaagggggtaaggatccaagaaacggaatttaaagatcggggtaactttggtttaatattcaaggttcacctcttgtagcttcttgcgccgccctttagactctactggaaatcgttgcagcatcaggaaaagcctgcaaagaaataatcatcaaagacgataaatcaaggcgacttcatgagaaacttccttcataacagaaatgatatatgataaatcctgatatggtacaaaaaggatcttgtctagctagcaaccagtggagggcaggaatcctagttttccaaatgatatcatcaactcatttgtggcaggaaaacatgtggcagcaggtaacaagcgtttaaactaagctaccatcatcgtgtagcatatgcaagtgcaacatacttaccttcctccatataataaaaagccaagggccgcaaacaatgagacacctgcaatatacattcacaagagatgagacatagagtgcattaaaaaaatcaatctctgtgtaaaatgatctatacttcaaactatacctgcaaagaacatcttagaaatgattaccataaggtgaacaggcttccaccacaaaaccaaccaaagagcaatctgaaattaatacattcaaatgaaagattaaagctaaggaacccacaacacaaatggatcgtaaggaaattcaataagaagctcaggcccacaggtccaccaagttcaaggttaactctaaactttgaaaatttctcagatattacaaaggccaaataggtagttagtttcacctgaattacgtatacaactgcattaattgtgaagaaacttggcctcagtccatcagtcgatacagcacgtgcctgccaagatagagtaaatatcaacaacaatgcaggaaaaactaaattgaaaatatatacagaatcaaggtttacctggtagtaaatctctgcccaaaagagaaccagaagcgcatatgtagtgaagaaagcaagacttggaatatcaagtaagatatgttgcagaatctacaagaaaaaccgaacgatacttgcaagtttagaaatttcaaatagaccatcaatgaggctaaatcacaatatcaatagaaacaccaaacctctggctgcatgttctgtgcatctcgccggaagagaaaaaccagagctcgaactacaaagaagaagacgagccaatcaacaaaagatacacaaaacaaaatcaaaaactaacaagagacaaacaaacccacctccgttaaccatgaaattgagaaaatgaaagaccttctgcgtcgtccagccatattctggaactctcaattgtattcttaccaattgaatctacaaaaaaacaaatgaaactttaatcaatttagggtttttttctctaatcaacactccatacaacaactatttcctcaatttcatatccttaaatgcctaatcttccgattccaaatcaacacattccctaattccaatcccaattcaaaaccagaaggacaagtaaacggtaccacagcaatgacggaaacgattccatatagaacagcaagaacatggaagatacgatcctgccacaccggagattcattcacatcccaccaccaattcttaccctccttcaaattaaacgctacgattgctgaagatgacatcatttccaagccgccgcttctcatctccacgaaaaaaacacatacaaagattcaaattccttatagatttagcttcgatcaccaaaaagagaatcgatcgaatcacttctcctctctccttctccttcctagatttttattttatttttcttccatttttttttgttttaaggtatttatagtattacccgaaataagatttgagaccggccgtgacagggaatacttagaatgacgtggaagaaactgaagaggagattgaaaaagtaaccggatatagccggtggttctctccgtgtggagatgttctggtgaccgacacgcaacgttgttatcatagttccacgtgtatgtatacgtggataaattaatgctagctggactttttaatgaactttagagagattgtgactaatttaacaatgacgaaactaataaaaaatgctatggatttaattattaacactttccttggtaccttatatattccaaaatatttattattccatatattcaaataacaaacgaattatcgctgcaggaattttagttacacacaattacaaaaatgaatcaaatggggtatacacgtaaatataataacatgaattttcaaggttcgaacttttctcgttgaagacaagtaggtaataactcttttaattaacggcactgcagattcttcggatttgtccatctgaaccagtgagtgtctgaatatctcccattttgatcattgcagctgagaaatcagacgcaaatcgtgatggatttctgctgtactccgtcactatactatctgtagaagctccggttccgaacaaaacttgatcgctttctaaaagtcctttcttctgcatcaagtttctgtaatagttattgtcgaacgagtttggtgtcacttgatctaaaggtgctagagtcgtatctccaccgttgaccggacaacgacgcttacgggtactggagaatcccgcgtcaatgtcactcgagttatcgtaaagcctacctttgaacgtgaggcattgagcttgccctaatgtgtgagctcctgtaaatagggttaacttgtgtcacaagaaaggttttaaatggcaagaaattagtgaccaaaagtgtgttttacggggtgactgacctgagagagcgacgaggtctcttgtgttgagtccttttcgaaggaagagttcagagagatcgttgaggctagccctgaagttggggagatccctgtctgcgatagccctaaacgcgttggtggaatctcttcgaccaaccttcacatcatatcttggacctccgacctattgatgataccaaaatttacatattcaagaattaattagaactatgattaatcaaatttgcaaccgtaaacttataacatttacatgacattttacgtcagagaagtaaatattatattacttgaaaaagtttaaagtagtagttgaatatataaatatgtacatgtttggattaataatcaagatatatgtatataaagatggatatagagactaacatattcagaagcatctctagcagcaacggcaataatatcagcgcaagaaacaacgccgggacaaacactctctacagctgatttggcttgatcgataacttcaaatcctcttgccgattgaaaatttgccaatgaatctctctcactctccatggtgggagttgccacgagcatgaccgatgcatcacaaccctacaaattaaaaaaaaaaaaaaaaaaatatataaagtttagagcagtccataaaacacatatatgtatggacacacacacacatgttgaatcaaatgttttaagtacatacattaacgaagcagtcgtggaaatggagacggatgagagaagcagccattctacgttcacggctgattgcggttcggattgaagatcggatggtggagagagcgttttgacaagtttggtcgtagaaagtaggagaaagttgtgcttgactgaaacaacacaaactcaacaacaatacaagaatcttgaagatcgccatttagcttattacaagagacttttgtttgtaaatttttttagtaatgaaaagaatttcgtaagagctaattgagaagtgatttaatgaattgaagaaacttgatgtgagttttcgaaatgggacgaaatacgtcttatatatataggagcgaaataagtaaccaatcatggtcacttttttctgcgatagcgcgtagacaccacccgacgaccttttccaatagttgccttttctcctttaatatggcacctaatatctttgtctacataataattattattggataagagttaactatttttagaaacgattacattctcatattggatttagcaatctgaaattatataataagtttctgcgatgattattgaactctcataaaaatttattttgataaagaactaaatcttttattggattgaacaatcttaatttgtacattatagatattcgttttcaacaaaagagtgtttgttcggggtatttgattatttcgctttctattttcaactcttgcaattacttgacatttgcattaacgaaaaaactgaaataataaagtatccgaatttggtttagattttgttgaagctggcctacgttgaccaaaccataacttaataattaaaaccgttacgcttacgcggaattttgaaaattgacttttgacttttataaaatagtcagaaagaatctttcgtaaggataatgtgatgtaacattgtccataccgtaaccactagccacaagtgcttcttaacttgttcgttgctttcctatttaggtaagcttcttagtttgtttcagtaaataattaaaaaaattaagttccatttacatttacacctttgaatccttttattttttcaattccattccattttcttaaattctcatcaggatctttcagatgaaaacgatatagaacaaatatctaaaatatcattatgttatgattatatcttgatttctgtttgactattgttttacccatctcccaaaaaaatgcatatattaattcaaatgtttactgaatctcgcggacaactaatcaataggctcaaagacgacaacgtcgacaagcaccatttgatttacaaataaagttcgttttgtaagctttgtatcaatatctatatttgatacgagggagtgaattttattctctgcaaaatatatgtatatttctttttttttgttaaagaaaatatatgtatatgtcttacgtactaagagttatcatgaaggtattttaatttcagcccaacttaagtttgaatgtgtggatatatagcaatacaaataattattgacaagtaaaattaacctcagacgacggtaaaaacaaaaaaacaaaaaagataaaaaggaaccaatttgcctgaagttcatgttgatgatatcgtttttttctcagtgcgtagtagtgagttttcttcattttttctaaagaattatataaacgaatatattaatatttcaatttgaccggtaatcttaatcaatatataaacacacgtcatttggtgtgaatttctaatggaggacagcttttagtctaattagatcatgtaagacagttccatacatgcactgatctagtaacatattcgaacatagttgaattgaccttttcatcaaaggaaaatgaaacttactaaacacatatatatactcacccatatgggcagacgacctagtttgaagaagagctagatgaaaatgacacccctaaaataggaaagtaaatatatataatttttttttgacaaaaatgtttgaaaacatatttggtttagtacgtacgaccccgttaagtattatggtttggacttcgaaatctccattatgttatgctttggtcacgatatcaaaaaaaaatattattattataataaatctaggcctgccatcatatggattaatagatattagccaattcatatgcatacatgtatatattatgtaccatgatactttttcttttttggttgatatgctactattatatttttttcgtagttgagcggtgtctacccataaacataactgtttcaaactatttgtaaattgtaatcataaaacttcgaaattctataggcgagatgttagaagattttgttaaatattatagaagaaattctcttagctaatttttcccttttttcgaactgtggaactatttgaatgctcatctagttgtatatatgctaaaagatgggggttttccaatcgttcgaacataaatacataatgaatcaccacgtactaaaatcaactaaggaaacaaatgaaattacaggtatttttgtgcgtaaatcatttaagagatgaatgattcgaatttcgattcttagggaaaaacacaactactaccgtactacgtatgagatgcaaaacactacaaaaaaggttaaacacgactacgcacaataatgactgtccatagcgatatgccgatacatcgaaattcctaacaaatttatcattattataaatcaaactactgacgaatcaaatttgaggagtggattaataaataacttttaatgttatcggtgttagcccgcaaagactggattatgcgattttttttttaaaggaaagaaaagcgacagtacatagctagcttcatatatgatcgccattgaccatgcattgttttctttcatatatatctctaagaattgtcatcgtaatagggacattgcaagtcctctagttactaaataatcactctttttatttttcacaatatatagctcaattccaattttatttgctaaaaaataccacatcgataaaaatttgtccaccaaccaaattcataacgtgtttcaaacgaatcattcactcgttctgagaccaatatatataattagctactaaattaaattaaaaactattttttgtttggttaatgtgttatattttgactttctaattatatgttcgtcaactattcctttcaaactaatcgcacaaaataattgttcgttatattcttcagatccgaacttcaacctgtattattataagaataaactatttaagcgcttactaatgatgttcttgtttttcttctcaaacttttaggttatctgtttttataagttaacaatttgacaattgaccaaaatacaaagtcagagcccaacaattaatttattttaatccaaatattctctagctaacatatgatagatctaacatattttaaattacagtctccaaccttgaacagcgacaccgcgtgaaaactctcatgcacgtatattatataaacccctagggtttgtaacattcaacatcaatctcaaataattcatcaacgagaaaagattaattcttactaccaaaagaaagaagataaattactattttgttttacgtacgaaatatataccaagtgagatctacaaatatggagagattttcactaaggtttgtgctaatgatggtgagcatcatcctcacgtcatcgatttgtcaagcacaactttctccaacattctacgatcaatcgtgtcggaatgctctttcgaagatcagatcctccgttagaacggccatcgctcgtgagagaagaatggccgcgtctctaatccgcatgcacttccatgactgttttgttcatgtaagtttttattcttctaaatactaattccacatttttaaaaaaccttacccaatcatttaataatagttttgtgtatgtttaggggtgtgacgcgtcgatattgctcgagggaacatcaacgatagagagtgaacgagatgcattgccaaacttcaaatcagtaagaggttttgaagtcatagataaagccaaatccgaagtcgagaaagtttgtcccggcattgtttcttgcgctgatatcatagcggttgcggcaagagacgcttctgaatacgtatgtttgtgattatatatgaatatacccaatatcctttatatatataaaccatgcatatgtataacaactctccaaccaatacttaggtgggaggtccaaaatgggcagtgaaagtcggaagacgagattcgacagctgcgttcaaggctctagcaaatagtggtgaactcccgggatttaaagatacccttgatcaactctcaggtcttttcagcaagaaaggtcttaacacaagagaccttgttgctctttcaggtaggtccaagaatcatatttgtatatacattaagttttttttttgatgactccttaaatgtgtgaatagctatgctaattgcatcactagtaataacaatgtactagacaaatttataatttctaatttatattctttgtcacgataactattcaggagcacacaccataggacaatctcaatgcttcttgttccgggacaggctttacgagaactcaagcgacatcgacgcaggatttgccagcacacgcaaacgtcgatgcccaaccgtgggaggtgatggtaatctggcagcattggatctagtaacacctaattctttcgacaacaattactacaaaaacttaatgcaaaagaaaggactattagtaaccgatcaagttttgttcgggtccggtgcatcaactgacggcattgtgtcggaatatagcaagaaccggtcaaaattcgcggcagatttcgcaacagccatgatcaagatgggtaatatagaacctctcactggctctaatggagaaatcagaaagatatgcagctttgttaattaatacatgcatgcgataatgcattttatattgtttgttaaatttattcgttgatctctttgttgtaatgttttgtgattcttactaccaaattgtgtattatttgtttttaatatttgaataaatgccaattagttttatgattatatagtcatattttttgataattcaatccaagttacaattgctggttcaatgtggtttgggctaaaccaaccaccgaatctgtatggttttatttttagagttccaccatatattgggtgcaccatgccacatggaattcttacctaaaaaggtatctctgtttcttcaagcctgtgaaaatgcgcgaccaatgagtaaacagagcatgtgaccgaattttcgaatcgagaaaaccatcgtcttccttatttctacgtattttacggcgagcctctagtcgctcatcgtcagccccataaatttcctgaatcttctccgataacttcgtcttatatacatcgccacagaaatttcggttcctgttcgtgaattagcggtagggtttcatttgtatctccgcaacgaattttcctattgattggttcgtttggatctgagaggtattgatttcgatcgatctcaaaagggtagttgttcgtttgctcaatcgaacgagattgttattgttttctgctgtggaatagtatctggatctgtcagattaataggctagtttttacgattgagctatcggaaatgatttgatcttcatgtgtggttgatcatcgaagagtgtttcattgagactgttaatgaatattgctgtaagagaggaggaggagaatctgcttttaagcttctcgtcgtactcgtttctgggatttctcaggttctcaagtttggatttcaataagaaatctgcgtccaccgtaaaccctagatttagatgggataaggtgttctttcagataaaaggtgagaactttccgaatttaacttagttgaactgagatgggttcgtcacaaggctccacactctcggctgatgtgatgagccttgtggatacattgcctgtgcttgcaaaaacccttatcgctggaggagctgctggggcaattgctaagactgctgttgcacctttggaaaggatcaaaattctattgcaggtgattctccttggtcttgagcttattatgtttcaatggctctgactatatctaagttgtattcagattgcatctgttatgctgaaaattgggatattgatttggtgtttggtaggattttgaccatctattgatttgatactgtgctttcaataccagactagaacaaacgactttaagacccttggtgtgtcccagtcattaaagaaggtgttacaatttgatggtcctctcggattctataagtaagtatctagtggtttgactcttattttgcagcttagctctaccactttactaaattcttgtgatgtgcataactctcgcagaggaaatggggcgagtgttattcggattattccatatgccgcccttcattacatgacgtatgaagtttatcgtgactggattttggaaaaaaatcttcccttaggttctggtccaattgttgatcttgtggctggttcagctgcaggtggaacagcagttttgtgcacatatccccttgatttagctcgtactaagctagcttaccaggttggtgattttgaataccttgctctgatagaattttattgttgcttacttaactgacaaatgagcaatatctttttgtttctcctcttatgtgttgttatttgcattttaggtttctgacacaagacagagtctccgaggtggtgcgaatggattttaccgtcaacctacttattcaggcataaaagaggtgcttgcaatggcttataaagaagggggaccacgcgggctatatcgtggcataggtaaagctcataaaatttgcttgcattaatgttaaaagtgtatatcaaatcaatgtaggaagtctattcatcttagctataataaacggttggcatcaaagtaatatcaatcctataaagaatttcttagtctaatcttggttgatttagtttagttacaaattatcttaaactcttatctctgtgtgtgcacttttcctaatttggatttgaagatgattaacaaaggttggagctttcctgtgtctctgcagggccaacgctgatcgggatccttccttacgcggggcttaagttctacatatatgaggaattgaaaaggcatgttcctgaagagcatcaaaactctgttcgaatgcatctaccatgtggagctttagctggtttatttggccagaccatcacttacccattggacgttgttaggagacaaatgcaggtaaaaaaacaaacaaaccagaaacaagattcaaactatgcaccatttcagaactcagaacatattgggcgtttcgtgtgaccacaggtagagaatctgcaacctatgacgagtgaaggcaacaacaagcgttacaagaacacatttgatgggcttaacacgattgttcgaactcagggttggaaacagttgtttgctggtttaagcatcaactacattaaggtaaatcagatgaagaaacaatgaatccaatatctcagtctcggtttcacttttttcctctatgattcgtttaattgtctttatttgctagattgttccatcggttgcgattggattcacagtctatgagtcgatgaagtcatggatgcgaattccaccgcgcgagagatcaaagccagcatgagggtctttgttccttcactctcttatagaagacacagaagacagaagaaaacatgattgttagacagatttttttttccctacttcttttcattttcaaggccaatttgcccctaaaaatccttgatagtgataatattcttttgagaaattatgctaaaatttataaatctgtgatcaaatccaagcgaaagataaagttgatatctgttgttgtgcagcaaggatttggaaaatttccaattgacaattaagaaaaagtttcttagaataactcgaacttaaattgtagtattggagatttattaagtttgtaacaactttaatgatggacaatttcacatgcgtatgtgtaattgaaatgtcataaacaaccccacttcgtaacacgacctagggttataatcgtctttttgtgaacaaatccgaccgagagagagagagagatatatttttggcagtaagatcaaattttggcattggtaagttgttgttccttcttctcctcccgcaggattcgactcttcagttccttatttaatcatctcatcttctgggcaagtcctcttgttccttgctaaaatttctgggcttttttccctttgtttttcttcttagatcactctgataatttttcgttttttatttctcagaaattcgaggtttttatagggttgtggtcttagcaatggaaggaatgttgtcgtccggtgaccaacagagattagtctcttctttccttgaaatcgccgtcggacagaccgccgaaactgctcgacagttcttacaggtttgttgctcaaaactggtagatttgttttgttctaagctgtgctttttttttaaaactcaactgatagatttgtctgagtgagcttaaccttgattgagtttctgattttgggtctaaagggttatttcagcttaagaaccctatatagggtttctaaatctttcagctttgggaaaaaattctgactatgggtattcgggtttataccctagattgagattagacgcagagttttttatttatttattggtgattatcggttgatctggcttttcgtgtaacaagatctctgtgattgagagtagcctgatttggtgcatgtggtgtcacggtctccattgtgatgagattgacttggtatatttaaaattgtttgtatgatcattgttcttcttatgacttgtaacttgtaactcgttttagctgttttattatgatttatgtttagcgtagaatgttgtagtttgtgattcaccactctcctgttgatagtttgctatgatctgatcactcgtgaaattactaacgtagtagaatctttctatcaacaggcgacaagctggaaacttgaggaagctattcagctcttttacattggaaatgaaggtggtatgcttcagtctggtacacacactcagccagcgtccaacgatgatgcggctgcacagtcttgggggtaggataatgttataatttggtcactgtaaagtattattcattttggtttgttcaacctgatggttttctgttatatttcatagggcggctacaggcacaggtaatgaaatgatactgcccaacgatgtcgatgaagtccgtgctcctttacctgttgtgagggagactctttatggtgaatcaatgtattatgggttagtgtctttttcggtcactttatttattttttcttaaatccggaatgtgtctctaggttgaagatttatcctcagaggccagagctgccctctttagtttcttgactctcatgggttggttgatgtctctgctggtcttcatccaagtgtagtttttggattaactattttttcagttagcactagccactaggtaggattcttatctaggtttagttgatgctgctgttaactcaaatcagacctggttgaatatctagttggctctagtaagttgttagcagcgtcaggttctggctctgttggaatttcagctgttggggagagcatgttacaattgcttctcccaaacagccaactgaaagcccagcatagagtttagtctttcatcctcaaggcacttagaagtttcaggggccttgagattagcatttgcgaagtaaacttatccagggaagctattcattagtacataaactatataactggtagaagtgtaaccacgtgccactaaaagttttgttttcttctgtcataggcccattagagtcagcatctccgacatatttaatcatgcgacattttgtatagatatcggttattgttttatgctgatgatacactattctaacaatacattcgggatgtaactcataattcacttgcatttgtgattagggctatgagggtgggtaactctcagcctgaaccaaattctttgattgctttccgtaacttcagtgaagagccaaaaagccctggaatttgggaaccagatgagggtgattcctcagcctctgcctcagcatccgcatctgcatcagagtcagcatccgcacctcgggacagcctggcctcgttgtaccgtcctccttttcacctgatgttccagggctcttttgaacaggttatctacacagtttcttgtttggctaattgcttgtttgctttcttactctaaacttctctgtatggtttttttgttcaggcaaaaactacttcgtcttcccaggataaatggcttctcgtcaacctccaatctaccacggaattcagctctcatatggttactctctattatttccttttttttatggatgtctttaaaactctacctttgatgatagtcacatctaggggtgcgcagtctcatttttggttaggttttaggtcaattttttgtcgttttaatttctgtttcggttgagatttgttttttcagaagttataccttctatttaaaggccttttcttggaaacagcggtcttatcgcgtccttgtgtgttttggtttgggttagttaggaatgaaaactggatcggtttatcttctcttccatttggtgttttgtttcagttctgatcggtaaaatggaactgtacatccactcacatcccaactttttgtgtttctttctcatagctaaatcgagatacttgggcgaatgatgctgtttctcagactatcaaagccaacttcatcttctggcaggtttgatatagaacttcccccttaaacttccgcttgcttaatctgaaattctctttacagaattggttaaaatcctgccttttctgttactaggtctatgatgataccacggaaggaagaaaggtttgcacatactacaagctcgaatctattcccgtggtgcttgtaattgatccaaccactggtcaaagaatgagaatgtggaccggaatggttgaccctgagaatttgctagaggatttagtgccgttcatggatggtggtcctcgtgaacactttgcttctctctcaaagaagcggccaagaggcagcttctcattgactcctcattccaaacccaaaggttagttttaaaacttttccgcagcattatctttagtctgttggggaaaaagattgatctgactgacatattccgttagaggatgttgcaaaagatgaagaagaagaggaactgcaacgagcattagctgcttccttggaagataacaacatgaaagagtcttcagatgatcaatcaacaataatacctgaagaagtagcagttgaagcagttacatccgcggtcctgccaacattcccaccactgccggaagaaccaaagggaggcgatcgcagcctacaatgcagagttgggatccgtttacctaacggacaaagactccagaggaatttcctcaaaacagacacaattcaggtctgcaaatccctaagaaacaacaatggttcttgttctatatttttgtctgatattttctgatcttattgctgtctccactgtagcttctctggtcattctgctattcccagcttgaggaatcagagaggaagaagccattgaagctaacacaagcgattccaggtgaatcaaagacattggagtatgaatctaacttaaccttggagcagtctggtgttgccaattccatgatctctgctacgtgggaatgaaatatcatcatatctataaaattatctattatggtgtgtttgtttcttaaggtttatcagattagttgtttaattgtttttaaactcgacttttttttatgaaaagaagaacacattatggtatttgatttgcaatgaaatggaaaaatcgtctattatatgtgcatgttaaactcataagcttttaatctctattcatttattaatggtttttatacataacggtaactaatgactatgagcttctattagatattataatcttttaaatccctattaatttaattggattaatgttagcttatactattagatttagtttatctttttaaatctctattagtttaattacattaatgattttaagactaaactgtcactatgcttattttagaccactaacaaccagaagctgagttgttatagcagattccggtagagcgctacgcgcactagtagcgcgtgaacgtacgcttcacgaaaacccaaaaatgtccgtttcacgttttgcaacccacggagacccaaatccgaatgtctcttggagacaagtggcatctatagactatagttgtgagaaatttagattctgaaaccaaatttagaaaaattacaaaatacatgcacaatgtacagataatcatttggtaaaaatctaagcattaattgcatttattaggatattagctgtaatttacctgtttatatagaaaaatataatacattttctcagtcaacaattttttcctttcctttttttgggaaaattagtcaacaataatcataatatgtgtcatacatctgtgaacacgtgtacgaattaagagtttgattatcaatgtaaaatcttcttatttgtatttatattcacatgttaagtattctcatttactttttctaaataaaactactttaacagttatctatatatatatttagagaataatatttaatatgatattagcaatttttcagtaattaatgaaaagagtcagagttgttagcattccaattgaattgttatctatggaattggttgcatttcactttaagaaatttaattaattaattcatatttgaaaatattttatttaattaatattttattaaatatcatttctaaattataacgccaaaatctatttacccgtgtcgaacggtattaattaggattttttaccgtttttagtataagttatattaagaataattaaaacatattaaaaaagttattggaaaaatatattatacctcttgttgatacaattcctaatttttaatctaattaattatttattttaaaaaatgaattaaaaatacaaaacgttatttttttgcaagtgttaaaacgatacttattatgcaatagatgaaatacaatgattgtgattttcgtatatgaacaatagttaaagaagttatgactagaagaattttgaaatttaatacctactgatttttgtaattacaatgaggtatcgattatttcaaacgaattttttttttaatactatgtattatgagacagtgcaactataaattcggtggtgacaagaaaaataacccctgacatgcccacatttaaattattttcaaaaaattgtaatagttagttagattagttttaaacaaatcaacaagtatgacataaaatcatgtgatttaattaattttagtaatattttctagtgtgctctcatggttgtacgtaagctagtattcgaggttaaaaacaaaaaggtagaagaaaaataatgaagtctttggtagtttaaagacaaaaatcatgagttaaatggagagaaagagagaggttttgtcttgaagccatcagagagacacgagaaagactctgaggtggccccctgaccacacccgcatgtgcccacatttcaccgttttacaatgacacccaaaccgtaaacccaaacctcctttttaaaaatatttaaattgatactattttaaaaaaaaatgttttttatacctccaaaaaaaaaaaaaaaaaaaaactcaaccatgttataatttatttactagttgattttactatgctcctaaaattttactactaataataataaaaagtagaattatatatagaaaacaatttgttgtgaacaaaacaaggaaaaaataatattagatatttctataatttaaaatattaaagtggggtcaatgacaattaaatttctagagaaagatttagaatgcatttgttcaaggtgaatctcacattaaatcccattagttggttattaaataataacttctttttacaaaaaaatggatttctttcctttattagagaaaataaagaaagggactgtagctatatatatattgacctcacagaagactcaatcccaattattaaacaacaaagcaagagagagagagagagagagatagggttttttgaggtgtgtgtatttgtatatttatataaatattttagtgtggcttcttgttcttcatcctctaatattatcatcatcatctatctacttgggttctttctttgtctctgagttttagcttttttattgacctttttcttcttggtttcttctctgcatctcaaagactaaaagggtacaataaaaaaacaacttatactatgtcttctttctaaaacttacaaattaaatccaactctttggatttatatttgttctctttgttctcgtaaatgtcttctagtgaattttttttttcatgtcgtcaatctctatggcttcttcctgttcttctaattccccgctttcgttttcttctgaatcatatttgatttttatcttctctctcattttttaaaattattttttctttatggatctttgtagctttagcaaaaaccgaccagctgagaagatgtcttcatcgtacaacacaattgctttgtcctccactccgaccttcctcctctcaagtgccgctgccggacccggaccaaacaactttaaccgtcaagaggctgcgatgaccatggttcaacaacaacccacttcctccgttgctccaccacccaagaagcgaaggaaccaacccggaaacccaagcaagtacctcttacttaatttttttatgaataataagtgaagaattttccattttagccgaaaataatataagaaccctaatcatttccgataaggaaaaaattttgtttagattatataccttttattcgatcaatttaatcaaagaagattagtatttgatgtgcttgcatacaattctctcttgattaatgggttcttgatttttttttttttaattgagcagatccagatgctgaagtgatagcgttatcgccaaagacgataatggcgacgaacaggttcctatgtgaagtgtgcaacaaagggttccagagggaacagaatctgcagctccacaggaggggacacaaccttccatggaagctgaaacaaaagtccaacaaagaggtgaggaggaaggtgtacctttgtccggagccctcgtgcgtccaccatgaccccgcacgtgctctcggagacctcaccggaatcaagaagcattactatcggaagcacggtgagaaaaagtggaagtgcgataagtgctctaagcgttacgctgttcaatctgattggaaagctcactctaagacctgtggtaccaaagagtatcgatgtgactgtggtaccatcttctctaggtaaactatctttcttcattccattccggactcttttttttttttttactgcggattttacatgtcggctctagatttttaaggttagtactctacgcttctgcttgagattcaagtaaaaaaaaaaacatgtcggtcagtgaatagtaaatttttaactatagtagtactggagtgtggtaccctcttatatatatatatattgacttgtgactgaaatctatgcatatagatatagatatcttctatattggccacggaacatcatatttcctacatagggacatgaacaaatatgcatatatacacataggatctatcaatctatttgtttggttgctgatgagtagtgaaagagagaaagacagtgaaggagaaaggggaaaaattaaagatgccaaatttggtcacatgtgagttggatttgtttccattcattcccacttttggattcttcttatctttgcaggttcctctttccatgtaactcctcttcttgtgggcccattccatttctctctccataatattcatattgatttcagacttatatatgtgatttgtgtataagagtggttggtttcattgtttaatcgatgaacatggtggtcagcgtgatatagtaggagtagttgatgaacactttacatttctagggtttttttaatgtcttctttttcgtggttgtacatacattgaccttatcgtgatttacagttttaaattatttgtgtgattgtaggagagacagttacatcacccacagggcattctgtgatgcactcatacaggagtcagcaagaaaccccaccgtgagcttcacggcaatggcagctggtggtggtggtggcgccagacatggcttttacggcggagcttcttccgctctctctcacaaccatttcggtaacaatccaaattccggtttcacccctctagctgctgcaggctacaatctgaaccgttcatcttccgacaagttcgaagacttcgttcctcaggccaccaaccctaatcccggtccgaccaacttcctcatgcaatgctctccgaaccaaggactgttagcccagaacaatcagagtctcatgaaccatcatggtctgatcagcctcggtgataacaacaacaacaaccacaactttttcaacctcgcatactttcaagacaccaagaattctgatcagacaggtgttccttctctgttcaccaatggtgctgataacaacggcccatctgctttgcttagagggctaacttcttcatcttcgtcaagtgtggtcgttaatgactttggagattgtgatcatggaaaccttcaaggactcatgaactctctagctgcgacaacagatcaacaaggccggtcccctagccttttcgaccttcatttcgcaaacaatcttagcatgggtggctcggataggttgactttggactttcttggtgttaatggaggaattgtgagcaccgtcaatggccgtggtggtcgtagtggtggacctcctctggatgctgagatgaagttttcacacccaaatcatccatatggcaaagcttgagatgatcgttatctatctacaaatcatccaaatcatcatcatctagatatgctattaagttccttggagattttattctagataaagctagatatccaaatttaagctttctttcttttgctgttttcgactattaagggtaaggattgagctttgggatttttcattataaatttcttaagctcttatttttttcttaatgtcatggtgggaggctctagagtttttccttaataatatattgtaatcttgaatcataaatatatttcatgaaaagtaatttgttcactaattaaacaataccatgtataaatatttaatacctaatctcagagtcggtttttgatctactgagaatcgaacctccgatcggtatcagtagaaacaatccgttttaccagttgttctaccttatctttgtgaactattagtttctttatatgctatatattgtgaacctttgatattaatttttatttgggcttaacagagccgcggcggccctgcccaatacatattttgggttaaatgaacaataaaatttacccgataactatatgaaattcctcggtatctaattttatttgtttgggctcagagccggccttgcccaatacacttttttggttaaaggttaaacaatctattttaccaactattctatcgtatacgtgcaaaatattaactcctcgatatatactgcgaatatccgatatcaaattttatctatttaggtttaaaattggctccgtccaatacatattttgggttagatgttaaaacaatccgttttattagataattctattatatgtgtgaaagttttttaaatatgatatatattgtgaatttctgatatcaaattttatttgtttggtattaaagctggctctgtccaatacaataatttaggttaaattttaatttcattgaagaaacataacttcaataaatattgagggttaccagatacatttgcatgtattatgtgaagtttagaagaagaaaaaaacattttagccatatactctatttgaggaaagatattagaaaactccaacatgcatgcagatatttattaattatttatggcataacaaataattaatttcttgttaaaatttgattcatatatgaattatatatcccacgttgcacatgcaagttatgagcagatttcaagtgatacctgtctacaataatacgtcaacggatcggataatattccaacaaaagcataatacaaacagaagcatccaacattccaaaattattcaaattggtgtcgtaatcccatatttagaatatatatatatatatatatatatattatatatatatatataataggtaatgttattaatgtcaatttaatatgtacgtattaccatatagtatatacaataaaaagatgttcggtcacctaatacaaaataaccgagtaggcaaatattacgtattcatagtagctaagtatttgaatttttacgtactatgaaccgtcgtcaaactttctttaacttaaaaagcaaaacggtgttgacattccgaagacaccccttttattttttgtcgtcaaggtagttagttatttcataatagaactagtgatacaaacatcgaagacataagttaactctgtttttttggtctttattgttactttccgacgttgactccacctactaaattttctgtgtcttcgatccaacttttccgcatcgtgtatatatatgtaaacgaaatagtgtatccatgatttttattgaaagggttatgagaacttctatatatatattattaaccctaacgacgctaaaaagatagtttttcttccctattttatgtaaaccatcacaatgtttagttaatcatcaaacatgtgatcttaccaaaaaaaaatgatgcacaagtgatcaaataaaatataatttatacatattcgacatacaaacataaaacataacttatatacatatgaatgataaagatacgttcaaactattaaaaatatcaaataagagagaaaaagaagaagaaaaaaaggaggaaaaagcatgtgcatggtagtcttgtcgttgacgtgaaggattaaaatatgcccgtgaacaaaatattatcgagaaaaattgatgaatactgcgaatgctttgggatatcttcttcttctttctcgttggtccacttcatttattggcaatcttcaattgggccccctattcataatctgcatactcacatatacaatatctcgggggtagggtttatctcggtacccattctattatttttacagaatttagtgatggggcagcactgacgaattaaacttttaaaccatcaactttctattgttcaaagaagaactggaaatgactggcgacggaattcacatgttttctatataaaaatctgtcgtttcagataaaacgttttgtggtaatatcgatttaaatgttaacaacatattttcacgtgtgattgaatcaaactatcgagacaagactggtcatgaaatagatgatgctccaacaggaatagaaatagcccatgtttttacaaataataaaatatttcaaaaaacaggaagagaaaaactttctcttcttagtgcggatttgcttctatttttgttatagttactatattttttttcatttaacaattaaatactcaattttgtattacagtacgtagccctataatgaaaaaaggagtaaaccaaatactatttatgcgagttcttctatttttagtttttttcttcttctgcattacaccttttcatgtgcaatggattacttaattaagttttaattaattactgctgtccttattgctagataataatatataagatgtagtactccctctctatttcttttcgtacatagtatctgttagaggttttttcttatttcatcttatctagctagatatgctcaagcaatccttgtctcgagagcactcatttcctcaattttaaagtttacgttggtcaaattgtcagttcattaaaataaaataaaaatcggaaaaaaaaatcttagaattttaatttataattattttaggtctggaattgctagttatttagacattgattgatcgacaaagcatattatcctaatttctcaaacatactgtcatatttaaatttaaatttagtttggcttcattttttaaatcagttggatgaaatcgtttagatcatatatataacacatatatacgtttttacgaccggagattctagactgaaatgttgacgaatattcttataacaatatggaatttctagtaatacgaaaatgtatctaataaatagtcgatatttatctctgacaagaaaacaataactattatattccgcaatagttgcatacttctgtttatcattattttctgttataatggtttttagtattccacgcaaacaagcaaatttcctaatgtaatgtaaaatattccatgaaaggaaagccacaattatatacgttttggtacttggaagacagatcaatgttgattgtgaaacaggattattaattctagaccgttaaatttaactttgatggggacaagacaaccctcgtggatatgctagaacagtattacaaagacatcgatacatatacgaatatggcaatatatttattaatcatataaaatgtgaatagttttttatagagaggtatcacacagaacaaagacaaacactcgtgacatagccagctagcgtccgtaaatttgacaaatgaaaataaattcagcgagtaaggaaaaaggtaaataaataaaaatctaaaacacacgcacacactaaaaaagctgccattactctctcaaactaattcactgccctaggaggcaatgatatggctataaatgtgattgccaaaaaagttatcagctttctaaagaaaatagttagatatccaaaatagatcaatgacatttccctttaatcaatcgttttacttagtaattacaggaattacctgatatggtattaatcttattaaatagtaaaaaaaattaacgcagaaacagaaacatatttcaaacagtagttcagaacattaagatgagtttttttcttcttcttaaaatagcatttttatttccattttaaaagaataataattaacagacaaatttggcaaaaaaaactgttgacaattggggactagtataagctacgtacgaacactatacactattgaactttattactataatatcgtgaaagagtttgtattttacctaaataaataatagttttgatcaattaagtaactacaattgataaagcaattaacttcagtgtgagggttacaagtggtatttgcaacgataatctgaagagacaaggaaaggagccaccttcgccgccggaattgataaggtctgccaaagacgaagatctggagttgtggctgttgaaatggcaacacttgttgaagacgacaaaacgtgtcacgcatgatcttgttgatgatactaactagggctctgctcctgcatcatcaagaatccggaggcgttcgcgtctgcgttcataacagccgcgatgaggtcatatgaggatccagacgacacaagtcacgttgtcgatgttctttgggtcggggaactcatttgggatataataaccaattaaccatgttgcaagtttttttttttttttttgtatgtaggataagttatgagtcgcactttctcgagccaacgcgcacagagcgctctctgtctgtgatgtcatctactaatatatatctttttcaccttttgttaaattggctttcactatatatacacaagatgcaggatataacgtcaagacaaagagatgcttatcatttctagtagctatagttagattccttgtcattatggcatcttgaaatgtaggtagaattgtcatacaatctagtataatggtttatatatatatatatatatatatataaaatcaacaacttaacgagtgcctatattacaaaaaattggtagactaatccaaggtaggcggagaaagtttcagaataagacagagaacaattgtccaagggatattttggatgtctatctacttcaaaagaccatggcattcattaaatgtaactggaatgtatttattgaatgaggtttttttttgctgttcaccgtattgaatgaagttcatttatatgacaagtacacacacaaatattctagccaatatttattttaagacggattgatatgaaccaattttagcataagttaatacaactatgcacatacgactcttctctagatattagtatatgatttaataagcagtatttctgtatttgaattgcccccatacaaaaattatatcagagatattcaaaacaaatttgcaggaaagatataattctatgacataaaattagggcggtgtctccaaggcaaaatagaaaatactctttggttaaaagtttataatatgaatctgtgtatatatattcagtcacattcatgcaaaagaaaagagtaatgatcccagtgaggtctcggaatgcacgtgaggggtcatggtgggcgcacgtggactctggactataaaaacagtttcctcttcacttatttgttagtagactttttgtatcagcttccatggaaggttatgtcctcttctatgaagctgtagattctgctctctttttataacattgctattttttttattttattttgtaaataaaactatatcacttcgtgtaataaaaccaaaaagtgtgaaaacaactcgttaattagtagcttttgatgatacgtgaaagaaccgaaattaataaatgatgtatgatatacaaaaagagaagtttatttatgtgacttttgttttggtcgaaaatttatgtgacttaataggaaacaaactgagagagagagagaataataagggagctaggttgagaaatatagaaatccaagacacatactataaatagaggatatatacaggaaatatagtatgcctgtgtagaaagaatggattctacttcaggtatacttcgactatttggctagatgcgtcaaatgattggccaaattttttagaagttcacctaacacatcaatttaaaaaaaaaaaaaaaaattagcccaatttgacccagaaaaagaaatactttttaagttatgtaatttcggccaattttgttgttaccggatttgctattgagttgcaaagtgaaattaaaccctacaagaggcccatctaagatgaggtttatttaacccactatattgtaatgcaatgaagaggacaagtttactggagctatttgggcctaactttagctttcctgtaacatctatggcctgttataaattatataaactaatttccattgagatttcaaaattatcaccaaaaaagccgtgtgttcgtgttttttttaccccttcaaaaattcgattttctctttctttctagaaaaatcatcaagaatctcatgtacaaaaagtgtcacacttttcagtcttgagattctcctggtggatcactctcttcatcatcctccacagattcatcatagcgtcgaagagaatcaagactgaaaaaaccaacaaaaaaaggttcatggattcgtctcgaatcgatgatagtgaccgtaaattcataggaagtgtagttgaagagtacctgcaattctgagggactttccaggagaaaccagaagattgttttagatgaagtggtaaagacatgaaatctttccaatcttgaagcatgattctgagatcatgaagcttactctccataccgtagcagcaattggcatgcattgtacgaaccaagttcagatctctgctaggctcacataaaccgccgaaataagcagtgttcaagaatctcatctttaacccaatccggaaaacaaaaggttctgccttgagaaagttaagcacatcctgatcatgatatcccgggaatctgagtcttgaagcataccagtatttgtagaaaagtatagttcgattgttggaccgcacaaagttaaaccctccgtttggtctattatgtaggtcgtttgatcttccgaggtaatgatcgcaagcaatctggaaatctgcatacatgtaaaaccgtggaaacgggttcctgaaccacatcacatcagcatcctggagaaaaaggaaaaacgaaccagaacactgagtttcacacaagtctttcatcagttccctatgctagtacctaagtaaatatgaagatgctggaactttaccgtgaaaacaaaattgtatcccatctcgagaacagaccttaggagatcaatccttctccacatcatcttcaagtaagaccgagtcataaaataagcttctctggaaaaatcaactccttccgtaacaagactgaaacaatgcttatgcagttctaagcaacgcgaataagccttagcatccaatgcaacaatcaccaaatgatccaagatttgactagtttcttccccaattctaaaactctcaaagaagagatcaataacagatcctggagctgcccatgctgcattcaaagttgtcaaaacaactgtcctgtctctcgttgcagctttactcagaacatcttctagcttaggttcctcattatcctatcataagcaaacaaattcagcatttgaatatgcattcacaaaacttgtagcttcacaatgatactcattggttccaaattcataataatcaaaatatgagaaaatcgcagataacataaatcgcagtaacacttagctagttcataagaacaatccacatgcaatctctaagcaccagaactagctatgttatttcaaatttcacagcaatttcaatcgaacctaaaatctctaaatcgtgcgtttaataacgacgagcatcaaattcgcgaagaacttgtggtgaagagaagagaagactaaccagataagaagagagatcgaaaatgggaggggagaaagacaaggaatcagcggctctgtaaaggacgaagcaggagatggagatggcagctagaaatagagcagctcggcggagcgggattgatggtcccggagacatctcgccggaaccctcggcgaagggattattagctgaagacgaagcctcgaggctcgccgtgtggaatctcgaaccgacacggtgagatagattcatcaccaccgaccatcgtcacttacgatcaacgttaggattttgcccaataattttaatttctattattaatcatcaatttttgcaaacataaacggttacaaatttaatgtgttccataaattatacacccactacaaaacgctgcgtgtaaggaggatcaaaacgctgcgtgtaaggaggatcaaaacgctgcgtttgaaggtatccttttcctttccacttcatattaaagcacagactaatctccgcataaaacattaatttctcatccaacaagtactaatctccctctaacatatcataacatctgattacataagaaggccaacataaataataaagttcataactagtcgaattacttttttgctcaaatggtttgaacctttcagtcttgttaataaatccgatgtaattgtgacattgtagacagccaaaaaaaaaaacatcacaatcacaaatcaagaggcctaactaaaagattaggaacttttaaggtggtttaaaaacaatctaaatgttcactacgctaaaatttagaacaaaggaacaaagctgaacaaagcttcagctatggagtagagaaaaggagagattaagattaagatcaatcttcgaagaagcaaaacaatctctgaagatgaatggaccagaagaagatgagactgcttcgcttgtttcactgagtgatgatgaagcattgcttttccatctttgttgatggttatgaggatgattcaacgacagagacagcgataactcttcttcttcttcgtgttcgttttctcgccatgtgtttttccaaatgttcttcgtgttctcagcctaaattccaaagacataataagctcttataaattagagactataggttatactcttcttggtcaatatataaatttgagaatgtccgtgagaacataagattagtatttgtaataaatctactaattcttctacattaatcaacggattcaacaattctaattgtctatagattatagtatatctaaaatcaatgaattaacctaatcaaaacaattatgtactccttcaaatataggtggtgattttattttactaatgattttatcaactcttttacccatacaatgggttagttgtttatccaaattataaattattttactaatgaattatattagtgcttactacttaagaatttattgtgacaataaaatctctatctgaaaattttcagtaccgagccccatgctaccctagtgttgacccataccataacaatgttcagtggtttagtgagtgtttatctgagtcttaaatatttttattattgatatcaacttttcgcaacggctatttatgaaaccatatgataaaattgaatatatttaatacctcgagagagtgatgagactgaaatttgatggactcgccattgcctgcaaatgtcttcgttctctccatgttcatgatgttaagaaagtcatcgtcatcattatcagtcgctgaagtctgctctcttctcccccaaaaaaaaaaaaaaaatctttaaattcgacaattcatattcaaacaaaactgtatgataacatacctattttctggaataaaattaaaacacttgtcagaaacaaattaatattccctttccgttttttgccaaggaaataatttttttttttacctaaagttaaaagagtgaaaacccaaaagacaatcattccttgcgtgtacagacaagttgtcatgaagatgatcttcttcattgtcttgtcttcttcttcttcttgaagatggtgaagaactctcttctgtcccccaaaaaatatattataaaaacattaattaatttatgaccatgatgaatattctcttcactctttggtaggagtatttttgtttttggcaataaattaaaagaagcacttatttacctataagtctataaccaaattctttttcatttttttttgttaatctctctatccttgttttaataaatactttacattatttgaatatttctgacaatggtgggagtgagatttcaatttatgcattattacagattttatgtgaatggtgggtatatgaaaagaaatgtcctaatcttgaaactatgacgtttgagagtgtaattcgttgatgcctcctcatataaacaacaaaatatgtagaactcattacctggttttccaagaagagtgattctggatcccctatacatctgcagtataatcaaaacaatgaaaaaacgttttaaaaatattcaaattaataaaagataaaggtggaaagagcagtgtgatgtatacgaataaacagtacaagacaataaatagtattaaaaaagtatttttttagcattttctttgacctggagatggctcttgacgtgtgatatggttagtcccttgacatccattatcttcagaacaagttttggagttgcttctgtttcattcaaacacaaaaatacaaaacatttaaaaactggactatggcgataatgaatattggtatatattgcgattttatataactgcccaagtaaaagctacaaaaaccgaacttaaagatatctaaaaaaaataccaaaaaaaagagattggttaaatagactgactatattgaccgccgagcaaatcaacggcgtgaacgaaactccggtgaagctccggcgtccatctcagacgaggcaccggagatcgtacgtatggtcttactccaccaattactccgtcgttgcttcttccacacctacccattcgaaaaccctaattcttttgatcttgatttcttgaaagaaaaagaaaacgttttttttttttgccttctgtagaggaagaaagatgttgaagaagaagaacactaagggaggattgtgattttgtgagtgaaggttaaagatataaaaggacaaaaggtttctgtttttatagaggataaatgtttcttttcccctactatttattctcctttgtctctttttggaagaactcgtgcttatatgtgtgtgtatatgtatgtcagtgtgtgtatatattagagaagctaaagaaaaatcttaactcaagaaattaattgtgtgatgtgataacataagtaattcttggacgagaaagaagaaagatgataatattttaattattttataattagtaaccagctggaatgttgttatacttttatatagtttgaggtgacatgtgtttttgacctaacagaataaaatatattcaacacaaatttatcatccatttgactttccatgcattagtagaaaatagctctacaagaatcttttcgagttttggttggtatccataatacatggaccactcccgtcgaagaaacgtcattaaccagagaaagagaaacaataaagaggttaaaatattgaagcattatttcattaattaatcaccgtttatctttacaaaaatcagatgaaagttgtatgctttaaaaattacatataaatatgtgaaactttatgattatctatcatctttacttaatctcgacagccactaaaatatcatccagcaccaaatttgtattaagatatggactactttgtagaagaatctcatatttgcttttggtttgttttgtccaatcctaattgcttacaagaattaccttattgggatttgggatttacccaaatgaagaagtttcctctaggcgtcacacttttttcatcataggttatttagaccaaattaaaataaataaaaataagaaaaatgaaaaatagcccaactgctaagctttgaccttaggatcatcattccattctttttttagtttccttgttttaaaaaaaatcttgtttctgggatttcgtgttatgtaattatttactttctgattattagaaagtcatattaatggtccttcgtacgtatttgaaccaaccttttgacttcattcccctaatttcctttttgcattttcgtccatttccaattcattccttttctttttgttcttctctaatacttacacgcaatttctgaaaagaattttttgtaatgataatgcattacacatgcccctatgcttctgcttctttccagtttgtcctcttactttttgatatctttctgatttcttgctgcgtattgaaaacaaatcaaaatcatttccctatgtggtagcccattaaaattactggctcgggattcttgatacttttaaaaatataaatctcttcaaaattcgaattacaatttgaaaaatataaccatatatatatacatatcacaaaagaagcatttcatccacatatggataatccaatccataatacattataccatgatgtaaccttccagaaataccggcaaaaaaaaaaaacattccagaaatattgaactcaggtaatcttcattgtttgagtttaaccttagatctaggtaatatcttctagtgatctggtcatctggctaactattaaagttaaaatgcttccacaaaacgataatatttttaacgctacattgctatacaaactttgtggacaacatacgaagacaataagctattaagcgtatggtcttagccatttgtgaaatgtgtcgagatcacttatacccaaatgtttcctatctcctaaatatagtttggatcccacaatattatatataaattaaattcaaaataaaagaatatgaagtacaaaaaaaaattacaaaaaaaaggaagaaaaaaacgtaggaagttgcttaaagcaggagggtgggacgtaaatgtcgtcgatgacgaaatggacaaatgtgtatgtaagtagtacgcatagtcatcttcttgaccataacccatgtttcgtttgtcttggttacatttcatgcatctatgcttttgtagaaaaatatatgcaagcaaatattatatggtttcaaaaatgattagtctttgcggttgaaataatacaataactatttcactcatattaattacccttcggaaatgttaataccgtttatcaaaatcacattattgttttatcaaaaaaatcacattattgaaaattcacaaaatagtagtacaactatttggagcggaacatcatttttgaagtaaacaaaataggtacatttttgcggtaaccgtactaaagttggtatgtctcatttatttcacaccatcaataagaaaaatgtaccattcataccttatttccaactgtgttccatttcgatgctacatattcaacaaaaatacatatgcaagaattccaacaaaaccgaccaaaatgagaaagttgcatacataacattctaaaaatctaaccaagccgtaatactaaaatcaactggaggttacgtgatacgtacaaagtggacctttttaccccatacgaacaaatcacgaagcctaatgttattagaaaatgtcaaggtgatgttattgaccttcaatataaagactacaatacataacacacgttttaattttagtcactttgcccctaaagctagccaaagtttagtatataaaaaaaaaaaaagtttagtatatatacacatataaacataaatcataaattatacatacaatacacatgtgacgtgtgcattatgttctgcctttgtttttaagaaaatacgaagaccatcttggttaaaatttgattatgaatctgattggttaataagtttatactgatcagtgaactgaacgtacctaaagcaatttattacatacgaagttggtaagggcgaaacggtggctacatgccgcgacattagttttgttttctgaaataaattttatgaaaacgaataatgaaaaaatcaaacaattcattgaatcgccaaatagatccaaaagaaatttattgtgaaattgactgcaggtccatgattcatggcttttactacaatcaaacattcaatgagtttcttcgactgatgtttatttctgtgtgtaagatatataatacatacattgacaatatatgattcttgaaaaagagggtttggattatcataacggctaaattctattttgatttcagaaaattctcaccgaaccatttgaccattacatgtattattttatttaagcgttattttctcccctcacactttaattgatttcaatcatagcacatgcacaaactatacaaattatataatatagtaaaaggtgtaatcaaccaagagagaaaaacacctagagagggtttgtttaaaagtctaatttgtgaatagatgggccaccaaaataacatatttaatactaactgttcttctcaaaacgatctaatttaaaactttatgccaaagaataggttattagtcaatatattacaatgatatgtggtcatatgaaaaagattttgggaataagaaccaaacaaccattgacttttcattcctcaaaacattggaagtatgtttgctatatgtttttttcttcttctcatcaaatggttaaaaatcaaccttctaatacttttccccaagtatataagatgaactaaattggagaaacattaatttcggcttaaacactaaacactaaactcgaagagattatgtgaacggtgaaactaaatttgtcaatgattcaacacttgaaaagattgcatggagaatttgtatcatacgtttgaatttgaggatatgacacattgagcgtaagttaagagcttcctgtccaaatatatcaaaaaggggaaatcataacatgttgaaaaactcaagagaaagtttaggtttttagaggcagcacacacatggttgtaatcataacaagtagagacaattgaagaatatcacaagtttgattgtgtagtagattgtaatggcaggtgagaagaagaaggaggagagggacataaagagaataattctccctttacaggctttctaaatgttctcttatccaccaatccataattacgtttttttgcagaatcttcatacacggccggtccattgtttatggaaaccagcacaaagcttaaaatacgtgccagtccaaagttataacttcttttgctagagttctggacggggaatgagagtatgctgtatgcattatagttctatatattttacgaaatgtacaacattgtacaagttcatgggaatttgcttaaattttaagatcaagaagaatctagataaagggaatgagagagtacatatcaaagttgatatatacaaagccaatttggagtcctgaccagcctaataattaaccttttaccaaacaaatcgattatcacaaaagagaaaatcagacacctacctaatgttccagggaaaagcagtaatgaggtataatgggcattaagaattatgtctatcagaatgagaatcattacatcaaagaatgaaaccgatcgagaccaaatatgtagatgataacactgaggaaatgaaaaggctgcggcaaagtaatcgtgggtccaactcatacttattcaaattattgaaatcagatcatatgtttgaggaaaagaaaaacataaaccaaaaggagatacttttctcatctagattgaataagtggatagatatatattgatacgctccggatacaaacatttggctttgattttactaactctaataccttttgctttaatttctcttgatcatatgtatgacacacaagcgaggctctaagctaagtgcaacaataaacaaagaacaattaagttgttcatgttgaccaaaacaaatggtgtttgggaataatctcttcaaaactaatatcaacagtcttcttttcagagatgtagtaaaaatagtgttataactcaaaactagttcacaataacatcatcagacatagtttcttaacctgaaatatttcatttgttggccttcgcagatagaaactgtgactctctgtgtctcagttcttcagttccatttattgatttcctgaattgcttgtttctgcagcaagacgagcactttccttctcaaagaaatcgaattcttggagtatcttagcaagcttgtttgcgttgtcttcttttatattcgcagggaccttctcttcgtaagtagacacactcatcatcttctgcaacttctctttttgtctgatgaaacaagaaataaaaatgtcaaaggaggaaatctcaggaaactaacatgagattcaagcatcttgttttgattcagtgacgggtctaaggacttacttttgtagttcaccaatcttgtttctgattttttcttgttcagcttctgtgttaatggctccgtccacttcaagatatactttgaggttctcgttcaccgtctcaactgaagatccaggtggtgctgcatgttgtccttttgacacaacctataccaaagccccatagaaactcagaaatgatacacgaaacaatagataaaccgtaagacataaattgaagatagaatttacctctaaggatgatagatttgcaagggttctgatctccaactcgtgagacttaacaatttcagatgttacgttgttttcacacagagcaaaagcaggtaacctgagaaaaatgaataaaactattaagtaacctttttagtgagattcattttaaaaaaatgcaggatggttaatgaaatgtctcaaagtgttcctcgaatggggctttaatcatatactcagacctttcgtttttctgtttctccagcaaccctgccctgagtgctctcatgcatttcacagttgccagaacggtgtccatttcgctctccactttctcatttgaccagttctgggttcacagcatcagaataaaagagttataaacgtgaacaattatgacaagttacaaggaaaatccgaaaatcttactcacctctatggcagatgggtagtcacatatcatgatagaagcctttctttctgtgtctttgggtgcgggaagtcgttgccatagctcttcagtaacaaaaggcataaatgggtgaagcagtctcaaaccagtctccagacttatccagagagcatgttgtgcatgagccctctctgaagcaaacgttgggttgtcaccagcaaaataaggcttaattgcttcaatgtacacatcacagaattggtattgccaccatgcatatattgtgttggctgcatccgagaactcaaatgcatctagtgacaccactgtctttgatattgccttatttagaacagagagaatccattggcagctgaaaggcatggtttcaggacttagagtctgcggaggagtataaccatcgccaagcttcatcattgcaaatctgacggcgttccacagtttattacaccattgacggtaaccaacaactcgaagaatgtccaagttaattttatcagactagaaaagaatcaagaaacgcaatttttagtttatagaacatacacagaaggagcttgttagggacggtgcaatggatagtacctgagcagtgtaagagacgagcgcaaaccgaagagcgtcagtgccacattcagggataccatttggaaagtccttcacttgtccttctttggcaacaatcacctcttttggatccaagttaccctcttctaatctcttatgaagaccttcaagagttactccgtttattacttcaagtggatcaatgacatttccaagagattttgacattttacgcccatgtgcatcacgtatcataggatggaaataaacctatagcaaagacataaaatatgttttttgcatataagtaccggtcacagtgatacttgcatctaaaaggaggtgtgatccttgtttgacttaaaatgtacatgtaccttactgaatggaacctcaccacctagtttcattcccatcataaccatacgagcaacccaaaaaaagaggatatcatgtccagtttcaagaacagaagttggatagaaggctttgaagtcatcggttacatctggccatcccagaacagataatggaaagagcccagaagaaaaccatgtatcaagtacatcaggatctcgagtgagttcaaacttcttccccaaaaatttctgagcagcctcttctcgagcatcgtcctcagttctagcaacaacccaatggtcactgtatgcaccaacctccttgagctgatcctcctctagagtggcataccatgctggtattctgtgtccccaccaaagctgtcttgaaatacaccagtcacgtatgttctctagccatctgtaaggtaaagattgttaatagatggtgtaatgacatcttaaaccgccatcgcagcttatccatacagctgtgctgtaagagcttctatagatggggtagattaagaaaccattatagagtaaaagataaatgaaagaaaccttctccattctgctgtgtactgctttggtacaaactcgagtttcttgttttcatcagtgatagcaacatcaagagcctcctttccaatcatgctgcagttaacgtaccattgaggctttatcataggctcaataacatcattagttcttgagcaaagtccaagcctcatttcattgtttttggcacctctgtacagcccctgaataatatattgacaaaacagttaaaatctacaagacacttacaagcaactacccatagtgtaacaaaaattctcaaaccaacaatcaaagaaaaattatatatgttatgtgaagagttagagaaagttacctgcttctgcagagcttcaacaactgcctcacgagctgcaaagcgtggcatccctgcgaagtcagacccaccatttgtgttgatttttccatcatctgtgaatatatttataaattccagcttgtggcgctttccaacctcacagtcattgggatcatgggcaggagtaatctacaaaataagaattaagtaactttgacacaagaaacacaactaataggggcagaaacccagcatcaaatatataaggtagaggtataccttaacacaaccagtaccaaaatttggatcaacaagtattccatcacagataataggtaacttccgcccattaaatgggtgcacagcaaatttcccatgaagatgcttgtatcttgcatcatcaggatgaatagcaatagcagtatccccaagcatcgtttccaccctggtagtggcaacaattacctctcccaagcctccctccagagggtaagcaaacgaggtaagaagaccaaattctactggcttctcatagccaggaacttttagtagcgttttttctttaatgtcgatatactcaacctacagatattagacactccacataaacaggatgccctccaacaatcttagtctaacagttgctgctgacttacctcaacatcagatatggctgttctcaaaatacaatcccaattaacaagccgaatatccctgcagaagccatggtataccttcagtcaaatgttctttcttacaacaagataactgaaaaaggtaaaatggtcctataatcctaatttcggtatattactgtttccatctacaggaattctatagcttgcatcaaagaacaaagtcagacttaaacatacctatatataagcccttctttgtataaccgtacaaaggcctcagtgacagcttttgatctttgctcgtccattgtaaaacactataaatttacaggccgaaacacatccgtaagatggatagcccagggacacaagtgaagataaaaaatatcatttacatatatgttcacctagtggcgaaataaataaaacagccaattttctataacatttatccaagaaaggtcaaattactggatattacctcacgagaccagtcgagagaagctcctagtcgccgtagctgtgttagaattgtaccgccgtactggttcttccacttccacaccttttccatgatcacaagcaaaacaagaatttttgtataatgaaaaaaggaaactattcatcaacatattttaaattttcaactcacttcctttacgaattcttcacggccaacatcatgcctagtcatgcctctatcacgcatgatctttttctcgaccaccacctagaatgtacatccaagtaaaaaaaaaatatacaatgtgtataagataaagctacaagcctgtagcccaacgaggattcactctataggctgaaacttcaactaatatgggagatgagattggggctcacctgtgtagctataccagcatggtcaaccccgggtacccacaaagcattatacccagacattctcttccaacgaataattgtatcctgcatcaacaagtattaagccgttgatcatcgggaggaacaatagacagctatagcaccaaacaatatgctaatgaaacctcaattgcagatgtaagcgcatggccaatatgcaaggctccagtcacatttggaggaggaagaacctgcagaatcaatcaaaggattaaagaaactttaaaaatagtattaataatttcagaagctcaagattttctcaactcaatttggttttcacaaattaagtattcgagaagacaataaaaagaaggtcgaatccagaacgagcatgaatttaagaatcggattaggccttacaattacaaaaggtggcttggaactcttagcatccgccttaaaaaggtcagatttctcccaccaagcataccatctgacccaattacagaataacagagattatctagaggaacttcttgggataaatgtcaaagaaaaagatctacacacttacgatttctccacggtagcagggctgtattgtttggccatctgtgaagaaagccttttcctctctccaagaggagtttcagggtccacaaaatcctcaggattctcttctgacgcatcccgtttggaactcttctttgcgctctttttagggacattagttccatctttggcctgttttgcctacacgagaagcacaccatgataaatatttcaagttacagggaaaattaaggatttggctggcacattacacatacatatgaagcaggaacccgaaatgaataattggagttcctcagagcttaccttcagttcagccagcctctctttctccaaagctttttgcttcttcaactccttttctttagcctatgaataaattacaattgaattcgaacaaaatataatgaaattaatgagattgaaaaaatcaaaattgagtcaatattttacttaaaactaactcccaccacacaaagaaaaatgaaatgtaaggcgtattcaaaagtatacaactctaaaacaacaccaaaagaaacacaaactatgattatacgaatttgtgccaagtactcaaactattaaatgtagaacacttcttcattctgatatagtgaagacggtttctcaaacttttctatcttaaaaataacaatacgatctcatcagttccattttccaaatgggtaatccatagttatcactatccaatctctattagctagtcccatgattgaacaataaactcaatcacactcgtctatgagattctagatatcaaaattgttaaaatcaagctcaaagagaacagcacaaccacgttgaatcgactccagaaaacgtttctgagaaaaatggggaaaaaaatcacaagtcaaaccttctcttccttcttctttttccgctcaagctcctcctctgtcaggatcttcttctctgattccgactacgaaattcagaaaacaaacattcaattctcagacttaaacaaatagcagcagaatttcgaaatccggtgggtaatcctaacggagaaacaaacaatcggtgattacaaaatcgtaccattgttctggaaccgtgaaacgaacgaactagctgattcgtaagcgtcggagataagaagctggagcgagaatgagtagctgaacaacaagatacaaataacggcttggctcttcttaggaagagtagtgacatagacaaaaaacctgctagggctaattgaaatgctccttttttttaacactatacaaaaaacatttttaattttaaaaattagaaattaaaccggaaaaaattagagatttgggttacaagttgggtatttcgttttaagcccagtgggcttggaattacgacggtcaatactcaatatatatttcaagctgttctcgaatcaacgagtgtgtgatttcttatcaagatacgtaatataatatctatcggagagatgtataaaaaaaggttgagaaagaagccacaactacattcaactacgtacttcagatcaactgtcaacaaaaatttccttcacgtcacaaccagagacatggttttgtttggttattacattgaccttctcacactgtctaataccagagagatgacattgatggagaagaagggatgaaaataggagtttttgtggtgtgagtggctcagctaatgatcatcttgttgaagaattcagcttgctcagggaagaattccaagagctcgtctttggttacccacacaaaatcctcgcagttgcttatgtcgtatttcgatgctgctactacactgcatttgaagaagaacctctacacaacaacaaaattcagtttagaaatcttgagcttctgaaattactaatactagtaaaaccccgttaacgttcgttcttgccttgtaagatggcaaatcaggcatttcttctgtaggttgtatggccatgtgagccattggagcatttccaacaaagtatgtgtgagtgaggtctcctacgactgacttcaaagcagattccgcgcactgcaaataccgaatttacatattaacaataagcacatgaatgaaattttatggtcttgtgtgttgaaatagaggcatcaaatcaaacaaacaccttgcgaagagttggctcagaatcatagactttctctgggaagtgccaaacaggtttgtcactagtagctccaaatggcttgccgaatatgagaagatacaactttttgtctagggctctatataatgacctataatagcagcattttcccaaaagtaactatcaatcatcaaccgaagagaaatacaacaggccaggaagctttaagaggtgccaacaacttacttcctatcgttattcttgtcagcctctgtaattctaggagcaggtacatagtccatttggtattcacccttggctctgtattcacgtatcataagattaaccaaagacgaaatgaaattttcatagaagcttcaccgcacttggagaaaaatgaaactgacctatacagaaccttcactatatatctatgagcatgtaacacttctaatatagttcacttcaggcaaggtaattctgctgaagaattgagcaacaataactcacggagctactcggaaaaactcccaatctaacattctttgctattgtcataataactaacaaggatgacacaaagttgaatgcagaagaaaccttcgagcagattatatgcttggacacatgatgatatcaaaagaagattgagaaaaacagaaacttttacctgttcttagcaatgtctaagaactcatcgggatatctacgacgaaactgctgttgccaattgaatctgccatagagcaacaaaatcaagaccaaaacgtgatcaaaatcaaaatgaaccagagagtaaaatcaaaatttcggtgctcaatgactcaaatcttattcattccgcaacataaaaaagcagtctttgaatcacacaactatacttttccccccattttctctcaaaatctcaccattcctcaaccaaagaaaaaacagaacacaagcaaagcgatgagagagcttacttgaactcctggaaagcgtaaacggcaggatccggtttgggtatcacaacgcgcaatctctcgaaaagcaccgaagctacgatcttatcagagctcgtgcaaaaccctcgcctgctctccaagagaggcttagctagtagccgcaaagatgatctcggcatttctcaatctcacaacccagaaacgaaatcgagtttggttagagagtgaacgccggcgcttgagcctgagagtgagagggtttttccaaatcccctttcaggtaaaacaatttcgacggaatcgaaaaattattggtttacataaccagaatccggtttgatctaattaaaattggattacataaccaaaccagaatccggtttgctatgcattcggatagatgaaaatttggttcgttcatgtaattacggtgttgacaaaaaaagtaatagatatttagattacctttaagaaaattaactacacatatatttcatcggaaaataaatatttaagatactggtataaaatctgtgttatacatagctgaatttttttattttatttttgggcaaagttacatagctgaatctgatgaagaaattgtaacattatttcgactcatacatcaaaacataaaactttagtttatcacttaatacatacactttactgaaccataaacttatcaatctacgtaaagtcttgggaaaacaacgcgacatgtctcggactatgcagaagaatggtccgtgacaacactctcttatcgattctttttaaatcgaagcatctgtgtttttggttaaagtatgttgtgtggacttgactttttttttgtgtgtgtggtccgaatagattattaataaagcaaaaacaaagaagaagcaatgggtccaaataatagcaagagacaaaatctccgaccgaggccaaacctgtgcttcaatcatcaccgtttgattcaccatgattaccgatcggcgatcgtgaaccgtccaatgaacaacacatgcaaagacaaatatagcacagctttggtaataacataattctcctaatctgtctatatatataattaacaagaggattcaattaagtgatagcagtttgtttatccgtcataattcttttggttgatggtattataaaatcttacctaaaatctacccccactaaatggttctgttttttgtcgtaaatggttcttgtttaaaataatctcaggattctccaacatgagatattaaaaatctactcggacccatgaaaaaaatataaagaggattcgatcatggatcagtcatatggtttgaaattttgaaaattatacatactaaatattggatatcgtattggtaacgttttcaatgctacgtatgaaaataaataatttatggttttacaaaatcaactatttctaaataccaactaacatctataacgtttcattaaaaatttgagacaagtagttcgatgatgaccaatgtggttagcttacaattggtagtcttgttgaataaacatatagttggaaactattaacaaacaaaaaaaaacttactacatgatcgaatacaaaagttgttatttgatccataaaacttgcgaaacttttggatattatatctaaatcacaactccgatacgtgtgtaattattttccaaaatattaaatatcaactcattatttctcaattctagggacaaccgtcaagaaaaccaagtaaatgcaaatttgcaatcataaaatttgaccaatatatatatttgggaccattcaaactcgaatttaaagaagagacccacagatgatacggttgcaatctttctaaatttccaaatgggtccctccggcatgcctacactcgaccccactgaaaatccgtatgccggctatatgcattacaatcgagaaaaagcattcttactcggtgacaagtaatctatttttttgtcccattaatacaaacgcaaagttattttctctttttgttgtcaacaaatgctaagtaagtcatactgtgtacttgttcgatccaattaacttcaagaatcttaggtaagtaatgataatctctaaatttcttatcaagttttaagtcgtgtttagtaattatgcttgcgttgtgctatattatctcgtccttagaaataacaaaaattgaaataaaaggtaagtaatgatggagtaaacgtgacaggatatgacatgaccccacgatggagaagaaatgaaagtatataagtctaaggaaaaaagtacctaataatagaagaacaggttgttcaccaaatcagaaagcaaattttgctttgaagaataatacatacagagataaagctgcaaatttgaaatcctctcttatgtgtatctctgaattcatttattttgtcaacatgcatgactttgataacccatcttaccaaaccggtgcatctcgtcgttgtatttatgttaaacgtttcacatcaatacagattacatagattctatgtagaattttgtattttaagcagaatatggttgaatataggattacatagtttcgcatttcacttatctaaattgtaactataaatcattatatatagcactgataggtttaaacgacatttgtttttacgttttatgatagttaaacaactaaacccgtttttgtcctaatcatgtttttcaagtgtatatatatatatattcactatcagctaattctaagtggaaggacaatattgcaattggcgataagtaggttacgcatattaaacccatcatattcatatatatgattgaaaatttatgattcatgtagtagatatacaaaccacaaaataaacaaaaattcatatatttgttgtactaatatacttatatacataacacgactaattaatcaagtgatatatcatgcatctaccacagtaccactttctctctcttccatgagtaacatgcatgagcagcattagaacaaagacatcatgatgatagtttcatcgcctttagccattattcagtcccccattacctaaccccactcaaatttcaaaacctagtttacatttgttccatttttgttttacacattggtcaatatcaattcatttctcattgacatatagtttgtatttatacacctcatcatatatgtattgtaagaaaaagtattaacactcttgttgaataacaaattaatttacaacacgaatgagagattcgttaatcagactgcatttcaatatcgttcacaatttaagttgttgtttaccttaaattattgtaatggtggagtcacaaatcatattgaaaacttattttcttagtaagaaatgcagttaaaaatggtcatttcaccatgtcacaaataaccactaaaattgatagtattattttgtatgaaataaatcctgatgggcagagactgtccaaccattagtgtaattatcttttctttatagttgactgtattgagtactgatttttctccttccaaatttcttctctgctttaacttgttttcccctttttcttttccattttcatgctttatttggattaatttcaatttattttaactttttactcacaacccaccaagatatataggcagccacatggtctcaccttaattcaacacattcacagtcaatccacaaatcattaaaaaaaatatgagtgagctttcatactctctcccctcttgggatctccataaccttggatcactcttcaaccaaaacttcaatctaggtatagacaacaacgattttatattacagttcttttatgtatatttatagaatgatttatgttaagtttgctggtggattcgtgcaaacaaagaaaaagtatattttcgttgtaagatgaatgtatttaatttgtgctagtaattcaagaaaatttcattaaagatatatatatatatatatatatatatatacttttttttttctatacacacacataatgtgaggaatttggccatgcaatgtacttgtagatgcatgggggctcattgatgaatcgccggagaatatattctgttcaccggagatggaaatcggggacgtttccaccggataccttgaagacgcactcattgaattcagtgggagaagcaaacggagacgtctctcgttcaacggcgccgaggacaaaccagataacgatttagaccattctcaggtttatataattactactctgttttttggtttgtcatttacgtaattattccgtatttttcatttgttatgaaactgatttagttgatcgcggaatataataatgcagaatcattggggtctgtctgagaattatagttgcacgagtagtcagtttgcaggtgagacctacttctttattattatcacccatatttttttgaggcatatttattatttaatactattaacatataaatgatcaatacattagtgctgttttaatataaatagtaagttaattgaataatctttgtgaataattttcttatatttaaacagacgaatctccaaattcttccatcaatatatgttctgaagaaaaatcctcaatttcgtcgagaaactctttcgaaccatcctcgtccacgtcaagtaagcatattgtattttcttccgaagtagtgaattatatgggactttttcgtttttgtttatgcgtaattgtccacagtagctataattaaacaaatcaatcatgaaatttcacttttattcatttgcgttttgcgtttataaaatatttaatattaataaaattatgtgtttctaatcacatgcaaagcattttaaacacaaagtccgatcccgaataaacactgacgtaacacttgtgcattacagaaaagaatgactatgacgagaagaagagggtggtgtatccatttggagtggtaaaaccaggtggtcgagaagaagatataactctaaatgacattaataagaggattttaatgccatcggctaggccggttcgacatccggttggagactttgcatgtcgtccgtgtgtctctgcagatggaccgggtctatcaggcaaagccgtggttgcattcacgaagatacaaacattagggaggggcacaattactattataagaactaagggatgatatatcatatatgtaattaatattggctattagaggggggtcgttataatatgtactggagatgtttcaaaaagactaatcattggttgacatgttcaaacctattgttgtatataatgagaaatggtgtatattagtatacatgcttttccattttcttagaaatcttccttctaattatttagaaacctcttaaaaaagaatcaagataatagatatcttagaaacttactaaacaaattttcttaagaaatcaagattttgtatgtattgacaaaaaaaaaaagttctcttctttttttcgtttgatatattatgttttttgcatgttcgtgctttttgttctttaccctttttcccctagccaacccttttgttctttagtaaaagaaaaattcagtagacaccaaataaataaacgaagcgtgaagaagaataaataacaaagaaattaaagcaaaagagaagaatatgctgaaaagcaagaacaaacaaaagagaaagagagagtatttataagtaccttatcaggaaattctcaaagatggttatatgattttaggcaacaagctttcttatctatatgttcgaaatacttaaatgattattaattattaccatatagtcaatattcttaatgtatcatatcgaaaaatctaaagtggattttacttttaaaatttgaattgaaagaataaacaagtctataattagtaattttaaaattaccaagcttctactacaatttttgaattataacaagtacaatgaatcattttgtttcagcaaatttaaatttcgaattagaacaagtattgtctccaaattttattttatactaaaccaccaatgtataattagtttaaattaaatgaaactaaaatataatataatacctattttgtaagatcaatgtcattatgggcccgatggtaagcccaggtcgatttgcacacagtcaaatacatgacgtcatataacatatatgacgtttgtcagcattttctggtccgggacaaaagatcagcaatcactcgtactgtagtcagtactagtaatgtaatgctcaagtgtttagcatgtgggaaaaataaaacacattttcaggtggttagtgacgtggattggttaataattaacaatcgctagtgctctcttttttaaagatttcttgaaattaaatggaacaccttttttgtcaatcaaatggaacacctaactactaatttaccggtcctttccattatttttcatctccaaacgaccaagatcaacgtagcttttgaccttagtgggttgggtccatgttggtagaccatggttaaaaacttaaaattaagtaattaacaaagctgaataaacaacaatattttgaatttttttctttcctcattttttaaaatattgtttttgggggtgagaatagagtgtttttttctttaattaaatagatgaaatacaaaatcaaacatgtaaaactccataatattatgtaactttgacttgtaaataacatccaaatttgataaaacctaatttaaaatcaagtatttatcaaatttcagttcaagataaaatattgaattaacaccagatttaagccaacaattcaaaattttaacctaaaaacttacataatctttttttttccaaataaatttagattaaatatagtatgaatttaggatttttaaaaaaatattatgctattataataaaatatatctttctaatttatattcatgcatttgattccttatctgtatcaaccatatacaatcaaatataagtctctgttgttaacagaaaaaagaaaaagaaatgatttttttataaattaatataatgatgcagatcgttgacgaatcgaaaatagtcggtttaggcgtctagcaacttatatggaacaactttttaagcccaagtgaaaaagcccaataacaaacttgaatacagagtatatatatattctagggtgcggtttcttccctcgaagatcgatttccattgaatccgtcttgtacgcttttagatcacgatttgctccgtccctctcttcttctccacgtcacggcgattctcgcggcggtgctattccttatcggttgagatacggtatgtttcttaggtcaattatgctcaattttgattttcccaatgtcatcagaatctgatgctaatgtgttttttttttttgctcgctgcagaaaatgttcaattcgatgaagatactaccactggaggctcctcctgctgacgggaatttaggtccacttcctccgtcgcaattaacggatgaagaaatcaaagagaatgagtttcaaggagagcaaaacaattcaattcaaactcccatagctgtggctactcatacgaatccaatcggaatcatttatccacctccagagatccgaaaaatcgtcgagacaacggctcaatttgtttcgcaaaacggtttggcgtttggaaacaaagttaaaacagagaaagccaataatgctaatttcagctttttgaaaagtgataatccttatcatggcttttaccggtacaaggtcactgagtatagttgtcatattcgtgacggagctcaaggtactgatgtagatgatacagaagatcccaaacttgatgatgagtctgatgcaaaacctgaccttcaggctcaatttagggctcctcgtaagattttagaagcacctgaacctgagaagtatactgttagacttcctgaagggatcatggaggctgagcttgatattattaagcacacggcgcagtttgtggcgcggaatggtcaatcgtttttaagggaattgatgcgtagagaggtgaataattctcagtttcagtttatgaagccaacacatagtatgttcacttttttcacttctttggttgatgcgtattctgaagtattgatgcctcccagagatttgaaagaaaagctgagaaagagtgttgctgatttgacgactgttctcgagcgttgtttgaatcggcttgagtgggatcgtttccaggaggaggagaagaacaaagaagaggatgagaaagagaaggagagagtgcagatggttatgattgattggaaagattttgcagttgttgagtctatagattttgcagacgaggaggataaagatttgccaatgcctatgacacttgaggaggttattaggaggagcaaagtttcagccatggaagaagatgaaattgttgagcctggaaaggaagttgagatggatatggatgaagaagaagttaagcttgttgcagaaggaatgagagcagcgaacctggaagagtatgttggctctgtggagattgaagaagaagcaccaatgagaattgttaagaactggaagaggcctgaagataggtttctgacagagagagattcgagtaaagttgttatatcacggattactggtgagctgattcccattaccgagatgtctgagcacatgaggatttctcttattgatcctaagtttaaagaacagaaggatcggatgtttgctaagattcgtgagacaactctcgcacaagatgatgagattgctaaaaacattgtcgggttggcccgcctccgtcctgatatctttggaacaacagaagaagaagtttcaaatgctgtaaaagcagatattgagaaaaaagatgagcaaccgaaacaagtaatatgggatggtcacactggaagtattggtcgcacagcaaaccaagccttgactcagaactccaatggagagcaaggcgatggcgtttatggtgatcccaatagcttccctggtccagctgcttttcctcctcctcgaccaggtgtcccaactgtccggccactgccaccacctcaaaatctcgccttgaaccttcctcgtcctcctccttctgttcagtaccctggtgcaccaaggccattaggtgttccaatgatgcagcccatgtatcaacaacaccagctctctatgtctgggccacatggacatccttcaatgatgatgagtcgaccaccacaaatgcaacctgttatgcgtgtgccgcctccaccgggatctcagttttctcatatgcaagttcctcaaccttatggtcagcttccaccgctttcgatggggatgatgcaaccaccacctatggctgagatgcctcctcctccaccacccggggaggcaccaccgcctcttcctgaggagccagagccaaaaagacagaagctcgatgagtcagcccttgttccagaagaccagtttcttgctcagcatccggtaatattttcttcgactcttgattcattttcttatcttttatctttcttctttcgtttgagttgtatcttacctgttttacacattttcagggtccggctacaatcagggtttctaagccaaacgagaatgatggacaagtcatggagatcacagtgcagtcgttatccgaaaacgtgggaagtttgaaggagaaaatagctggggaaatgcaaattccagcaaacaaacagaagtaagtggaaaatctggattcttaaaggacaacatgtcgcttgctcattacaatgtgggagcaggagaaatccttacactgtctttgagagaacgtggtgggagaaagagatagagacaactggtggattcagggaaatgccttttaatctcttaattcaaattaggtgttccttaatagatgttttttattggtggccaaagctatatgtactgcctgctctttattctagctcattatatctctactgttactgacttaggtttgttttggatttgcagctagttttggggcaacgctttgctctgtaatcttaaaataacatattggatactttggtttatgcgttcttactactgttaagcatttttagtgaagctttgtttctcttctttgtaggtaccatacgaggatgctgccttgcttgttttctgcgggatcatcattgtcgaaggtacacacgcaattagaatagctaagatgttagttgaaacattgagaaccttgtaggctttaaaagataggttatcttttctggttgtagaaattgtttggttctacgctgatgctgccacctcctgagaccagaagtccttgtctcggctaagtttgtttccaaacacggttagagtagagtatgagaagaggattataaatattatcgtccatagtgctaaaattttaactttttgagatgctcagatcaagtttttgatagagttcctctaaaagatacggttagacttttgtgaagggatattatcaagcttacagtacagtcagtggcgcttaaatgggagatcgttcttcaagagattgatcacgagtagagagattaacaatcgttggttttactttttgaagcaaactcatagattgtttgcatttttcactgatttggttgatgcgtatacgaaattattaatgcctccccaatagtttgcagctgaattggaacagatttgaggaaccgtggttaagctttctgaattccttactcataataataacactgtgcataagctttttagattaggttgtccggttaaaaaacaacaaaattggtttaagttctctgttttgcattttcgtgctttttgttctttggccttttcccccttagcaaacctctttgttcttttaacaagaataatcgattgaccctggccttatcctgaaaatttagatggtttataatgtgacgcaacaaatcatctatatattcttaaatttgtgtttgttcacccaaggtttcaggtgatattccttccacaggttcatttgactttaactcatgaagtctctaggacttttttcgaaagtgtgatctcagaagagcaaatgagttttgcgattgagtcaacgaatagttaaaatgtttggaaattggaacactgttatgatgtagttcaatagcactcccagctttagagtaaaaaaacatgatcatgcgactttgcagagacagcggaaaaaaacagagaaaactttgtcatttaagtacctagttttgttgataaaaaaaaaaaagtacccagtccttccggatccaaaactttcaagcttgtattacagatcggatccaaaactttcaaacttctaccattattcctgtctaatcgaacgaaattccaagcccgttaaaggcccattaaccagctggatacgaagtttggttcataaatcctagggctcaatttaatctgtttcattaaagagagtatcttcttcttcattttccttctactgttagttctatcgactttcatcaaatcgtccgtcttgtaagcaagcttcacatctccaactggttcgtccgccggttcttctcgacgtcgcggcggaactgtttcttcccgactgaggtgcggtgtttctaatccctttctaaaaccctcagctggattcctttgccgtttcctcttttttttttcactgtcgatctctttctctcgcatcttagtttccggattttatccttgtccaatcggaataatcataggactttaacttttatcaaccgatttcagtagatttgatagtttatactttctacagctgagttttaaccaatgaattaggtctaaaagttatcatgaactttgatgtttctggttgcagaaaaatgttcagctcgatgcagatactgccactggaggctcctcctacggatgggaagttaggtccacttcctccgtcgcaattaacagatcaggaagtcgaagagagggagttgcaagcagagcaaaataattcaaatctagctcctccggcggctgttgctactcacacgaggactatcggaatcattcatccacctccagatatcagaactattgttgagaaaacggctcagtttgtctccaaaaacggtttggagtttgaaaagaggattattgttagtaatgaaaagaatgctaagttcaactttttgaagagctcagatccttatcatgccttttaccagcacaagctcactgaataccgtgctcagaataaagacggagctcagggtactgatgattcagatggtactacagatccccaacttgatactggagctgctgatgagtctgaagctggtgatacacaacccgaccttcaggctcaatttaggattccttctaagcctttggaagctccggaacctgagaagtatacagttagacttcctgaagggatcacgggtgaagagcttgatattattaagctcacagcacagtttgtggcacggaatgggaaatcgtttctaacgggattgtcgaatagagagaacaacaatcctcagtttcattttatgaagccaacacacagcatgttcactttttttacttctctggttgatgcgtattcggaagtattaatgcctcccaaagatttgaaagaaaagctgagaaagagtgctgctgatttgacgactgttcttgagcgttgtttgcatcgtttggaatgggatcgttcccaggagcagcagaagaagaaagaagaggatgagaaagagcttgagcgagtgcagatggctatgattgattggcatgattttgtggttgttgagtcgatagattttgcggacgaggaagatgaagagttgccaccgcctatgacacttgacgaggttataaggaggagcaaagcatcagccatggaagaagatgaaattgttgagcctggaaaggaggtcgaaatggaaatggacgaagaagaagttaagcttgttgcagaaggaatgagagcagcaaacctagaagagaatgttaagattgaaaatgtacatgatgaagaagcacctatgagaattgttaagaactggaagaggccagaagacaggatcccaacagagagagatccaactaaagttgttatatcaccaattactggagagctgattcccattaacgagatgtctgagcacatgaggatttctcttattgatcctaagttcaaagaacagaaggatcggatgtttgctaagattcgtgagaccactcttgcacaagatgatgagattgctaaaaacatagtcgggttggcccgcctgcgtcctgatatctttggaacaaccgaagaagaagtctcaaatgctgtaaaagcagagattgagaagaagaaagatgagcagcccaagcaagtgatatgggatggtcacacaggaagtattggtcgcacagcaaaccaagccttgagtcagaacgctaatggagaggagcaaggtgatggcgtttacggagatcccaatagcttccctggtccagctgctcttccacctcctcgaccaggtgtcccaatagtccgaccattgccaccacctcctaatctcgccttgaacctccctcgtcctcccccttctgctcagtaccccggtgcaccaaggccactaggtgttccgatgatgcagcccatgcatcaacaacaccagctcacaatgccagggccaccaggacacccgcagatgatgatgaaccgaccaccacagatgcagcctggtatgcatgtgccacctccaccgggatctcagtttgctcatcatatgcaaattcctagaccttatggtcagcttccaccatctgcaatggggatgatgcaaccaccacctatgcctgggatggctcctcctccaccacccgaggaggctccaccacctcttcctgaggaaccagaggcaaagagacaaaagttcgatgagtcagcccttgttccagaagaccagtttcttgctcagcatccggtaatgtgttcttcagtcttttgaatcattttcttagccattttctttcctctgagttgtatcttacctgttttgtacattttcagggtccggctacaatcagggtttctaagccaaacgagaatgatggacaatttatggagatcacagtgcagtcgttatctgaaaacgtgggaagtttgaaggagaaaatagctggggagattcaaatcccagcaaacaaacagaagttgagtggaaaagcagggttcttaaaggacaacatgtcgcttgcacattacaatgtcggagcaggagaaatcctaacattgtctttgagggaacgtggtgggagaaagagatagagagacagctggtctacgcagggaaatgctttttgatctcttattcttctctagatgtttaaattgatggccaaaactatatgtactactctctcgttcacacatctttactcttggctcatcatatctctgctatctatggagttttagaaaaagtagagtgattattactgacttaagcttgttttggatttgcagctgaggcaacatttcgctctgtaatcttaaaaaaagaatgtgatactttcctttgtctctgtctttgtgtgttcttactatggttaagcttcttttagtgcagtttggcttctcttctctgtaggtacgatatgaggatgctgttttccttttttccaagggcttatcgttgtcacaggtatggaattagattagataagatgttagttgaaacattgggaatatattgctttagctagtgtactaattttggtttttaccgtatcagtcacttgtagtattaaacaaggctacataagattggtaagcttgaaatgatatgagaaaattagaaaaactgaaacagacttcgagtttgtgttgaaaattcagaattactaaagaaaagtaaagttacaaaagctgagtagcttatacatgaactattacaagaagttgaataaaaagagctgagtagcttatacaaaagctgagtagcgtatacatgaactattacaacattctgagatgaccccttccctcttggtgactcagagaccatccattgagcttatggtctttgacttattggtggtacaaaacaagttgaataaaaaaactgagaattgggttttgaatctaatttcatcctaattgagttttggtttggtcctataaatgtccttaaggcttgatggtttcaagagaaggtgtgacataagaagatgagggagatgatcggagacatgattgtgtatttttacgagaagggaaacaaagacaagaaaagaagacaacactcatgactcttttaagaacttgtcctctctttgggactagacaagcttctctttcacccatttctctctctcagcccggtttatgtcggtttggttttagtactagagatgatgatgtgtctctgcaagctggaactgccgacgtgagagtttatagtgaagaagagttgggtgagttaaaagaaccgcgtgaaaattctcaagacgcgttggctcgttcttatatttttgttcctattgcaaattcgtttataatttgggaatttatatatttctgggatctagatttgttttgcatataagtgattaatataggtttaactttaaagtgtactgtcagagtttgaagtagtcaagactttttctttctttggttccaagttaacgcgtttttggcttagagagcgaccatgatttgttttttcgttgatgtttttttccctttacggatttaaccattatcgttcttattttccttttcaaagccaaaaaggattgattgaaatgattatacgagttcatgaattcgatccctgtaattatgaaacaagttaaaaactatacgaatggactgtttttggtcatagatcgaacgagctcatgactcgatcctggaaccagattctactctagttgattctgacaaggatacctaaagtctcagttcatgcatctgtttcgccaatggccaaactcctgaagcttgagcgatctttcaataaaggattgctggtgatcagatcgtctacatttggaagttttagtgaaggaggatgtctcaggagcttcttcaagtcagactgaagagggagagtagagtgagagtgttaagctcaatcatgtggctaaaacatggatggcaaagaatctacaaattttacctgaacaacatcatgaagatgagaaacttcttttccctctaacaagccaaccttctcaaggtttttaatataaccatttagatgattcagcacataatgtgttacttgtcttgttttcaaaacactcaaaacctgacaaatatattggccaatatcagcctatcagttaatcctgacaatttaatgggtttcaaaaaaaagtatatggttccaaacctgaggaaatgaatcacggacatcttccaagaactgttttgcttcttctccttccacctcactttcattgattacagtagaggcaatgttactgttacctgtgtaaagaaaaaagcacattctcaggtaaatgatggaccaaaggttttcattcaagtctgtattcgtgagctaatatgcagagtcttaaacgaatttaacatagagatattatttaacagaacagagtgatgcatacctagaaagatatgcaattgctgtcgcgcaatcctatgggcacggagaaatgcagaagaaatgtaacaagcagattccagtctttcaacgatcaaatgcgtgactaacttgtgggggataatttttgactgaagaaacttgtagtaatttgggaaatgaacacgcggttctaaacccctccagtcgcttaaagaactggtagaaacaaggtcaagtgcctcatctactgattgcatcaaaacattagcagtacattgtgttattctcccatcatcaagcatctcccagtaagctgcctggacacctgatacaggcaagagtctcgaatcaatagctacttttggaacgacactagtttgacaatgagaagaatttactacgcattgtgaaataccatttaagaagcgtatacgtatgtccattatattcgtagggtcaagacttccagcttcgtacccatcgtgaggattaacttgtctcccttctaaatctttcaagcttgaaatatgtcttataactgtaggccagtcagcagatccaagctcctcgtcatctccaagattttcaaaagcttttaaagcagtcttcatcatttcaaactttgtatactccaatattcgtttctgtcaatagaaaaagaggagcattatcattatatttctgaagcattagttgcaaagattgtgcgtgtatatacattagaaggatcggtgacagattctgaagcaggttgattcccaatctctaactacctattctcggtttgtaaaacgcacaaacctaagctaatatacccacaactgcagaaggatgcagtcatttgtgcatgtataaagacggatgatcagaggttccattatctacccatatatcctgtctttgctttttagatttgaaaagtagcagcacaagagaatataggattaacatactgaccttagtggccgttaaagtgtccatgcgaagaaggtgcaagagcaattgggtagtggatccattaacaaccaaagttaggaaaacaatcccacctgtgaggaatagaaactgcaaaacagctgaaacacatcaagataacaaaaagagcctccagaaagaaattcaaaagtagttcatactgtgtttcagaactcacccttgttcccgtatctgaactgagatatgaatttccacttgattgctgaatcatatgaccgagagctatagtatgtcagagaaaaggaaatgggaacatgaatataaaagatttgaaaacagatttgaaattagtagatattgctcttgcatgaatgaaatgccatttcttcagaactcacttttacagatagagcgagcgacagcgaaacagcaccccttaatccagaccacgtgagtatgatggattccttccaatccaacccatagccagaacggcatagcaatgggtacaaaactccaacaacaacacagcgggaaagttggacatacaagtataagaggaaaaggaagctccacgagtttcctgaaaagaacgttacgagtaatgaatggtcctcttaaccccaatatatgtcaaaaagaaagctactgcggtaatggtatcaggaattagcgatgttatccgttaatcatgacgaattctaggagaaaacctccctttacatcttccaagaacaaaataaaaaaaaaatccggacgtagaataataaattgtgaagagacacctttgtaagatattgtctgaccgctaagaacgctttcagcgataataactccactgcaattcacaagagacacacatgcaatgatcttgtatcaatcaggtatcggctaaaacatcgtctgcagtattttgtttgtaaaataaccagtaaatttttgttttcgaatcttgccagacagttcgtacctgagcataaaaactagtgtatttgcaatgtaagcggccatttccctacaaaagttatagggcaatcataaaaatataatatatacatgtaaagatttcctttgatttgacgaaaaaagaacactgagttgtgaaataccagaagtgatgcagactctggtgactgtcccccttaaaagctgtccttgcaaatgcagcgaaaaacctattacaattatgttatgaacaatggctttttgacacataacaacagaaagaagggataatttaccacgacttacatccccaaaatcatgacagtcaaaattccagaaaccccagcccactcttgagcctgtacatagtagaaatttcttaggtttcctagagatttaagattctccattggggactaagttatgtagaagagaagagcatacagtgtaataggcgaaatagctcgctgaaagtgttacagtgatctgagccaccgtgtcattgaatatgaatttaagccaaaaaactgatgcaattccaaaagctagaccaatgcctacactaaaaaaccagaacaacataagcggagaaaagaagacagcgacatacaatactactaacaaaggaaaataatccatacgctccgaatgagttttggacaagaaatttgattatggaaccccaatcagagttatgccccatcaccatcttgaagaataattgaaaaaccacaaccgataccctgaataatccaaacaactaagcttgatcatatatgacataacatcaccttgatgctaaacataagagtttgacatggttacccatcgttcatgagagattccccatcaattaacgtggtcatcttcttactagcaccaagctcctttagcaaagcaacaacagccacggggtcggtagctcctaaaagtcctccaagcaacaatgatgttttccagtcccagttatatggaaaagtaagctacaagagcataactcgaaaaaattgttaagttaattgaagctcacttaatcacagtcgaaaatgttgaagctagttaaagtacctttataagagctccgagacaaaaggtggaaatcagaactccaggtccagcaagcagaaccatttgtcccatacatctctaccaatgatgtaaaacaatcaataccaggaaccaacacagccaaggaagtagctcaatcaggaaagtaaaaaccttgatctggtgcacatccatggagaatgagctctcgaaaagaagaacagggagaaaaacagccaaaagtaggtcagggttgataccattccctgtaaagttgccattttttagagctcgtaatctaacagtatggagaagagaaaatacagtagcttacagatacgaattccatggccgagcttcccaaggttatgcttagttccatattctacagaagcaaaaaaatccaaaatttaactactttctaaaatcttccacgaaattgaaactgagctataaagcttaatgagcaaacaaataagacctagggatccgagaaaaatgccgatgacgagaagaacgacggtgtacggaactctagtgccgttaaacaaatatctacaagcggtgccgagaaccagcgaagttcccgcgaaaataacagcatcaacaggactcgaatcgttctcagctgaatacgaagaagatgcaattgctttctccggtgatttgtacggcaacgccgcgccgattatactcgtcatctccggtagaaagaagcaaacgatcaatctttcgttttgccagtgattacggtcaaagatgcttttaccgaaccgaatctgcttcgtttaagagtgaaccaagattgaatctagtctggtttggcttgacctgttttatttcggttacgtctggttttctatcactaatttgaacgaaaatttgagaaatcttaatacgtttttgattaggtttctgttttctttgctagatatgaatgtagttactggattatactactctgttcaaatgaagggtacatatatttacatgaaccaaattatgaaataacaaaaccgactcactctagtctctaaacttaactagtgtcacttttgtttgtttgttttgatccatacttcaatgtatcttgttcaaattgtttgattttatttttggtataagtggctacattgtaatttcttgctgattcaatctataaatcgaaaaccttaaattatccatgcctcaaaacgatgcacgttgtgtataaatgagaattttaaattgtttagtttctataattgctgtcatgacgtgagatcatgcaaagcaattacgtacgataacgcacgtaaaggaaaaatgattatcagattcatatattttttttttcaaaaacttggtctcgtgtaacatcattcgtcattcttcatattcactatactataaccacaaaagatattaaaaaaatagtcactccactccacatctaatacaaagaagtaataatttaactattcaaaatttatgaagtgttaatacgataagattttcgacccaaggaaaaaaaacactataagatacataggtttggcagaacaattagttcgctcactgcctacatattctttttttggtttaattagcctacatatgggaaaatgatttgtattttgttaaatgccactcacatttgttataaataattagtcttggtttcaaaagccatatatttatgaatttatagacattgatatttatttttatggttggaaatggtataaagtattattgactatagtttttttatgtatttttcttatgaaataaagtgagaaaataataaaaatattaaaatttgtgtagctgactcgagtttgattgaagtctttggtatataaatattgtcgttatttcctccatttttctccctcttctcccaaataaaaaaagttactcagatctcacgatttgagcagaatacgcaatgaggacaccgacgacgattctccttcttgtcggagctatcctcttctccggcgccggctatgtcagatccgacgcctccgaccaccgttacaaggaaggagacaccgttcctctctacgccaacaaggtcggcccatttcacaatccaaggtaaacggaaacatctattctagatctgagcttcagatctgaggttgtttcccattcttaagcctgaggatgataaattgatcgtttattgttgaatctgttgctattgaattgagtaacgacattgataactgagtacactgcaaaatgcgtaatgttaaaaccaaagagtgaaagaagaaactacatttggaatgtttttcgtttatgtgatggatctgtcttagatttgaatactattatatgactgattttggttttgttcaatgatgattgcagtgagacgtatcgatattttgatcttcccttctgtatcccaggtatgcttatatctttactagcttaatcacacgatttgtgtttaagccgcaactgatttgtgtgacatctcctgattcgatcatcccattattgaatatggtttatagagggtgtgaaagagaagaaggaagctcttggcgaggttctaaacggggatcggctagttagcgctccatacaagctcaacttcagagatgaaaaagagtctgaggtatactgcaacaagaagttgagtaaagaagaggtcaaacagttcagaaaagctgttgagaaggactactacttccagatgtactatgatgatctacctatctggggattcattggaaaggttgacaaggatatcaaatctgatccgagtgaattcaaatatttcttgtacaagcacattcagtttgagattctatacaataaggaccgtgtgatcgagatcagtgctagaatggatcctcattcgcttgtggatctcactgaggataaggaagttgatgcagagtttatgtacactgtgaagtggaaggaaactgagactccttttgagaaaagaatggagaagtactctatgtcttcttctcttccacatcatttggaaatccactggttctccattattaactcctgtgtcactgtccttcttttgactggattccttgcaactatcttgatgcgagtcctcaagaacgatttcatgaagtaagtttcaagtttcctcactgtcgactgttttacacttgtctatctcatctaaccttattccaatgcttaaaaggtatgctcaagatgaggaagctgctgatgatcaagaggaaactggatggaagtacattcatggcgatgtgtttcggttccctactcacaattctttatttgctgcatcgctcggtagtggcactcaattgttcacgctgtaagtctctcataactcgaatactttccatctggatacactttcatccatatccgcatttcttcttactgtaactaactgtagcttttccttttattccatgtcatcagcaccatatttattttcatgcttgctcttgttggagtgttctacccatacaaccgaggagcactctttaccgctttggtggtcatttacgctctcacttctggaattgccggatacacatctgcctctttctactgtcaacttgaaggaaaaagctgggtaaatatttacacatgatgagaatcatccctgtctctcaaaaaatcatcttcaactgaaataaacaacttctcccttttttgacattattgcaggtgaggaacttgttactcactggatgtctcttctgtggcccattattcctaaccttttgcttccttaacaccgtagccatcacctacactgcaaccgctgcattaccctttggaaccattgtggtgatcgtccttatatggactctagttacctcacctttactcgttttgggtggtatcgcgggtaaaaacagcaaagcagagttccaagcaccatgccgtacaaccaaatatcctcgtgagattccaccactcccttggtacagaagtgctattcctcagatggccatggctggttttcttcctttcagtgccatctacatcgagctttactacattttcgctagtgtctggggtcaccggatctacaccatctacagcatcttattcatcgttttcatcattctcatcatcgtcactgcttttataaccgttgccttgacttacttccaactcgctgctgaagatcaccaatggtggtggaggttcgttaaactcagctaatcgtctctattcttttctctctgaccatgagaacttgagtctgattctacaaatttctattgcagatcattcctatgtggtggatcgaccggtttgtttatctacgcatactgcttatactattactacgcacgatcagacatgtcgggttttatgcaaacctcgtttttcttcggatacatggcttgcatttgctacggattcttcttaatgctcggaacagttggcttccgcgcagccctcctctttgtccgtcacatttaccggtcgatcaaatgcgagtaagaaggtctgtacaccaatcttcttatgttgatttccttcttcttcttctgccttcttacgaattttgcttagaacaaagaagataaagagataggttgttagaaagaagagagacacaaagacaatgtctgattattttctaaagaagcatctcttctcattagaggttttagcgagagtctctcttcttctctctttattttgggctacagaaattaaattacttgtatcctttctatatattttacctattgtaaaagactatcaatacctttgaattcgagtttctttgtatctaataaatttcaaaacacacatattttctccttcatatatatcttcagtctatactgcacaataaaaataataatttgaagatgtaactaaataaatattggagagctaaattgaagtaaattgcatatttttgtacttgtttggatccaattgaaagatccaaggttgataccaccgacatacaaggacatagtgttagctctttaatgggccaaaatctcggcccaactataaatggtttcattgaccaataattagtgccactgatttcaattttgaaattcgaatcctcctcctttggaattcagaaaccctagagttcttcagcgagcgaactctgtctgcgatttcttgttgattctaaatggatctctcgcgagaagtcgatgactttatcaaagagacaatcgatcactctttagggcttccgatatccatggacgttctccagaaaaagctctacacggcggaagaatctcagcgtcgtctccgtgaacagtatctatctctggtttcgagattgaaagagaaagaaaaagtaatcgatctcgttagatccgaagcgagtatgaatgcccagtcgctgaagaaattcgtcgaagagaatcagaaattgggaagcgagcgcgaggatttggtgaatcagtgtaagaagtgggaaaaagaatgctttctttatcatcaagatcgtgaatcactcatggagttcgggaacgaaactgacgaaagggctagagaagcagaatctagggttcgtgaattggaggaagaagttagaaaaatgtctgatgaaatcaagagccggatcgaatctgaagaagattgtttggttgattcaatattggcatcgttcgttagtaaagatgagagtatatcattggggcgtatcttcttggaggctaatagtgaagaagacaaatgttgtgaaactttgttgaggaaatgggatcagttaaagccaacgacgcaaaagtttgtgtctttagtgtcaatggtgaagagaattgaaaaggagaaagaatgtctcattatgaatcttgctaaagcagagcaagaagttgaacttgtgagcgagcaaaacagagagctggatagagaaaaccgcaagtttttgaggcaatgttctgcagagagaagccatggatctaacaagttcaacaagagaaagagtatcaagatgatgagtagtccgattgagaagaggattgaattgagcagccaagaatttatcgattgatgaagtttagatccaatgctgatgagtggttttgtttgaatctcttttggtaattattatgaatatgaatgagcagttctggctattgtttagattggtagagaaaacagtaatggaatgtttgtgagggacaagctctgactataagcacaatgcaatatgtataaaatatgagacttggaacattctctctcacattggaaacactgaattttaaaaattatacatttccataatggtctacctctaccactagtataattcatttgaccattagtgtgctaaccaatgtggttgtgtttttaccatctgttttgtacaatataagtctctaattggcttcttcatcatcttctttgtttccaagaaatctctttaggctttaaaaaagatgtctaaaagactaaaaagagtgggctttggtttttgtcttcttctcaaatggctttcttaatcagtttgtgatcgttcacttaccaaacgtaaaaaaggtaaagtcttcatagaaagccctttagatatttttatattattgtgagaagaagatattttctttttttaaaatagaacaattttttagggttgtctcttccgagtcggggacttaaaataaaaacgctgtctttccctatctttgagatctctctctcttcttgtgttttttttttcttatcttctttctcataaaaagtctctctcctctctcttccttgcgtcttctctttccccaatctctctcaggtttctctttcctctctcaccagaagggcaaaaaaattcccttaaagagtcccccgtttttgtttaaccccctcttctctcatgtaagttttctctctcctaatccatttcccatcttaactaacatcatctctctccctttctctttctccaatttctatattacaatgggtcctttttgtgtgtactgtacctcgcttttctccatttcttagtattgggttttggaaaccattgattcatgtcttgtttcattagatcttgctctggatttcccagatctatggatctgcatgtgggttttggtcaaaaatgtctaatggtgttgcaattccctaaaggaattcatctttatccatttcaccttatttttgtttctgggtatctccaagatctaatctttttcctattgaatcataattacattgtttgttgctgaaaatatagaaatgtttagcttaattcagatatagatctttgtgtatttctgtgcatttaggacagagaactcttgagtttgattggttctgtctgaatttggatctgaatctcttaattgttatgtgtagttgaattttgttttgtaatgatgttttttgtagatctttgaaatggatgacgatgggtttcgtaattggggttactatgaaccagctgctgctacctttaaaggtaatctcggtttgcagctaatgtctaccattgatcggaacactaaaccgtttttacctgggcgggatccgaatctaatgatggggcctaacgggtcatatcaccaccaagagcctcctatccacatgagctacaattggattaaccaacagaaggataagttcttcaatatgttgcctgttacaacagccactcctaactacggtaatgtccttcccgaaacttcgtctgctccgtcgatgcagatgaatctccatcatcatcttcaaaccgaggagaatccggttaagttggaagaagagattgttgttcagactaagaagagaaagaccaatgcaaaagctggctcgactccaaaggctaagaagccaaggaaaccaaaggatgagaacagtaacaacaacaacaacaacaacacgaatgttactcgagttaaacccgctaagaaaagtgttgacttggtgatcaatggagtgagtatggacatttcgggtcttcctgttcctatctgcacttgcactggagctcctcagcaatgctaccgttggggatgtggcggttggcagtctgcttgttgtaccacaaacatctcaatgcatccattaccaatgagtactaaacgccgtggagcgaggatctcgggaaggaagatgagtcaaggcgcgtttaagaaggttcttgagaaacttgcttctgatgggtttaactttgggaatccgattgatcttaagagccattgggcaagacatggaactaacaagttcgtcacaatcagatgattagttgcttgattagtaaaacagaacaagtgagtgtttctcttccgggatggaatctctcaatgatggtgtatgtatatacaacaaatctgaaatctgtgaccttttcaaaaattctgtctgcaatctgagttcgattctgttttcaggtaaaccatcttcgttgtagggtttggaagcagagttctctgttttctttaccacttttttttatcacacttttgctttgttttttgtttgtttgtctatctgtgtgtctgaggaagaagaaggtgtctgagaaaaaatgggaaatttgcatctataacatacaaaaaaactttaattaagtaactaaccaaaacaaaaaatgtatgtgatattctgtgtatattctataatatagaccatcgtaccccttatataaatatcacatacactttttatctttcttctttgttttcaccctcactctcttctctttttttcccaatatatctcaggatttcttcagctttattctcacatgaccactatttattctccttgaccaaactctaaccttaataataatactgattctagatctgcttaagagtacttgtaactgtatttgtactattctattttgctgccatacaatttacgtttatacggtaaaactagttggtttgattaagtattaattatgattgaaaagattaataaattaaagaaacttggattgaaccctttttattcaatctctttaatttcagctaataagaatttgccaccaaataaaaaaaatcatttaattagaaaatctaatatgccaccaaaacaaaattatatataagttgatttatgaaatatgattagggtttaaattttatgattaaatatagtgaaatattggtttgagtttataatcaagtttagattttacaaaaaaatgaggttaaatgtcggttggggtttataaacagatttagattttataattaaacaaagttaaatatcggtttgggttttgaaaatatggttagagattagattttacaattaaactcgtttaaatgtcggtttgggtttacaaaagagaattagggtttagattttgtaattaaactagattatgtatggtttggatatatactataattattaaagtttagattttataattaaattatttttatttatttattagatgacatctaataaaagaggatgataaaagggtttgcccctaaatccaagtattgttcataaattaatgtaaaaacaaaattatttggatatattcaaatgttaatttttaaagatcgtacatatattttgtgaattctatattatttacactttcatatggtataatctaactctgatttcaaaaccaaatagtgataaaatattttaatccaggttgattctagttatgctacgtcatacccacacttaccttgcctcaattatgcatctcaagctttggaggatagttttgtatttccactcatcaacatggttacttactacattatgagtattatggtgttactttcttaatattttattgaaaaagtgatattcttgcaattgacccagaaaaaatctgcagggaaatttatttttttgtactttttttttttcttccttttgttatctttttataaacattttactgacttgtaacagatattcttttaattaaatgtttttatttttcagattacctttatttgtacttatatatagttgaaaaacatactagaattgatgtctgaataatcattaactaaaggaagtatagctttgtcccaagcgcgaaattaatttgaatgtgtaccatatgaacaataacaacaatcgaaattaatacagaatataatcatagttaaaagctaattaagtctggaatatcaacgacaacaactctcggaggagaggcaggagcttcctcattatgatcaagtgttatcaaatcagaaagctt

SEQ ID NO: 40 - DNA, 132699 bp, Arabidopsis thaliana
gaattcgatccctgtaattatgaaacaagttaaaaactatacgaatggactgtttttggtcatagatcgaacgagctcatgactcgatcctggaaccagattctactctagttgattctgacaaggatacctaaagtctcagttcatgcatctgtttcgccaatggccaaactcctgaagcttgagcgatctttcaataaaggattgctggtgatcagatcgtctacatttggaagttttagtgaaggaggatgtctcaggagcttcttcaagtcagactgaagagggagagtagagtgagagtgttaagctcaatcatgtggctaaaacatggatggcaaagaatctacaaattttacctgaacaacatcatgaagatgagaaacttcttttccctctaacaagccaaccttctcaaggtttttaatataaccatttagatgattcagcacataatgtgttacttgtcttgttttcaaaacactcaaaacctgacaaatatattggccaatatcagcctatcagttaatcctgacaatttaatgggtttcaaaaaaaagtatatggttccaaacctgaggaaatgaatcacggacatcttccaagaactgttttgcttcttctccttccacctcactttcattgattacagtagaggcaatgttactgttacctgtgtaaagaaaaaagcacattctcaggtaaatgatggaccaaaggttttcattcaagtctgtattcgtgagctaatatgcagagtcttaaacgaatttaacatagagatattatttaacagaacagagtgatgcatacctagaaagatatgcaattgctgtcgcgcaatcctatgggcacggagaaatgcagaagaaatgtaacaagcagattccagtctttcaacgatcaaatgcgtgactaacttgtgggggataatttttgactgaagaaacttgtagtaatttgggaaatgaacacgcggttctaaacccctccagtcgcttaaagaactggtagaaacaaggtcaagtgcctcatctactgattgcatcaaaacattagcagtacattgtgttattctcccatcatcaagcatctcccagtaagctgcctggacacctgatacaggcaagagtctcgaatcaatagctacttttggaacgacactagtttgacaatgagaagaatttactacgcattgtgaaataccatttaagaagcgtatacgtatgtccattatattcgtagggtcaagacttccagcttcgtacccatcgtgaggattaacttgtctcccttctaaatctttcaagcttgaaatatgtcttataactgtaggccagtcagcagatccaagctcctcgtcatctccaagattttcaaaagcttttaaagcagtcttcatcatttcaaactttgtatactccaatattcgtttctgtcaatagaaaaagaggagcattatcattatatttctgaagcattagttgcaaagattgtgcgtgtatatacattagaaggatcggtgacagattctgaagcaggttgattcccaatctctaactacctattctcggtttgtaaaacgcacaaacctaagctaatatacccacaactgcagaaggatgcagtcatttgtgcatgtataaagacggatgatcagaggttccattatctacccatatatcctgtctttgctttttagatttgaaaagtagcagcacaagagaatataggattaacatactgaccttagtggccgttaaagtgtccatgcgaagaaggtgcaagagcaattgggtagtggatccattaacaaccaaagttaggaaaacaatcccacctgtgaggaatagaaactgcaaaacagctgaaacacatcaagataacaaaaagagcctccagaaagaaattcaaaagtagttcatactgtgtttcagaactcacccttgttcccgtatctgaactgagatatgaatttccacttgattgctgaatcatatgaccgagagctatagtatgtcagagaaaaggaaatgggaacatgaatataaaagatttgaaaacagatttgaaattagtagatattgctcttgcatgaatgaaatgccatttcttcagaactcacttttacagatagagcgagcgacagcgaaacagcaccccttaatccagaccacgtgagtatgatggattccttccaatccaacccatagccagaacggcatagcaatgggtacaaaactccaacaacaacacagcgggaaagttggacatacaagtataagaggaaaaggaagctccacgagtttcctgaaaagaacgttacgagtaatgaatggtcctcttaaccccaatatatgtcaaaaagaaagctactgcggtaatggtatcaggaattagcgatgttatccgttaatcatgacgaattctaggagaaaacctccctttacatcttccaagaacaaaataaaaaaaaaatccggacgtagaataataaattgtgaagagacacctttgtaagatattgtctgaccgctaagaacgctttcagcgataataactccactgcaattcacaagagacacacatgcaatgatcttgtatcaatcaggtatcggctaaaacatcgtctgcagtattttgtttgtaaaataaccagtaaatttttgttttcgaatcttgccagacagttcgtacctgagcataaaaactagtgtatttgcaatgtaagcggccatttccctacaaaagttatagggcaatcataaaaatataatatatacatgtaaagatttcctttgatttgacgaaaaaagaacactgagttgtgaaataccagaagtgatgcagactctggtgactgtcccccttaaaagctgtccttgcaaatgcagcgaaaaacctattacaattatgttatgaacaatggctttttgacacataacaacagaaagaagggataatttaccacgacttacatccccaaaatcatgacagtcaaaattccagaaaccccagcccactcttgagcctgtacatagtagaaatttcttaggtttcctagagatttaagattctccattggggactaagttatgtagaagagaagagcatacagtgtaataggcgaaatagctcgctgaaagtgttacagtgatctgagccaccgtgtcattgaatatgaatttaagccaaaaaactgatgcaattccaaaagctagaccaatgcctacactaaaaaaccagaacaacataagcggagaaaagaagacagcgacatacaatactactaacaaaggaaaataatccatacgctccgaatgagttttggacaagaaatttgattatggaaccccaatcagagttatgccccatcaccatcttgaagaataattgaaaaaccacaaccgataccctgaataatccaaacaactaagcttgatcatatatgacataacatcaccttgatgctaaacataagagtttgacatggttacccatcgttcatgagagattccccatcaattaacgtggtcatcttcttactagcaccaagctcctttagcaaagcaacaacagccacggggtcggtagctcctaaaagtcctccaagcaacaatgatgttttccagtcccagttatatggaaaagtaagctacaagagcataactcgaaaaaattgttaagttaattgaagctcacttaatcacagtcgaaaatgttgaagctagttaaagtacctttataagagctccgagacaaaaggtggaaatcagaactccaggtccagcaagcagaaccatttgtcccatacatctctaccaatgatgtaaaacaatcaataccaggaaccaacacagccaaggaagtagctcaatcaggaaagtaaaaaccttgatctggtgcacatccatggagaatgagctctcgaaaagaagaacagggagaaaaacagccaaaagtaggtcagggttgataccattccctgtaaagttgccattttttagagctcgtaatctaacagtatggagaagagaaaatacagtagcttacagatacgaattccatggccgagcttcccaaggttatgcttagttccatattctacagaagcaaaaaaatccaaaatttaactactttctaaaatcttccacgaaattgaaactgagctataaagcttaatgagcaaacaaataagacctagggatccgagaaaaatgccgatgacgagaagaacgacggtgtacggaactctagtgccgttaaacaaatatctacaagcggtgccgagaaccagcgaagttcccgcgaaaataacagcatcaacaggactcgaatcgttctcagctgaatacgaagaagatgcaattgctttctccggtgatttgtacggcaacgccgcgccgattatactcgtcatctccggtagaaagaagcaaacgatcaatctttcgttttgccagtgattacggtcaaagatgcttttaccgaaccgaatctgcttcgtttaagagtgaaccaagattgaatctagtctggtttggcttgacctgttttatttcggttacgtctggttttctatcactaatttgaacgaaaatttgagaaatcttaatacgtttttgattaggtttctgttttctttgctagatatgaatgtagttactggattatactactctgttcaaatgaagggtacatatatttacatgaaccaaattatgaaataacaaaaccgactcactctagtctctaaacttaactagtgtcacttttgtttgtttgttttgatccatacttcaatgtatcttgttcaaattgtttgattttatttttggtataagtggctacattgtaatttcttgctgattcaatctataaatcgaaaaccttaaattatccatgcctcaaaacgatgcacgttgtgtataaatgagaattttaaattgtttagtttctataattgctgtcatgacgtgagatcatgcaaagcaattacgtacgataacgcacgtaaaggaaaaatgattatcagattcatatattttttttttcaaaaacttggtctcgtgtaacatcattcgtcattcttcatattcactatactataaccacaaaagatattaaaaaaatagtcactccactccacatctaatacaaagaagtaataatttaactattcaaaatttatgaagtgttaatacgataagattttcgacccaaggaaaaaaaacactataagatacataggtttggcagaacaattagttcgctcactgcctacatattctttttttggtttaattagcctacatatgggaaaatgatttgtattttgttaaatgccactcacatttgttataaataattagtcttggtttcaaaagccatatatttatgaatttatagacattgatatttatttttatggttggaaatggtataaagtattattgactatagtttttttatgtatttttcttatgaaataaagtgagaaaataataaaaatattaaaatttgtgtagctgactcgagtttgattgaagtctttggtatataaatattgtcgttatttcctccatttttctccctcttctcccaaataaaaaaagttactcagatctcacgatttgagcagaatacgcaatgaggacaccgacgacgattctccttcttgtcggagctatcctcttctccggcgccggctatgtcagatccgacgcctccgaccaccgttacaaggaaggagacaccgttcctctctacgccaacaaggtcggcccatttcacaatccaaggtaaacggaaacatctattctagatctgagcttcagatctgaggttgtttcccattcttaagcctgaggatgataaattgatcgtttattgttgaatctgttgctattgaattgagtaacgacattgataactgagtacactgcaaaatgcgtaatgttaaaaccaaagagtgaaagaagaaactacatttggaatgtttttcgtttatgtgatggatctgtcttagatttgaatactattatatgactgattttggttttgttcaatgatgattgcagtgagacgtatcgatattttgatcttcccttctgtatcccaggtatgcttatatctttactagcttaatcacacgatttgtgtttaagccgcaactgatttgtgtgacatctcctgattcgatcatcccattattgaatatggtttatagagggtgtgaaagagaagaaggaagctcttggcgaggttctaaacggggatcggctagttagcgctccatacaagctcaacttcagagatgaaaaagagtctgaggtatactgcaacaagaagttgagtaaagaagaggtcaaacagttcagaaaagctgttgagaaggactactacttccagatgtactatgatgatctacctatctggggattcattggaaaggttgacaaggatatcaaatctgatccgagtgaattcaaatatttcttgtacaagcacattcagtttgagattctatacaataaggaccgtgtgatcgagatcagtgctagaatggatcctcattcgcttgtggatctcactgaggataaggaagttgatgcagagtttatgtacactgtgaagtggaaggaaactgagactccttttgagaaaagaatggagaagtactctatgtcttcttctcttccacatcatttggaaatccactggttctccattattaactcctgtgtcactgtccttcttttgactggattccttgcaactatcttgatgcgagtcctcaagaacgatttcatgaagtaagtttcaagtttcctcactgtcgactgttttacacttgtctatctcatctaaccttattccaatgcttaaaaggtatgctcaagatgaggaagctgctgatgatcaagaggaaactggatggaagtacattcatggcgatgtgtttcggttccctactcacaattctttatttgctgcatcgctcggtagtggcactcaattgttcacgctgtaagtctctcataactcgaatactttccatctggatacactttcatccatatccgcatttcttcttactgtaactaactgtagcttttccttttattccatgtcatcagcaccatatttattttcatgcttgctcttgttggagtgttctacccatacaaccgaggagcactctttaccgctttggtggtcatttacgctctcacttctggaattgccggatacacatctgcctctttctactgtcaacttgaaggaaaaagctgggtaaatatttacacatgatgagaatcatccctgtctctcaaaaaatcatcttcaactgaaataaacaacttctcccttttttgacattattgcaggtgaggaacttgttactcactggatgtctcttctgtggcccattattcctaaccttttgcttccttaacaccgtagccatcacctacactgcaaccgctgcattaccctttggaaccattgtggtgatcgtccttatatggactctagttacctcacctttactcgttttgggtggtatcgcgggtaaaaacagcaaagcagagttccaagcaccatgccgtacaaccaaatatcctcgtgagattccaccactcccttggtacagaagtgctattcctcagatggccatggctggttttcttcctttcagtgccatctacatcgagctttactacattttcgctagtgtctggggtcaccggatctacaccatctacagcatcttattcatcgttttcatcattctcatcatcgtcactgcttttataaccgttgccttgacttacttccaactcgctgctgaagatcaccaatggtggtggaggttcgttaaactcagctaatcgtctctattcttttctctctgaccatgagaacttgagtctgattctacaaatttctattgcagatcattcctatgtggtggatcgaccggtttgtttatctacgcatactgcttatactattactacgcacgatcagacatgtcgggttttatgcaaacctcgtttttcttcggatacatggcttgcatttgctacggattcttcttaatgctcggaacagttggcttccgcgcagccctcctctttgtccgtcacatttaccggtcgatcaaatgcgagtaagaaggtctgtacaccaatcttcttatgttgatttccttcttcttcttctgccttcttacgaattttgcttagaacaaagaagataaagagataggttgttagaaagaagagagacacaaagacaatgtctgattattttctaaagaagcatctcttctcattagaggttttagcgagagtctctcttcttctctctttattttgggctacagaaattaaattacttgtatcctttctatatattttacctattgtaaaagactatcaatacctttgaattcgagtttctttgtatctaataaatttcaaaacacacatattttctccttcatatatatcttcagtctatactgcacaataaaaataataatttgaagatgtaactaaataaatattggagagctaaattgaagtaaattgcatatttttgtacttgtttggatccaattgaaagatccaaggttgataccaccgacatacaaggacatagtgttagctctttaatgggccaaaatctcggcccaactataaatggtttcattgaccaataattagtgccactgatttcaattttgaaattcgaatcctcctcctttggaattcagaaaccctagagttcttcagcgagcgaactctgtctgcgatttcttgttgattctaaatggatctctcgcgagaagtcgatgactttatcaaagagacaatcgatcactctttagggcttccgatatccatggacgttctccagaaaaagctctacacggcggaagaatctcagcgtcgtctccgtgaacagtatctatctctggtttcgagattgaaagagaaagaaaaagtaatcgatctcgttagatccgaagcgagtatgaatgcccagtcgctgaagaaattcgtcgaagagaatcagaaattgggaagcgagcgcgaggatttggtgaatcagtgtaagaagtgggaaaaagaatgctttctttatcatcaagatcgtgaatcactcatggagttcgggaacgaaactgacgaaagggctagagaagcagaatctagggttcgtgaattggaggaagaagttagaaaaatgtctgatgaaatcaagagccggatcgaatctgaagaagattgtttggttgattcaatattggcatcgttcgttagtaaagatgagagtatatcattggggcgtatcttcttggaggctaatagtgaagaagacaaatgttgtgaaactttgttgaggaaatgggatcagttaaagccaacgacgcaaaagtttgtgtctttagtgtcaatggtgaagagaattgaaaaggagaaagaatgtctcattatgaatcttgctaaagcagagcaagaagttgaacttgtgagcgagcaaaacagagagctggatagagaaaaccgcaagtttttgaggcaatgttctgcagagagaagccatggatctaacaagttcaacaagagaaagagtatcaagatgatgagtagtccgattgagaagaggattgaattgagcagccaagaatttatcgattgatgaagtttagatccaatgctgatgagtggttttgtttgaatctcttttggtaattattatgaatatgaatgagcagttctggctattgtttagattggtagagaaaacagtaatggaatgtttgtgagggacaagctctgactataagcacaatgcaatatgtataaaatatgagacttggaacattctctctcacattggaaacactgaattttaaaaattatacatttccataatggtctacctctaccactagtataattcatttgaccattagtgtgctaaccaatgtggttgtgtttttaccatctgttttgtacaatataagtctctaattggcttcttcatcatcttctttgtttccaagaaatctctttaggctttaaaaaagatgtctaaaagactaaaaagagtgggctttggtttttgtcttcttctcaaatggctttcttaatcagtttgtgatcgttcacttaccaaacgtaaaaaaggtaaagtcttcatagaaagccctttagatatttttatattattgtgagaagaagatattttctttttttaaaatagaacaattttttagggttgtctcttccgagtcggggacttaaaataaaaacgctgtctttccctatctttgagatctctctctcttcttgtgttttttttttcttatcttctttctcataaaaagtctctctcctctctcttccttgcgtcttctctttccccaatctctctcaggtttctctttcctctctcaccagaagggcaaaaaaattcccttaaagagtcccccgtttttgtttaaccccctcttctctcatgtaagttttctctctcctaatccatttcccatcttaactaacatcatctctctccctttctctttctccaatttctatattacaatgggtcctttttgtgtgtactgtacctcgcttttctccatttcttagtattgggttttggaaaccattgattcatgtcttgtttcattagatcttgctctggatttcccagatctatggatctgcatgtgggttttggtcaaaaatgtctaatggtgttgcaattccctaaaggaattcatctttatccatttcaccttatttttgtttctgggtatctccaagatctaatctttttcctattgaatcataattacattgtttgttgctgaaaatatagaaatgtttagcttaattcagatatagatctttgtgtatttctgtgcatttaggacagagaactcttgagtttgattggttctgtctgaatttggatctgaatctcttaattgttatgtgtagttgaattttgttttgtaatgatgttttttgtagatctttgaaatggatgacgatgggtttcgtaattggggttactatgaaccagctgctgctacctttaaaggtaatctcggtttgcagctaatgtctaccattgatcggaacactaaaccgtttttacctgggcgggatccgaatctaatgatggggcctaacgggtcatatcaccaccaagagcctcctatccacatgagctacaattggattaaccaacagaaggataagttcttcaatatgttgcctgttacaacagccactcctaactacggtaatgtccttcccgaaacttcgtctgctccgtcgatgcagatgaatctccatcatcatcttcaaaccgaggagaatccggttaagttggaagaagagattgttgttcagactaagaagagaaagaccaatgcaaaagctggctcgactccaaaggctaagaagccaaggaaaccaaaggatgagaacagtaacaacaacaacaacaacaacacgaatgttactcgagttaaacccgctaagaaaagtgttgacttggtgatcaatggagtgagtatggacatttcgggtcttcctgttcctatctgcacttgcactggagctcctcagcaatgctaccgttggggatgtggcggttggcagtctgcttgttgtaccacaaacatctcaatgcatccattaccaatgagtactaaacgccgtggagcgaggatctcgggaaggaagatgagtcaaggcgcgtttaagaaggttcttgagaaacttgcttctgatgggtttaactttgggaatccgattgatcttaagagccattgggcaagacatggaactaacaagttcgtcacaatcagatgattagttgcttgattagtaaaacagaacaagtgagtgtttctcttccgggatggaatctctcaatgatggtgtatgtatatacaacaaatctgaaatctgtgaccttttcaaaaattctgtctgcaatctgagttcgattctgttttcaggtaaaccatcttcgttgtagggtttggaagcagagttctctgttttctttaccacttttttttatcacacttttgctttgttttttgtttgtttgtctatctgtgtgtctgaggaagaagaaggtgtctgagaaaaaatgggaaatttgcatctataacatacaaaaaaactttaattaagtaactaaccaaaacaaaaaatgtatgtgatattctgtgtatattctataatatagaccatcgtaccccttatataaatatcacatacactttttatctttcttctttgttttcaccctcactctcttctctttttttcccaatatatctcaggatttcttcagctttattctcacatgaccactatttattctccttgaccaaactctaaccttaataataatactgattctagatctgcttaagagtacttgtaactgtatttgtactattctattttgctgccatacaatttacgtttatacggtaaaactagttggtttgattaagtattaattatgattgaaaagattaataaattaaagaaacttggattgaaccctttttattcaatctctttaatttcagctaataagaatttgccaccaaataaaaaaaatcatttaattagaaaatctaatatgccaccaaaacaaaattatatataagttgatttatgaaatatgattagggtttaaattttatgattaaatatagtgaaatattggtttgagtttataatcaagtttagattttacaaaaaaatgaggttaaatgtcggttggggtttataaacagatttagattttataattaaacaaagttaaatatcggtttgggttttgaaaatatggttagagattagattttacaattaaactcgtttaaatgtcggtttgggtttacaaaagagaattagggtttagattttgtaattaaactagattatgtatggtttggatatatactataattattaaagtttagattttataattaaattatttttatttatttattagatgacatctaataaaagaggatgataaaagggtttgcccctaaatccaagtattgttcataaattaatgtaaaaacaaaattatttggatatattcaaatgttaatttttaaagatcgtacatatattttgtgaattctatattatttacactttcatatggtataatctaactctgatttcaaaaccaaatagtgataaaatattttaatccaggttgattctagttatgctacgtcatacccacacttaccttgcctcaattatgcatctcaagctttggaggatagttttgtatttccactcatcaacatggttacttactacattatgagtattatggtgttactttcttaatattttattgaaaaagtgatattcttgcaattgacccagaaaaaatctgcagggaaatttatttttttgtactttttttttttcttccttttgttatctttttataaacattttactgacttgtaacagatattcttttaattaaatgtttttatttttcagattacctttatttgtacttatatatagttgaaaaacatactagaattgatgtctgaataatcattaactaaaggaagtatagctttgtcccaagcgcgaaattaatttgaatgtgtaccatatgaacaataacaacaatcgaaattaatacagaatataatcatagttaaaagctaattaagtctggaatatcaacgacaacaactctcggaggagaggcaggagcttcctcattatgatcaagtgttatcaaatcagaaagcttcgtctctatctcttcctcttcttcttcttcttcctcagcaatctctgttctctccgcactttcctcagacgactccatcgccgtccttacgagttcatcgagatgaatcacatccgcttcaggaatccttacgaaattaggaatctcttgagcattagaaactcccaagtctttacaaaactcaaaatacttttttagctctcctccttgcttcatggatttagcaacaatcttcaacgccaagtctgcctctgttttacctatcttggagtgcacgttaggtaaaacttcagcaatacgacgacaaatccaaccgtaaatctccataatctcactaaccacattctccatagcttcattaatcacaggtatcatcatgttttcaccaatcggtttgattctaatcaaagaatcaacaataatctgcatcttacgaataatcacaagtcgaatcagaaccgatgattcttcgttgtatcgatgacgattcccatcgtgaaacagaatcgatcttcgatcaagaaacgcgaaataagcacgtacgaagagattaaacccaccggatttgctcataatccgtgaattaccttcgccgaaactcgaaagatcgaaaggtaaccgtccgatcgattctgctacggttgatttacagaggaagaagccgtgcattagcattaagccttttaaagcaaccgcccagcttcgcgtgcgtttcacgcgagacgagattaagcttacgagaggcttgaggcttgacgggctagagagaacgtgacggtagatgaattgagcgctctctgtatcaatggagagctcgtcgtggcttgtagctttcacaacggctgctgtgagaatgtcatcagccgcgatgagactaggtccgtctttgagaactacggcggcgcgtttccaaagcttcatcttccgactaatgtgtgtggtttcaaattgttagtttctatttcgcgctttataattttcattttaaaccgtgttttgttttctttgatgtcaattctttgctggtttaaaacgaattagataaggataagctaaaattaagaaatctcagttttgaccaaaataaaaaaagatatttttgatgtcgttactaaattattatcttccatttttcagtttaactcgattgattacgtaataagttcattagataagtgttgtttggttggcttttctatatgtttcgttgattttgttttgaggcaattttctagtgtagtagtgttgtaatcgtatataatgtatgtggtttgagcaagtcaaattatgactttgtttgtacaatatggaaatatacatatcttaattattaatggtgtgattgatatcgttaagccgtaaaataatcgtttagcttgctaaattacacacaaaacataaagtaggcaaatgaacatatacgatagtgaatagtcaactcgtgggtcacacaattgcttttttgctaaacctcttaaaagaaagcgtttcagacttctttttgcaataaaatcagattctttgaaaacttttgatctttgcttcttaattatagtttcattttagttacaatatattattgatatttctcaattttacaaaattagtttcttaaatcttacttttataaatcaaaatacttctacttatttagaaacatgtgacctctatacaatccaaacttattaaatttgtttatacctatattaaaaacttattactaatatattagtactagtttactagtactaattagccgctatagttttacaaaaagtggtttagttttcttattcctcattattgctactacacttaacccaatggattgaaagagttaactatgggtagagatgacaactttatgagctgagaggatacgaaattatggatgtgtagaaaagcaaagccagtgaaacagttcaaaaagtgggtttttcacatttattatgacaactaataaacacgtaagtacaaaatcttaaagcaagtaagtaacaataatttttgctctttttgtaactcccaactctttctgacacaaaaaaacaccatatcataacttaagtaacccaaaaccaaactcttccaaaacaaaccctaaacgcaaaaatcattactcaaaaaaaaacaaagtctctctcttctaattagagagccaagaagatgcagagtacttgtgtctacagagaatgcatgcgcaaccacgccgcgaagctcggctcttacgccatcgatggctgccgtgaatactctcaaccatccaccggcgatctctgcgtcgcctgtggttgccaccgcagctaccaccgtcgtatagacgtcatatcttctcctcaaatcaatcacacgcgcttcccgttcacgagcttaaggcgcgtgaagcagctggcgaggctgaaatggaaaacggctgaggaaagaaatgaggaggaggaggatgacacggaggagacttcgacggaagagaagatgacggtgcagaggcggaggaagtcaaagttcacggcggagcagagagaggcgatgaaagattacgcggcgaagttgggatggacgttgaaggataagagagcgcttagagaagagataagagtcttctgtgaagggattggtgttactcgttatcattttaaaacttgggttaacaataataaaaagttttatcactaactaattaactaatatccttaattgagataatactataatttagttccaatttcattttcatcccttctgtgttaatttctcctccttgatcgcttattttaatggattattattttatcattagtgggtttaatgtgtttgatttggacatgtccttaattactaactggttcactctttaattggtctttatgattcttctttttacgtcggtgggatttgagttttgacaagacaactagctgacgttttatttatggtcaatactgttcgccaatcagaatatttatacgtaataatattgaagtagttgaatagtagtactaattattatgggaaaggatggcaaaatgacattttgttttgatagaaaattgtaaagattacatatctaattctaaaatttgtaaataattaatggtaagatatatttcacgtaatgaaaagacaattagttacggaaataacacaacattgtgttttttcgaggtttgttactaaaaattataatgacatcatcaaagccaataaaagctgttatgcttttttttgtagaaatagtcatttcaaaaataatttttatactttttgcttttttataaagtcgtaaaaccatatacttaaaagtatataccaataaaattgtgaactaattgattcataaaattgtaactttgctaccattataccaagcatcccattcccacgaaagtttcaactttaattgggcttttgttggcatttcaaggccaataagaacacctttgagaaaactaaaaaacatagctctagtctacaattattctagtgtttacctactgatttagaaaatgattaggatttaggaccaggttaactaaaaccagagacagtcttgcccggctcgatctgaaccaagcttgcccgtaatctcaatccaacgtacaaaaaacaaataaacaaaactgtataaaaaagtttcaccatacaaattgtagacatgattacttgattagattcaaatactcgttaagatttgcctaaacacagattacaagtgtgttttgtgaaatcaattcgttgcgtaattcttctccctgagacttttcttgccagaaagtcctagaaatcactgatgtcggtatcttcgctgtctgagctaccattctgtgaactgctgtcacctaagtcctttttcttccacacgaatggtaacaaaacctttcttgcataatccacaccgtacacgacggctatagccacagcaatagatccgaagatcttggcgagtattacacaaagcctgcaaaaataacacaacaaaatatgattcatcacctcacctcccaaagtaagtgtataacaaaaaaacatgagtctgtccttactctgactgtgacttcatgttattaaccatctcatcaaaggagctctcttcactaaacactattaaagactgttccttggatttttgaatcatgagattaccagctttgtctctaacagcctatacaacagtacaacagaagagggaaaaaaatgtaactgaactaaccgctaaaacgccactcttgcaggatccacatttcctgaataaagaaacaagtcaaaaggaacacttcctttacctcaccaacaaaagtcaaagaggtaccaactttaagagcctgcccaaagataacctaaagaaaaacatcacgttgttggtttcaactttcaacacaaggaattagaggttttctagggaacaaaacagagaaggagaaaacaatgaaggaacaaagaaccttagagccttctttgggtgaacaaagacttttgaaggattcaccaagtgattttacttcatacggtcttacaatttcattaaaacctagagcaccttcagctcccactacattcacccgacccgtactgtcttcctaattgtgtgtgtgagacacacagagagagagagacaacaaatcaagaaggcaggcttaagtcgtgggtgggggggggggggcaagaaatagcaaatgagttgtattttaccagataccaaggagtctcctttcgttgtagaagaagatttacagacttgtttatcaaaccaccatcttccaacttgttctcataaaccactttggcccgaagacagtatatgtgttatgacttatgactacacaccaccaaaccagagaatttaagcacacatgattgccaactttacaaaaaaaacaatcttaccgtattctcaaaaacaacacccaaaagatcaccatctttggagttaaaggttgttgcagatgcaactcttccggataccaaaacaagaagattcgttgttttttctttaagcaaatcatctgaaaacacaaaaataatacaataactggttcacattgtaacctgaaaggctgaaaccaatacagaatgaagtaggctttgaattccatactaagagaaacatacctaacttttttaagtcaataacgcgggtaatactgttaaaatgttcaaatctcctgcaccatcccaaaagcaatcatacattgattgattgatttattaaaaaaaaaacattcaaatatgcaaaaaggattgggatgagactactaaactctttaatgctctccccccaaagataaaatactgtggcacatgtaacacatatagcaagtccttcaagcatttgaaaaaaattcaaacaagatttttgcatcaaaacgataataacttcctccacaagttctgcataacatgatcacaaacacaaaacgttacacaccctaacctaatcgaacctctaaaagtcccaccacattcccaaaaacaattatgctagttgagaataagaagcaactattttaaaaacaataacaaacaatgattacgaaacaaaggaaacgagagacgtactgtcgaagattaggaacctaggagaaatagcacgagagatcaattgcttaaaccctagtgtctctcaagtctcaaacctccgagcaaaaagtgtctttttcctttctttctttttttctttgccagcgaaatcatcaaaatcgtgttaatccgtatttataagaattcgatttcgatttgaaccaaaccgtaataaccgatctcaaaaccgaacagaaccaaaatatctaaagatataatttcactacaacccgaatccgacgaacaaaccgatccgaaaccaaatcaatgtgttggatggaactaggaagtgttagagaaaaggaattctaggagagtaagtaatctgtataaaatatacacacatgacacatccacacaaattgaacaacataccaaagaaaagatgaaattaaaagaaatattttgaagctactataacaaattaacaactcaacataacatccattttctactcttctattaccctgaagtatccgtcacaagtcaactcaaagtcacacacatacgaccactaattgtctacggttacttgatctgtatcagtaactcctccttttgattacattcatctaactcccaactcctactccatctcaagttcttgtggttgaaccaactgctgcctaatgagacttagttatataacggtgaatctggttcagagccgcaaaccgaagtgtatgtagagacagagtcttcctttggtattgccacaaagttcaaaggagctgttgacagtcttcttacttccttgaaatatccgttttggcgatggcttgagtatgatcttggggtggtcattatgtcgttatttgttgctccagctgagtttctgcggggcgtaggaggcacagatgcatccccattgtatccgttggtctttcttacactgttgcttcttcttggactcggttttgatccataaattgattccctccgctttattaacagatcctgcatcttcttttgatcctgcagagaaaatgaaataaaattgtttaaaaaggcaagcagtattacaaatcttcaagggttatgtaaaagagagctttttgacaaacccggtatcgtctcttttcctcttcctgttgtttccttgtcaatttataatcttcaagtatggataccaatcgaacctggaggaaaccagtaaccatatttaaaggatagaccttgtggctgtgtttactataaagttactttaacttacaccatcatatagaaatgatttccgtgtttcgtcctcccatagaagtgttttcttgatgagattgtcaaccattgctacagaaaacaataaaacaatgcaacaataagctaaagatctcataagaatatttggtggaaactacaagaacatacatgggatcttgtttactgtgatccgggcgcgttctgcatgcttgaggtttacatgtccacctcttccggcactataccgggtttcatcctaaaaccaaggaaggaatttctcagttacatcctccaacaaacctatttgcctacaaggaaaatttacctgattgtattcttctagccagttttcctcttcgcacgcagataaccagcggtcaatcctatcgattatttctttccggctatgtgcttcttctttgattttgtttatatgcaattcaatatttgtaagaagctctgaagggtccactaatcctgaagaaacatgaggaaatatattagcaagaaaataagctactcatatttctgagaagaagaagataagctctatcacttttagtaccagaatcaatcaaagcagttgatttctcaagcgatgtgcttgtgtcagcctcaatgtgagccaatctgcaaagattctctaactcagtccttcttttcatcacaagctccttcattctgctagctttcagcttattaaaacagtctacttctgcagacacctgaagtccaagggagaaacaagaactcagagatcctgaataacattaatggcaattaaaagttgggaaaagaaaagagctgtgtcctaacctgttcaattgtttcactagagaggatatttggctcagtgatatcagattctgatgatcttacaacataactgacacttgcaaatttcgttctttcttcttgagatgtgtccattagattccatagctcaaaaagtgaacccgctacatcctttaactgcacactcaaaggcgaaaatgctaaggcatcaaaatgataatcagttacaaagagaagaatagcattgcaggcatgtttatctaccttttgaaaccgaacgctcctttcggttttcagcttatgaatcatgtggtgtagaccatccaatgtatcatcagaaatgtttgtagactgctcatggtcagtcctatgtaagctcggatgaacctcactaacagtttgaccaaagtcgactccaagaacaccacatagagtgtgcacctcattcacatagtccaaaaccttgttcagacgatccgactgcataaaaaacaagaacatatgagtaagcaagcagcttgacttaacaaagtaaaatctgagttcatcttcttattgtattcatgaaaacttccttaccttctctttctggagcgagcggagatgtgtttgatactcgttaagcttccgaagagtcaggtcttgttcatcaagagccaaagaaccgaccatcgttttgttgagttggtcactgtatccagatatttcaccactcatcttctcaatttgtgcttttatatccacaaattgcttcattctttcatctttttgcaatcttaagtcctcaagcattggcctcacagcagcaagtttttctttcaatgattttgaaccttcctttgctttcatctgtaaccataaaaacacattttaaaaacaaaaaagatggaaactttcctttcattaccaataaaaagaaaccaagtagactagctcataccggtgagtggctgttgaacactccaagagcagccagtaaagaagcaatttcagcttcaattgataccaatgactgatgaagctgtgccttggaattagcagcctcgtccacttttcttctgtagatttcaagacattccttctccaattccattagcatccggtctttctcagcatcactctcaccaatatcaacccatattttctgctccaaaccaacaaattttgccattaaaccatgaaatatatagatactccaaacataaaaatcagatacttgtagaaaaacaggtcaaaagaagtctcagaaactaagaagaggtaccaaaattcacagtaacccttaaacctatagttgacagaaaaaaaggagaagactttacctataaagaccctaaatttgtccttgaagcatcattatcaagaaaccctaaattttccaagaaacagagaagaagagggtgaaagaaaaacctgaagctctcgaagcagagcattacaagtagtgtttgtacggaaacagagactcgtagggctttcaatctccagcatttcagctaatttgtcctctctctgacttgcttacttgctccaaagttagaatcttgaactagagagaaagaaagagagctcagcttgtgacaatggctgcttaaggtctcaaagaaaccacacaagatataaaagactcacaggaacaaataatagcagatctaaagcttaacatagcaaaaagcttctcattacttttgcagagagaaaacaatagatcagcaaagcatagaattccgagcaaaagtttgcaagaaaagagagagggttaagttggaaacactaaagaaagaagaagaatgtggagagaaaaaaagtctgaataaaactgagcttctttttgtcatatttacactattaaaaatttatactacattaatgttatttattattttgttattctcttttctaattttcttttgtcacctactttatcttgttattctctgatattagtagtatttattcgtcttcatgaaaatacgataaaataaagtaattaaagtgacggattctcgggagcgcgtgggttttagaggagcgttggtaacacgtcccaatagaataaagagaataagatttgtcttctttgatgatcagatgtataaaagtatttatagagtactcaattgtttaggtatatcgtatttgtacgttgcatgacgaccttttggaccaaccaaattttttagaattagtcttatgcatccaaaaaaaaaaattgtaatttaaatactactatcgacgttgaaatgaacctttaatcatgagaataaagaggtaaatcacttttgaatgatgaaatgcagaaatagtatttgttttgagtgaagctaaaattaatagaagatgtgtgtatattttacaagaaaaatatgccaaattggtctaatcaaaagcaaggaagtggtggtggccaatgtcactccactccactaatttcattaagaataagttgaaaatcttatttctatatttaatttaatcagcaaaaaaattagtatcattatccaaacctttcattattgcttgccacaactgctaattttttttttttgttgtctgaattttattaaaaacccaaggtagaataccatttgaaatacaaacgccggcagaccaactaaatgtctccaaaaactaagcccaaaagaggaaaactaagcctcaacggaacggagaaactatttagaccaacgaagaaaacaaaagacaaatatctaaaaaagatcaaccgttaagggaaaacgaagatctaagcactaaaattgcgcaaaagaaccaggaaccctcacaaagcttccccaaagaaacggaaaacgtcggaaacaccaataagatcggaaagaactcacatcgaagtcaaaccactagcaatccgacagggaggaaagcaagaagccaccagagcgagagacacaactactaatcaaataagcaattattatgacattatatattgaatttctgatatttatgtttgtcttataactatgttaatatctcacacgtactgacagaacaagcagccttactttagaaagtttagaagaagacagaaacaggataatcccaaacattgtgttgggttgcttgaattattagccgacaagttgagttctaaccacttcattcataaataaagaagtcagctgatgaagattatacaacaatctttgtcataaactacgtaaagataatgaagtagctagtcctgtatatattatcttatgtttcctggtactagttctggtgcgactgctaaaatctaaattgtcgtctttagattaacatttgttttttttttctctctatgaaagtactaaattttcataggataagccattcaaaatatcaattacagtgactattgagtattgactaatattatttgaactcacaactcacctacatgtattaatgtttgcattattttagtgattgctaaaacacataagtgtcacatgacatatatatcattgtttaggctaaacatattatatatatggtctatattatagatatcgatccaagtctattagccaatccaacactaaaacaatcctcttgtaaatgagtagctcatgacgacattattctgtttcattttggaagcattagcatcatttccacacacacgtgttgacctaaaaaggcctatatttgttctatttataaagccttaaattaaagactcaagcaatatcacatggatctaatatataatcatatgttgcatagaaaaaaagaacaaaaaagaaatagagagaggtggttgaatgatttaggctttacatcaaacccactgtttcaataattttgttaggtgtgtgtgtgtatgtgtgaatacagctagagagtttcacgaagaagctggttggtcaaaacttttgactcgaaaggaattgctgacaaatcgatcaatcaatttgcttcagagagaaaaaaaaaacacataaacacaattgacatctctctatctatacggtccgatactagacttggcgaaccaaactaaagatacagtaggacactgtgactgtctaggaccaccagagatattcagtgaagtttctatagtcatcataagtcaatcttgctgactacatcatactaataggaactatagtcgtaaggaacatatataccacattaagcttgtttcttttgattaactcctcaagttgttttcaaaatactcgacgaactagactgaatcagcaataagaccaaacatgtaaaataaacgttgcagaagttaatgctcattagttttctcttttgtaagaacatacaaacacacaggtgacaagttttggccaagaattacaaaataatatgataccttcatagtcatacctcagaattaatgtcctagtcgagaagcagaagtttgtttttatagatctttcttttcattagagaaatgggtatcggcccaataacataggccaacccatttgcatttattttctcatatccagtaaggatatactttcaaatttttgtataaatgggattttgatttttctttaatatgttgaacgaatttagtaaactattcacattattttatgttcagaactatactgtaaaataactaacggtcaacaataattgagagaatttggaagttttcgttagactcacatcaataatgtgactcaaagctaataattgcaatttccgacaaatttgtggcatgggcgtttatgctgtcttctactcttcttgtatgacaacgcacatacccgagcttcgtaaattttatttctatttttttcaagtatattttgtttttaaaatgcgattttagaaagaatttgtgtgatcagaattcacggtgtaataatagtttgtatgcatactgttgtttgatgtgtcataatccaaatttagataatatgtttatgtataatgttagaaataaaaatgtagtagaaatttacgtatattttcactgataatagaaattttcaaatatccttaaactgtcaatatccaatttctttatgtttaaaatatttcaacagctaattttcaaccgctatttattttatttaaatttatcttgtcattatatttcgttattgataaatatctgaaaaagtgggtgacaaaaaaattaccgattcaaattattgtaataaaattgacaaatcaaaagattgaaatagaaaacaaaaatggactacatttctcaaaatggcaaataatttttattcatatttatcaacctcgaaatgacctacatatatagagacacaaagatcacaacaaaatcaaccattcctttccttatcttcttcctcttttgcttttctaatctctcaatggctaccttaaaacacaaacctgtaaatttggtattttacgtttataatttgattattatattctcctcccatagttccacggcggagctccgcaggctactgcagccatcaaaaaccgatggtacagtgagctttctcgttatcggagactggggaagaagaggctcctataatcagtcccaagtagctcttcaggttacttcttattttcatttacaagttatttactatatttctcgcctgtacgcatatatataaatatataatgcaaattcaatagtgtataattaatacgtattacgtaaacatatatatgcgtatgccttcaagagcatacgtgatatgaggatcaaatttactggtcttcatattaatgccggcccttatgtttttatattattctttttttttcttttttttattattattattcaatttcaatatatattactaattcttgaacaccatgttataagataccataaaaagaaagaaagtcatgttagaggaacttgaaagattcggtctgtgttaagaaaacagctttagtgtacgaagatattctacatatgatttttgtttgtactgttgttttgcagatgaactcaatgtggtaaattttatgctagtttgatgttttcttttatactgttgtttttagttattttatgctaaattatttcacacgaaatttaaacagatgggagaaatcggagagaaattagatatcgattttgtgatttctactggagataatttttacgacaatggtttaaccagcttgcacgatcctctatttcaagattcttttaccaacatttataccgctccgagcttgcagaaaccttggtatagtggtaaatgtgtggttcaatgtgtacattcgtcgttggatcttaattattaaacgatatgtggttcaatgtgttaattacattttctttaacctaaagttttaggaaatcatgattatagaggtgacgtcagggcacaacttagccctatgctcagagctctggacaacagatgggtttgcatgagatctttcattgtaaatgctggtaattcctcctatataatatttcttcaaaagttagaaatattttattaatcctccaattatttttttatttttgttaatttcgttaactgaacagagatcgtcgatttgttcttcgtcgacacaactccgttcgtcgataaatactttattcaaccaaataagcatgtttatgactggagcggtgtattacctaggcaaacatatctgaataatctcttaaaggtaacaattttttaagtaaatcttcctttctttcttttttcgtcgaaatagaattaatattaacttaggaacgtcattatatacgtgttttgggcaaaacattcctttttcttttgttatgattggatttttttataaagttatgattggatgttaaacgcagcttttattttgtctattttcaaatggaatcgcgttttaattaggtatgtaatgcgatatgattagagaacaatctgccaatgcaactttttttctttttacgagcgagtgactaacgaaagctataatgtaataatataggaactcgacgtggcgttgagagagtcagtcgcaaagtggaaaatagtgattggtcaccatacgatcaaaagcgcaggccaccacgggaacaccattgagttggagaaacaccttttacctattctccaagtaacaaaaccattccattcatataataaagtttatgcaccaatagaaaaaatctatctaattaaatctgttttttttgttctcgatttactaggcaaatgaagtggatctctacgtaaacggacatgatcattgcttagagcacataagcagcgtggacaggtagaataaatttatttatttgttcgttaattattttcttattaatcaattattgtaacgtaagggtccacgtacgggaggatataaaatgtcaccatttttggttgcatatagtaacatacaatttatgacaagtggaggtggatccaaggcctggaaaggaggtgacgtgaactacgttgaaccagaagagatgaggttttactacgacggacaaggtttcatgtcggttcacgtttcagaagctgaactgcgtgtagtcttttatgatgtttttggacacgttctgcatcattggaagaagacttacaaggaggcgctttatttcgcttcttgattccaatttaatcggacgtaattgtttatgatcgatgtactatgaaattatcaatatcgtacttcgtcgaattttcgaatcacattatgatatgacaagaacatatcagcagcatcagaaaaaaaagtcaatgaaatctttattgcgtaaaagtacagtttcaaacaagatattattgaaaatttgtaagatgtgagattaactagaaatactgcatgcatatactgtatatacatatcgaatctaagcatattaaaatgtaaatatcatcctctcttacgcttccatattaattaagttaattaattttcgttattcttatccaatttgattaacaagttttcccgaagcatgcgtgcatacagtactcttgtgtagtttgtagggacacaaaatgggtccgattctcatctataaagatagataatgattttgttacatgtcttttgtcctgtgctcagattctcttcaatcatgtaatatatatagataagttatagtgaattatggattatatgataagataaatgatatacaactctatgttgtggatgagattctgtcacataatttcacaagccccggatctctcatatttgatcgcaagaacacttttgctcataccaaaattatctcccaaaagaaatataatagtcattctattaaggcttatcttattttacttttggtgagacttaatagagtggacaaaggaatgaagacatgggccactgccatgaaccatgggaccgaacacacagctgaacttgtatcacacaacagagataaaggcttcatatcttagctttcgaatcccaaaaaatattccaagaagaaaaaaaaaaagtaactttcttgagaatcttgagacactttggagaaaaacaaaggtatatatatatatgcatgtgtaagaagatattatgattcagtcgaaacgaggcagagatagaatttgaatagaaaggaaaggatatagatgaatgattttagagaagagagtagaaaacgggtaacttttccttgttttgactctcctaaaaataatttctcaagtggcaaaaacaaaacgacatttcatcgaattcaccgctcttttaacagtttgtaaactgcacctcagatttcatctcccaaaaactattctctctctttgctctatcttctcttcttcagctactaattgctctgtttaccgttactgccatcgcattccccttcaccaaatccgttacgagcttcttctttcgccttcaaatctaattttccttctgttccgttgctgttgtcagccagttcttgatttgaaccgggtgggaggaacacaccagtgcctgggatgggcattcgaggttgtggtgctgtctggtgtcgtggatgaggtggcagcagtggccagacaggcggcccggttggtacaccacctgggaacggcattggagaggcaagtggaggagaaggagggatgaaaatcggttgaacagctccgtttggtgggcggtgagacggagtgggcaagacaccagtggacgggataacaacagggtagtgtttaggtgggccggttgggtgacggatgtgctgatttggcgatctgctcggcggtggtccccagttagagtttctcggtttagatttgatgaagctaatgagtatccgttgctttcgggttgcgtgaattgcatacttagcaagatttgcggatttgccttccaccaaaagaaccgatctgttcaaagttcaaagtaccaaatataattgatgataaaaggattgaaagatcttgattttacagaataagtgatatggatcggttacccgggagtgagagacagcttgagagagcctttgtagtcgccgggattttcagagacaatgactcttccaaatgtataatcacattcagacaaggacaagacactgatgggtcgtccaaaccagggaacaaacatatgaggctgcgagtgatctccctatggttcacaataacagagaagacacaagaaaacttctactttgttaagaaaacagaaacagatagttttaggggttgcaaagaatttagcaatcagtttaacctcgctgaagaaatcaatgatgcatgcgtctggtttcacaggtatgatttgctttgagaccaaacgttcaatgatgtctgaaagagctgatgggattggctctattcttcgatctgcataaagcccatatctcatgttaaccaatacacagaaattataagtaaataacattttaaaggacttgcctttgatactatcatcatcaggcggcgtatcagctataggaagaccgagttggatcatctcacgtccatgtcctctatttggccgtttataacccacatatgcctcacctgtttcccattaaccaagggtttaatacctgactaaaacaagttaaatcattattgtagggcaaacaagattcttactttgaagttgacctcttcttccagcaagtctcagattggttacaagagaaacgagttgagaaacttcgtttgcgtcaagcattttgtcgtatagcttcaatccttcgacaacattaacctactcaacaaaactaaggaattaggtgtcgtaggcataaactctaaacagatatataaaagaaaaccaactcaccatttttgcatcatacatctcttgaaccacaaaagtctttgccatgcttgcaggacactctttatcgttctcctcctgcttttgctcagaaatgagactgttatctgaaagcaagaagcaacacataatcagaacatttcaacaaagtctaatatcaggtgtaaaaccgagaagtcaggtcttccaaagtacctttagaacccgagttacacttatggttcttcactatctcctcttgagtttcagattcttccaattttttctcaactttactatcactcctcggtttctcgctaccatctatcccacaaacaaacaaaaaacttacattttcactaaagcagagagtctagagactaaaccacagattaaacccaaatcttccactctcatcatgttcagcaacatacaatgaactttctcagaaacaattgcagataggatttcacaacaaacaagtttactttccttacaagcaagcaaagcattgaagccaaaacaaagacaatttgattacctctcttctcttctgcaacagacaatgccttaacatcacttgccaacttagcttcctcccgatgctcaacacgatcactgttaacgccattgaaattatgcccatttctcgccatcgaatcagctcctctgtaacccccaccaccaccatgatgcttgttaaacccaggccctgatctccttgctccaaatttcccaacttgatcagaattgtaatgcctttgaggtggcatttgctgttgccttttccaagcaatctgctgaagattgtaagaaacatctgcaactgggaaaaactgctgcatagtaagcacttgagaccaggctaagcgacgatgatgaatgcttccgatcacggattcgtactcgttgtgatccccaaccgcttgtagatgctgacaaagcgaatcgatgatcgcgttagccgcagcgaactccgcacgaagccaggagataaacccatctcgctcgtctgggatccaatttgccggaggaggaaactgcaatttctcagacggagtagtaacatttccaggtggtggcattgccattttcgtggcaacaattaagaacaaacaaataaagcaaatatctttatataaaaactgttcctttttttgcttctctctttatcaaacacaagtcatagctttcttcaaacagatctgcagaatcaagagtaaagatcagatttttaactcgatttcaacgagatcatacactagaacttgggaattaacggaattcagataaaacccacgaagaaatgaggtaaatttcagatggaaacagtaaaacccagaacgaaattagagaagcaatcaccagaaatgtgaaagataacagatctggcaaatagagaaactcgtcttcaacgtgaagctgagtgaaataaagagagctgagagtaatgtataaactaagggaagggaagcttcgtaaaaggcaaagacaagagatggagagagagagagagagagagggagagatctagggtttttgaggaaagagaggtgtgtgtaaaaagggtaataagagagatttggttttggcttagttaagacgcatgtcttattttcacatttctcactctctttatcactcttctttttttcttcatgaaaattcttcggattgtcacaaaaaataaaaatttcaataattccaactttgacaattacgcaattttacaattttctgtagtcaaatgctaaatttcggttagttcattatacatttatactgtactaatcaaaattgtttatattaggtccctctaatttatgcatatcagatttgaaacgaaatcgagattccgcatctttttaaagatgctgattaatttatgattatcacgtcgctttttttgctttgggataaatgggccttatggcccatagtattaagataaagataaaatatgaatctaatatggccccatgagattttgtaagttacggcattttgttaaagttttggtccctttgtcgacatatttctaaaaagaatacgaattttggtgattttttctaaataaatgagatttgactttatgtgttgttccaaactttcattgatgatactttagataattcagattagtagtagtcgacaaacaattatgtaaaagactaaaagctgatcttgactaatactacaagctttacctcccactaattacgagttttattctttctttaccaaagtcattgatatcattaattaatggtcggaatatgaactatatacatattcaagtccgcaaatactaaaatgacacgcttaaagatcatttttgccgttgttatcatacttttgatgtaatcctaaccaaaccactaattaagtttttgtatggtattgagttttttaagaaaagaggtatggcattgccgcattggccaattacatgagtggtaagtcctaaaacaaattatatgaatcaaaacatcatttttttttttggctatataaaaagccttcactaagaagatgctatgtggatacaccacttggtaaaccatataaacgacacttcaggactacgatcgaccaatctctttgacaaatgtgtccattggactccataaaatatgatgtacctcgcacgcaacacaagtcaccccaaacggacccacaagttatatcatcgatgtacctcgaaatgacattatcaattgacacattgtgtatatgtgaatgaacttaatgtgtaaatatggtcaaataaaatatcccattgaagtcaacaatatttattggagttggacccgtctttgaacatttgtacaaggtaaacaaacctactcaattttgttgaaaaccaaaataatgagaacatatatatatgcatagctagatgaagaagatgcaagaaaagaatcattgtatgcacggtatacattatatttttaatgtactttagtattctcatcattctattatttctcatacgtaaaatattctaaaattataatcccgattttgtttacttatagaaaaatgaaattttattattatgttaaaacgataatgttcataaaatggaggaaatcaaaatatagcggtgtcattccattattcagtccataattcatagtattcctatacaagacagaaaatgccaaaaatgccctctagccgaacaatatacaccgattcatatcgactcagttcgagctaatcggctcctgctccgatgcttcccacgacggtggccgtgaggaatcccaccgaacgtgaccggatcatagaccctgagacgcttagcctcagccggattcacaacacactccgacaaaaccaccttgtacctcatatgatcgtaacaatacgaataagtcatgtgtttctgtcggaaaatctccatcttgttcctctgagactccgttatctccgatgctagccggagattctgaaccgcttcatctttgcagctcggaaacttctcggtggggtcaacggcgcagccgtggaggatcagatcagtgaattgagagacgtaaggggcatatttgtaatttacaccgtacttgcctccatcagtcgcccatttggaaccatcccatatggttgaatataaagacattggcttcgccgggaagtcaccgcccatcgacgccgtacgtttgacttctctgatcggaacattgtctacataaaatctgcaataaatgcaaaaaacattacttgaatgttatcagttttggtagaaattccagcttttagtgaactggagtttagattatttctttcaaaattctctgtttgggtctctgttatagatcaaataactttccaaaacaagaaactaaagcgaccatctttacatataaaattaaattcaagtcaccatctcgcaaaaacccaactttccttaaatagaaatatcaagtaacggctaaagattctccatcccgaagagccaagaacatcaaaagactcataaagcctaatctaagggatttaattagccatctaaatcctctgtttttttaatccaactactgcgaatacctagttaagtttcaaagtcatgaggagctttgggagattgttaaactatcaactatgtatagttaaattaagaggatgattaagaatctaattaagatgggtttttttttttaacttacatgatgtgagatagagaccaaaggatactgtattgatggaaatcctctgttggatcaaaccaaagattgtatctttcttctctgcccaagtgtgtgcttccattaccgtatatattggtctgaatcctccattctctgcctctaatattccccaaaaactcaaaatcaatctcgtcatgattcttctcatataagtccccatttgataactgagaagaacataaaaaagtttcaagatttgtgctttctaaaatcagtggaagaaaaaaacaattttcatgagaaatctaagagattagagattgttgcttacataaaaggcgataacaactcctgcagagtaatctgctggcaatttgatagaggaactgaagaagccatgcaagtaaatatcatttgagacaaatccagaacctgtaaacatcatttaagaagaatactatgttaataacaattaaagaaacagaaacggaacatactcagaggaacaagaacacaaaccggttctttcatcaagcgttaaccggacagattttccatctctgtgaacaataagattctggtcaccaaagagctgtgtgtaaccttcgtcgaactgtataagaggaagcttttgtagagcaaatccagaaaccaaactggtgaagagtgacatgaaaactaaaaatcgagttataaaacccattttttgttatgaatgaaaaacgtttctgtgtataagagtattatgaggacgaaaagagaagagacttaaatggataaatagcgtcttgaggacgagttttggagctgtattgaaagagagagagagagagagagaggatagtgaaagaaatagtatgagtatgaatatgaggcagagtacttctggctatggttggtttatacttttaatcttcataaatatgtcagtttgttttttccataattacttttatttatttattgcattggaccagtaaaagatcaaaaggctatgctgtaacttttttttcaagagattctaatttgcaattagactgatggaatcttaaactaggattattattctattttacatgttttaaagatatactaatttgcaattagactgatggaatatcttaaacttggattctttttccattttacatgttttaaaagaaaaccatggcatatcgactgatagctaaggttattacaattttgttagcatatactacaaaatttaccgcattgaaggatcagatcttttttttttttttctactaaggatcagatctttattagtgggaaaaggggtccttttatatttggacgatcagatctttttttttcttaaagatattaaagacaggggagaaaaaaacaagagtagcaataaagcatagggtgctttgctgcttacacatgtgtcccgacaaatagtcacaggtagagtcactaacactacaatcttttttcttttcagacaaaaagaaaaaaaaactactatctatacagatataagtttacaagctctttaaaacaaaataagtttcaatcattgtaacatttcatgtagggatttttaaaaaaattgattcaaatccgtttgaaattgtaaaaggaaaaaagaaaaaaaaaatcttatcaattgaagtattcttataaaagaatcataaaacaaaattgttttagctgatcaaaatacatatctaaatcgaagaaatttatttacatatgcaagtgtggatagatatggtgagttggggacacacgggtacattttaagaaaaagtgaaatcattgagtatgaaaaacaacaacaagttgtgtcgaagctttatatgtagaggaaatattaaaataaaattaaaaaagaaaataaaagtgatgtagccgttacctgctccatttgccgtgacattttgatgatacatttctcaaatcttattgtcatcaagtgatcataaatcataattcagggatttgcctttactaaacaaatgacccgcgataaaactagattcacgtgcagaagaaacccatcaccaacaaagatttaaacgttgctccgacacgtgaggcggtgagggtagcatcatcgaacgagtggttaggacttaggctgtaacgtttgacaccacgtagatgtgtcaatgaatgcccgataggtgccggccagttgacaaaacggagtcgtaactcgtaacgttaatgacttaatgtaatgcaactttaataaagtaactatgaacacctaatccctgcaaaagctacaacaagtgagtcggtgaactggaggtatttaaagcatatatattcatgattttacaatttcgtactatttaacgtagcatgaagactcttttatttttcgttgaaatatcatgaaattttgtctgtagtctgtcaggacaattactgcacaaaatatcattaatggattcatattaaaaatttaggttattcaatcaaaattcacgagcttattcttgtctcttggtaagacttaagagcgtctcaagtctcaacattccataagattctctgagcaatgtctcgtacagttgcttgtttaatatttaggcataaatcatatctatatattactcttaacttaagccgacatattaacttgattatcagggattattaacaattagttgtcacagtcccaactaaaactttgatgtaagagacccgattaagtgattaaataaaaagatcctccaaactcttactaaaaaaaaaaaaaaaaaaaaaaagagtaactttgtatgaactatgaatgatacatatcatacattacatgaatttgactacttttgtgaatggcctgtgagtgctgacgtatacacttttgtccacgtcagcatcaagtagccggtggacctctctcgatggtgcccactggtaagtaatgtcactgaaacggataaattatttctgcagcgcaattaacggcaatattgacgccgttaataccctttgtggacgaataccactgtctgtcaggtaagtaggtccacatcaattcacgcgtcacataaacaaagcaatttacattatcattgttgtgtatagatttggtaacgaaaacaaaataaacatttgtttcttattgttttttgttagaaaagttaaaaatgataataatttgggaactcacaacaacggtcatcgtcccaacaagtctgctgggagcaaattagcgaagaaaaagagttttctgctaacgtgtgcgtcgtttgatctgagctcatggaatctaatggaagatcccaatgtggaatattcattcacgtgagattttttttttgtttgcatcaaatctcacgttggccaatcgcagccgttcatttcttcatggggattttcctcccatgcatgtgggtacttttttaagtttttgctggatccaacggctacgatccgaaatttggctatgtgcaattaagccaaataaaagaactcgggttaacaagtctaattagtaattagctttaactatcctagcaatgaaaggcgttgggagattcaaaggtaaactagtgtctagtgatatgataattgtatttgtaagctacaaaggccatgcgattacgtaccgttttttgaaaaaaagtaccgtcggaaacaactatggaatgggccttcattttcaaagcctgatacatagtgatatgtaataataagaaaactatatccaaaaattgccatgtcaccgtacatcaactcatatgccatccctctaaatatttgattgtactaaaactcagaataattgacgataatataggttatttcatatatttattatatttgaatgatcgaattcatttgaaaaactatcaaaatacaatttcttgatcagattattcaaagagtttctatacttttgggtcaattttagatgtatcacataaatatttagattagagtcaacgaggataattatactaatactgttgaattgttcaaagtttcagtttgataatattgtggtcaagatagttgaccattaattgacattgtattagtcaaaagacataacaaacaaattctcggtctattgaccaaaaaatttccaagtttgagaaaatctgatatttatataggagcgagccatgcagcgaatcttagtttaactctactttgaaaaataccatggaaaaaattaaagacctaataagcataagcctgtgatttatccactttgttggtggtatataaggtacgtaacatagaatcagcctccatcttcctttgatataagaaaatctatataaaccaaaactaatactcggttagctcagcaagtacaatttatttatgatatttcttgtgtatccaatccttaattagtgtaattagttagtataatcatttttattgtataacataaaaaacgattacatagtttggttgcggataccttccttgcctctcaccctagtctaatccatctttatattttgcaaaagttataaactattattcagccgctctttatgttaaagcgatcaccagccttgtttcttacatctttaactctgccctacctctcaaaatttaagaataaacataacatctttggacgacgtatagtaatggagttatatgtttgatctattcgtacgtgtttgttctccctctttattcaacataaagataaataatttcttacatcaaataattaagattgcaattctagaaaaaggcaatagaaggtagggccaaagtgagttagatatatgagattagaatcaaacgtacaaaaaattccaaaacattgaaagttcaaacccttacacattagctgtcttcgttatagaagcctcttcatttttattccaaacccttacacgtaagctattaattcgttcaccaatatcttaaatcactaattataaagtacgtagtaggaaaaaataccaaattttataattttccaccaattcttaaaaatattttattcccttcagaaaaacaataaaccatcgctttggatacttcaacattttaaaacgtcattttttgggggaaaatagcgacaaattttacattaacaaaaacatataaaaatggcacatttcaattttgtgcagggcattcgaaaattcgaaattgcgaagtttaaagattctaaaccacagttttttccggattgtggtcgaatcaacctttcgggttagatcaattttaacagcattggttagaggtatatactattaattagacatctggcgtacatatacgtacttacgtgtgattctaagtttccatttatatattgtttgtgttgttttcacaaaataatcactttagtataaataacccttttagatatcatccttacccgacagaacaggtgatactcaatctagcacattctcttctcttttgttctctgtatcgcgctctctctctctctcttcattgattgagtcatcatcttcttggacaagaagtggtccgaaccaaaaccaagccagagaatgaatctctcaggggatcgaacaactctaaagcgtcactcgtcgctttcaacacttgtggctcatttctttggcatcttagctgttgttctgatgctaatttggcttctccactaccgtgaaggcatcgagtatggctccgacaacccccttaaggttttaaatgtaagtttttattttatacactttctatatgttagtatgtatacatgtgaacaaattaaaaaaaaaaaaaactatacacgtgaacctttgatctaaaaatgtatgtatacatgcatgaaataattaaatcctttacctattaactgtaatgaatatcttttgctaattaattatataggtgcacccatttctcatgtactgtggatttctcttcctcgtgggccaaggtaatttcttgacgatctaagaaaataacaattaaaaaacttcccgaatagagattaattttgcatacggttgattcgagtatagaaccagttaagtttagttgaaatttgcccccaaattatatagcccgttcaaattcgttagaactcgtccatatactgaaatgtgttttcttttggcatagtgttattcatagaataattttgctatcgatatattgattttttcccctcgaattaataaatctggacacacgtgattttctgcagaacaaaagttacattcgtgattttgcatgtgtgtgttttttaaatgtttttgacaatgattggttgattatgggatgaagcaatgatgacttacaaaacggcgtacgcgtcgcaccaagttcagaaaatggttcacggtgggcttcacttaataggcttagttctaggtattgtcggaatctgcgccgcctttagattccacgacaaagtaaacctaaaagacatggtctctcttcactcctggatcggtctcaccactttcatcctcctcggcgtccaggttattaaactactatacttcataaatactactttaacgttacctaaactttcataaaaatggaaaaaaaaacttgcataaaaataactgaaccttatggtgcttgcgtataaatttcacagtggctattcggtgcgttcacattcttagcgccgcaatcatcgtcgggaacaaggacgaggatgatgccgtggcacgtcttaggtggtcgggctctactttatatgggtattgtcgcagcactgaccggactcatgcagagagctacgatgcttggtcagagcacaaacgctgagtcacgtctaattaacttcctcgggttagccattctactctttggcgtttccgtcgacttctccgtcgcccttggccgttacaactgaccggagtactatattagtctcacctttaaatcttgctttattattttataattctacgaattcttgtttgtttgtttgcgtgtgtagatgtaattcgtgtgatatctaattgatcacgagagtgattatttgatatttaaatttaattttggatattatttatcttcttttgtgtttgatctttgatgcttacttaaagtcttaaagtgataatttgcatatgttaattgtagtggtaaatttacaggtcagaaagcaacttaaacggtccagaaaattacatttaaatcccattcacttagctttatactctttctcagtataatatttttaatgtttttgtggtattatttaacaggaaagatgttttgagtggtatatattttggtgaaatagaactgtataagtgaatatttttttgcaaaaaagaatgataaactttgtttatatgtgtggctatatttatctgaaacttataagtttggacttaaaataaagtctacaaatagtcacttaatgagtaatgagaaatatttaagttatctaaaaactaaattttctatccaaatttaaattcttatctactagttgtactttcattttcatattcttttttatgattaacctttaaaaccaaaatatgtacggcagtacaaatgatttactttatacaaaatacatgtattatataatcatataaaatatatatagttataaatataatcaaaaacggaagttatagattaaaaaaaagatttagaagacaatttccagagaaacatataaaacacttatcactaattttgtatttcccacaaaacgaaacaaggagcagagtgcagagaaatggataattgaaaggctctgtttttcggattccttcataccaattgttgtcttgtaacttccattctcttcaacaatccagcaatctcagcctccattctcagcttcatgttcctgtaatcgcagtgcgaattctcaagcttcttgagctcctccagcttattcctccttctctcctccgtctcctgcagacacagacgcgctagtttctctgtgtactcctcctccatcttctccgtcttcatttctatcattctcttgaaactctctgcctctattctggcctcgtctgctttcttctggaacattcttgtttcagcctccttgattctcaccatgctctctaaactatcaaaactgttcatcattgcatctgttaacgcaaagctcttcttcttttgatcctttgatgttgaaggcgtcacagatgcctcgtcttttctgtagctcgtttccgctgcaacggttagctctctcggtgggtcgggaatttctggtattgactcagcatctgcaagaaattgtgataagagaaggatataatcaaacttcaatctatagaatcttatacaagtagaaattaggaacttacagttgaagaactgaatgatgaagttagaagcatcaagaggggaaatctgtttactctctagcttcttaaccatttcattggctttaagatgcaatgctttgccttttgcatcatcacttcctcggaaaacctttctaacacaatcaagctccttgatcaaagtctcaagtccccaattcttagcgcaacacacaaaaacatccttaacgaatccaaacatctctgacttatgagcacatccaatgcaatgaaacatcatctcagtagtacctctctgacctttcaaactatgtcccggtttgatcaaattcttctgaatcccacaagcagcatgacaccaatgcgaacacacatcacaaccaacccaactacaagtattgctagctgaatcaaatctcaaacaaacaggacacatacaagagctacaaaagcctttgttgttggaacagatcttgcattcacaatcatcaacaggcaagagactcttacaattcacattcctacatctcaagaagagaaagatctctaccaattcgttcatagggattctgatcttaccagagaggaaatacttaagccctgttcttacagctaccaagatatcaagctgatctttaacacatttcgataacgtctccttactaagatcagaccttttatcaatctggttctgaagattcaccagcttctccttcttctccggtgaatcaatcaagttccttagatactctttagctgattctagagtttcatcagccatcccttgaataatcaaagccacagaagaaatcgatttcgaaacgatgtcgtataacaccctctccgatctaaccgcatcgttatcttccaagttagctactttcttcctcgaatcgccggagatcgtgacttcattccccggccgagccggtaactccgagggaaagaaagagtaatcagcagagcttgaaggtttaccggaaactggattgttcgcgagcgctacgccgccgtcaccgattggtctgaatcggctatgaacagatccgttggttccttcgccggcgcaccagatgtgatcgtctttaccaacggagcaatcgaaatctgtggagtttcgagtcatcgagcagctaatgttgtgagagaaaggatgagagtaagagtaagacatcgacggcgccgtcgccgtgaaatcgtttgaaaacgacgtcgttgttctctcgctcgtcaccactctcggccttttcacggcgtttgacgccgttaaagacagagatacatcaggtaaagctaaagagagatttagggtttcgattttgttacttttcttatcttcttcttcttcagcttcttcttcttcttcgtgagccttacgtttagaagaattaggattcatttctctcaaattgaagaaatctctctcgacccatttatcatcgtagcttgaattctcagaaaaggtgactacttctttccccttttgaccaagactttcagcgagtttaccggagttttcacagagatagctaagagtgagctcgtttcctgatctgggtgatgattttgaagaaaacccaccatcgagattgttggaccggacgttgagaaagtcgacgcctttctgatgatactgaccggttttgtcgtcttgatgagtttggttgtttagattagagaatcgaggctttgatgttttggttcgagaacactctccatctccggcgagatctttctctccgatcatagcgttggatgagagagaatgagagatagagatagagacggagagtggatattacgatgcggagagagagagagagagattggtaaaacggtgggaaaaagtttggtcgtctcaatggcaaaagtgtaataacgtgagatttttgagggtacttttgtcattaaaaattcggcaagttcgagcataataatatatctaacgggtttttttttttggggggttcaaagtgttcacacgagtcactagacgcggtttttcgtcatgcttcgatgctttaaaatacagtacaagtttttgttttttctcggacataatgaaatttgggatgacaaataagtctcgtctttgtactcaaatcaaagcatatattcccatcgactgaacttaccacgtttaaagaaaaatgattacataatattattgagatatatagaaacataagtaaaaataacctaaatttgatgggctactgattaagatattgtttaattgtatttataagaactaaatcgataatacaatcctgtgaagtgatttacgtttcaagaatataaatggaccaggtccgaatatatattaaaagtatataatttaaaatttgaaaagtcaacacgtaacgtattattgatgcccaacttgtcatattcttcttacctttgttttgtaagcatttggcatatttttggcagtgtcgcacacagccgttgacttttttttaacaatgttattaattataggatatgcaattgtatgcaaataatcgtatatttatttgcacaaactgaatttatggtttaggattttcttaatggattcagtaaatgtaactaagctccacttaagatacggtcttttataatattgttttaagtgaaggcccattatctaagctatggtagtctcgtacttacgagtggtctcaactctcacgtaaattagattcacgctaaagggcccataaccactatctctatttcttcttatttctcacttccttctctacccccacactagcactatccatctaggatcatatcatggactcatggtcatatgatattcctaactgaaatacattcttcatgatcaaccttcagtagaacgacactcccactctcacatagccgtaaagctgacatttcaactacttgggctttaagttttacgtatatagttttattttattttaattgtttgatgtatcatgaatgtactggttacttaaacgaatgggttgaaaggtttaatcccaaccgtaatgttagaaaattaaaattgagattttataacacataagattataagtttataacacataagattaccatatttattagagaattagactgacttttatgtacgtacatacatatatgctagtatttattctataattgttacatacataaatctctaatttttgatcgaaaaaaaaatctctagtttacaagcatgttttgctttaaccattttacaaactgtttaatttgattaccgtcgagaatgcatcctatagcgtgtgtgaagaaaaacattaccatttttaaatctttagttaaattcgactacactctctttttaagctggatttgataagctttttcatatttgagatcagaaacagtgaagattagaaaaattgaaaacctttcatacgtaataaagaggaaatatcaaacaaggaaatattctttttaagaatatgagagtctaatgaattagggaaaataagaaataaatgtgtatgagcgacacaaatggtggcactaataattggtatactaagagctaattaagtccagctcgattaagtatataaatctgtagaggagttcttattacttaccttgtgtttgtttttgtaaatagtaatgataacctgtgtgttggtatcggagtatactgtgtcctggttttagggtttttgttctttttgattgcttactgcccaagcaaccagtccagactctgttgtatagggaacaaaaatgtgaaaacagtcacttaccttacgtttagtggtaaaaatgagatttgtatataatgagagtgttactgaaaacaccttaacgcattcaggcaactcgttatctgttgttctaacatggacctggagagaaagagaggttttgggattgtgaagattcttgtatattctcgatactaaaaggtattaaagtgttattgaagggactgatgatacctttatgactcgttggtatgcagagattttgttgtgttcgatgcaggcgagaaccacgagtgcagctgctacagttgagggccaaaaacagagttgagtttggtcggatagtgaggtaacagccaaggatttggctttcctttcaacttctggattggctcgagcagcttttaagtagaacctgacatgtataaatgatagtcatatgtatctttctgtgtggataatgtgtcttggaacatgaaaatatatagtcagagaggttttaccacaagaagttgaagattgtgggtgtgaagcatttgaagttgaggacttcttgaaccagccactccattgccaccacttcatgccggctatatcttaggttctgaatggtgaagttccttttccggatgctagttaaaaagagcaagtatcaggtgagcagttgaagaaaattgaactattcctgtgtattgtggaaggttctttccagtaaagagtgtttttgagaaacataatccaatattcgatacccacatgaaatgccaattcattgaaccataagggtttgtattagaccattattagtccttgatttggttaagcgtaatactcagtttcttgtaatggtcctaatctttttcctactcagaacacttttctaatgaacattggaagtcagaatcatgaagatggaatatggttggtacctgttgtaaggttgattttcttcaattctggtggccagagtaagactcgcaatcccgactagtattagagtcctttcgcttttgaatgatcctttgctcaggaatcgatccaacagaccaactcctagaaacaatgtctcttgctgaagccccatgtcagaacattgctgcttgtaatcagggagcagacaatcagcaacaaagaatatcatagctgactgatacataaaccttaaaagattccaaagtaagctatagatttccttaggctaaaacattcttaaaaccaggaacaggatctccaaatattcatttacttcataatcttctgctactgatacatatttctgagcttcaacattcagagatcaatgtatatgtaactaaatgcatttgaacagaaagttaaaattcacctttacaatccattgaaccatgatggagcgtagacgagggatgagaccagtattgtccatcctggagcagtatgccttagcacagtcccgcatatatgcatgacttctttctctttccctcagccttagatagctctcttccacctcctcatcatcaaaccttagcaactaaaacgaaaatgtatacttaagattcattccagaacaaaatttcagaatcaaacacagagcagaacaagtctcatatcaaaaatagactagtaatcgaatgaaatttcaaccatataaccacatacatcttcaatctctaaccactagcaattattccaagagatatgaaatcattataccacttacttcagagtgaatttcttcctcgcaagaagatccaaaatcgttgggaatcgtggatctacagaactgttccttgaactggaggtacagagagcgagaatgtgaaataggagaatcagaggaagatttctcagagaattcgctgccagagtcgaagaagatggacggagtgtaatccgagtaatcgaagtcggaatactgtgaatatatctctgaacgttgctcagatgactcatcatcgagagaatccgaaacctcttccgagaatttctcagagcaagcgagatcagagacgcatccgactatctcaagctccggcttcaattccttggccgatccaagagaggaatcagcttccacgaagctgctcggcttggagatttcaatttcttcgttatcagctcctccggtaacgctcccgaacttggaacagtactcaactccagatatgacagaaacgacgtcgctctccttattctccgattcgaaattcaaactccggctgttggagacatgtccggcgaaggtcacatcggatcgtgagaaagagatctcatcgttgtcgttaattttatttcccttcacattcaatctccttaatccagcaccagaattcgaatcaacacaagacgattcgcttacttcgatctcatctccctccttctccttgtgtagcttagagtaagacctcgtaatccttcgaaatttcgaatcaccaatcgtctccttcacattataaccaggtttagaaacttctacctcttcaattagagtcttcttcggattcgagctcttctcgactctgctcgaaccacaggaaacgttgtcatcagctagcaaatcggagcaggaatcgacagaagcagcagagactccgatttgtttgctccagagaggtgattgaacaagaacgggagagatctgtgctctcttccggcgtaatcgcgtcgaccggagcttcttcccggcgaacggcgtcggctcaggcttgcgctttgaattcctcatcgcgatctccttcattttttctccgtacgaaagcttgaaactagaaattagaaattcgaattttgaaaatggaagttcgttagtcagagactagagagtgggctgatgcagttatagaagtttcttgggaagagtggggatgttggagagtgagagagagatattataccctacggtttggtgcacgtgaaaccagtcgtaaatttggacgctattcttgtttggctaatgtagagatcagcgtttgcgtttgaatttatgcatctgcgtcagtacaatcacagatttagctaaaaaagcatgcggttttgataattacttcaactgattgatgttttataattaatttctctagtatgctttttaacatacagtctaatcatttttcttgcatcaaatcacgtggaagaactaaaagaaacataaattgagcacacgtgtgaatttttttttaaaaaaatcatagataagtttgtgaatgtcatattgttggaattaaaagatgatttaagaagactttttttatacactgaaattgatcactgttaatatattataggtacactactttataggtacactacttgtgtaacatttgttatgtcgcaatggcatggtcaagcagattatattaggccctgtaaatttacattttctgcatatgttttactggtttttttgtttctttttccattggtgatcttattttagttgattaattttgggccaaaaaagtaaacttttaagcccaatacaacaaatagtatacccaatatctaaatatcacctttagttctttacgaagcccaaaacatttcggaaaacggcaaaatgtaaatctcgttcatggtttggttgaatccgatccaaattatatattatatatatcacattagagaatttagggataaaacaaaaaaaacttgtatatatttcaacttgaatggtataatataattagtaaaccccatcaaaaacatataaaccaagattagatataaaatcaaataaactctaaacttttaatgttggaaagttcgtaatcacttctttatcaaaattatcttctttttaaaacatcagttatcagagaatcatctaaatatagtaaatacagatataagacacggaatcaggtcacaaaatccagcctatttaaaattctaagatcacattgaccagaaaattcataatttccaaaataaacacctcttttagcagaaacaagtttatcatctatttcactaaaagaaagaaagaaaaggagatcctatcttttccggttttctctgtcaatttcgcatataaaacgattcaagtttacgtctttgttaagaaaaaaaaaaacataaaaccatgagaaacctcataaatttcgctgttcttatcatgaccatcttcatcgtttcagcctcaggtacagattatcttttaaatagtagttttaatcttatctttataagaagccaaatcctgttaattaatgtcacaaattttctgatgtttgtttaaaggtgcgagagagacgagaatgatggaacaaacttgccccgttttctggccaatggttccatgcgatgctaacaaatgcgaacaaatgtgtcgcgattattacggttctgttccctcttactgtaatagaatcggaactccaattgctgaatgcgcctgtagtcttacaccatgttaatgacccaaaggctttttcaaggatattttaagcttagtcactttttatctttgtgtataaatttatgtacacaaaaatatgcaacaaccgttacatagtaagaaaggcaatgcgttacaacttacaagatgacgcaattataaatggttatgaaaaataatcatggaagctagtgttgtttttatatttaaattttactgttgttttctaaagagtgtgactaaatgatcaatgcaatatttacaatataattagttttatttttcttaaataaaaaagcaggagggcatgccataaattacggttaccaataaacgatcatacaaacgcgttacgtaaacgcagtacaataaatcgtgagtagactgagtagtaatttggcaaaatgcattgacatagtagcaccgaacagttgttcatgttacccttttttaagggggtgatgacataacgatgtcgtttagctgagtgtacaccgcatccacaaaacgatgcgtttcggtaagaggcttctccattgcttccttgagctcccgtagagtcgagcaatacgcttcctattatgtgaatcaatttacaagtataagtgctactgtttttttcttggcaaaataaacttagaatacttgaaagtcaaattaatttgcaaaggaaaaaataaaagaacgtgaaaagttgttttttgttgtgtaaatatgttttggcagggagaaaaaaaaaaaagaaccatgaattgatcaagttctgaagaggtagcttcggaggaagagtcagggtggagagagagtttggatagggcaagatcatcagccgtgttcatgatctccggtgagtcaaagtcgccggaacacacctggtcgtggttgggtccaaatacataagagataaacatttatactcatacatcactttaataaaaaagagagagagggaagcattaagaggggtacctttaaacaattgagatgtgagtgaagaagaagcccatacaaagggtggcttgagattctcttctttagaatctcttcttcttcttgtgcttcttcttttagactatgattaatctcttgtttcatgttttctaagatactgttctcatctttcttcacatccatgtttaacactagtaaatttcactgtctcacatgctctacaagtatgtgtgtatatatacacacatgtatagaaacatatctaagtgtgaagctagggttttaagattactttctggtcttgttgtcggtctacgagacattactgtacaaaaaataattgaatcatacgataacattagtcattggtcaaactctggtcgacatgtcacgtatcatatttcataactattaattaagatgctaacaatattcagctaaataaaaacaaatttatgggttttataatctattagaaatgaatttgtctcataatcaattgtcattgatttacacataaaaacacaataaatgtgatacagaataagtaaaagttaaggagatgaaaaaggatgagaaataagcaaaaggagatagagatgaagtgaaaggagaagagaggaggaacagtggaattaagaagaaaagagtgaagcattgtatcattgcttacgaaagcactttgagtcagactgtcgataaatagaattacgcacaagtttcattgccttcaatttttgcctttttcgtttccatcctttctatctcctaaatattgcaaattatatgtatccatttacataacataagctaacaacaacaaatgtagaataatctcaaatctacacgtatatacattgattatttatttggtattgttttattgaaacaataacacaatcgcataatcaaaatttgtgttaatctagcaatctgatgagttttgatttgggaattagtgggttgatcttaaaacactagctagtaatattaagatgatatatacattggaagataatgttggaggagcagagagagcaaggaaggtggacaaaaaaggaatcagaagagggaacagtgagaagatcgtaaataggaatagaactgttgcatcaatgggacagttccatttttgatgagttactagtttgccagttttggagccccaaaccctattattgatcttccgataacgacctttcgtactatccactttcttcttttttcaaagataaaacaatttttacttatttttctacttttccttaagtctccaactatcaatcttaagtttacttcatttattggtctcttgattcaagatggtgtgaccacaattagatacttcattttattttattttaaaaagaacaacttcatatttagtatataaaatgatagattttaggtgaatgtaaatattaacaactccaacatatatatttcagatgtgtttatataatttgggtttctatctagtattttttttttttttataggacataggaaaatgtctaatagttttaactttggtttgggttcaattttaatcaaaagcatctttgttctctaatgaaattgaatagaataaaatttcgactaagttagttaatttatacaaataaaagaacaatctatgaacatacagtcatttagcacatccttaactttcatcaacacatgactttattgcttcacttctcttccctaacttgtctactacccaaaatataccaagaacacgagattcaaactacacaaaagcacttacttgattctacaattccatatctaatagaagagattaaatacagtgaagttgcagcagggatttcatcacttgagtctcttgcttcttatggaaagcaccgggaaacacttcaccaatcttctctttgcgcagctaatcaacttctgagattcatgatactccattgcgagtcggtcataccagcacagagggcagagaaagttcccgtattcatcaacgttaaccggacaattcaaacactccttgtgaacttttgctgcacactcgcttctgctacaaatcaataacgttccttctttctcacacttccagcatacattctccggtcttgttcgggagctcgaaggaagaaggttcaagtaagtgtttggatttttcttgatcgagggtggatctttatctgactcatcatcgctcccactgattaaccaggttccatcttttgtacattttacatgtgcatcctctggagatcttctagagcttggagaaaaggtggtctcatcggtagtattaccgttgtgccttggagaaaaggtcccatcactggttgtgccttgatcactctcagtatcgtcattaatcacaactacttcacctttttcattggtgtgcattggctcatcttcatcgtcgatggcaattactttatccttctcgtttctgtttagttccaaaccaatatgcacttgttgctcatcaatggattccttctcgttaccaatatgcacatgttgctcatcagtgggttccttcgcgttaccaatatgtaattgctgttcatctaccggctcctcctcgcataaatccatgtgcactgatctatcatctctaaaaacagggtcatttgtttccatgaaaggagttgcactagtctgattctccattaaactcacatctctcagctacacaatccaaacaaaaaaaaagcattgcgcattgttatttcaatcacttgattatgcatctttagcatgaaacaaaggaaaagaaagtataagtaatcgttaccttctctagtgcacattgtggcaaacacaagttcttgtgagcaataaatggtagaacattgaactttgatagctctggcatgcccactcgtagttctgctactggaatctaacatttgagaacaaacgactataattagaactttatacatcctaatactactactactactactactagtcaagttactagagtttgcttgctcatacctctttcagaattcctctgagaacatcagcgttactcaaagataaatcaaactccactttttcctctaaagcagaagcaacaccaacaccgttagcatcgctcatgcttggatcaaacatgaactccaagactctaagagacaggacttcattaatcctcttcccatagtcatcagagtactgataaccaatgttcatcaaatctgaaacaaggaacttcatattaacacttgctctcaaaatacacaaaaaccgtaagaggagtttcgggagttaccgagtaagcagcttagatccttgacaaatttggctacatattcaatacaccataaccattcagctatttgtgcgggtcgagaagaatactcatccatgagatcctcgaggctcaaatcagaaccaccatggtcatccataagagctgcgttacacaaaaatacagaatcaataaaccctaaaccattttctccttaaaaccctcaaatcgatcaattactaaagacaagcctagagatttcaacaatcaatcaaaaactagcaatgtcatacacttagattcaacatcactgatacaaaatcgctatcagacataccatagaaagagaaatgtaagtaagaatatgaaagcgaagcatcaattggctaaaacgtagaaataaggaagatgaattttacaaaccctagaagtgagttagcgcgaaattttccataatgaaaatagaaaaagaaaagcccattgatttcgcgaaactgccgccttaaattttgaaacttttccttaagaaaatttgaaatcgagacattcttctccggtcaccatgttggagtctggttagtggggaacttgggaagacgaaaagacagctgtgtatattgggccgtaaaagggccttactcgtttttctataactgatcagcaccgttgaaatttaaataaaatcatcacgtaggcttattaactaaaaagctggcataatatttacttaggccgacgaaaaagctttattgggcctggtccattaatatgtctattttctatgtctattatttccaaagaaaatagacatattaatacatgaaataaaaatagacatattaatacatgaaataaaaatagacatattaatacatggaaaatagactcgcatttatatgttgtctattttcgttgatccaaacaaaaaacaaacagaaatcaattatttaaaatatgcaatacaccaaccaacaagctacacgagtgttaaaaactatatgattaattagatatatagccagccgtaaaaaaaaaaaaaaaaaaaaaatagatatagagccaaattttaatttaaaacgtgaggcaaaattataattaaggaatgcagttttttcatgggctattttttttaagatagcagaagtaatgtatataaattgtgatcatttgaaaaaaggatttaatgtataatttgactaatcctgcgtactaattaaaccaatgacagtgaaaaagattataagaaataaagtaatagtaataaacaaacaagaaagacgcgttgcgaaagctgcgttcacacggacgctaatgatttaagatcaaatcatcttggagatgtatatctacacactacacttgtttcttgtcgactatatgtgaccctttttataacttacttttttatttgtctgtatcattacctcgaaaagaaacaaccaaacaccaatcgtcactacatatattttacctttaaaccttgacatgtgaatctaaaaacataacttatacgtatttgttccgtttattccgattctgaacaacttattaaaatgctacaaatactcgacatagaagtcaagctatgatatcgagttagagaggatgtaaacaatgcaattttatgttctgatgttgatgtgtatgtgtatttaccgacattgttttgtgttatctttatgcgtatacgcgattttgtagtcacatcagcttaatggtgtatgtgtgaaaacaaaagcaaataagagaaaaagaagaggcaacttctgtgtttcttatgtagatgcttttattatgtaagaaagagacgttagacattgctatccaaaattaactaatcagtcaaacaagtttttgaaataaagtcatgttcatattatctagttttatcacctaaactggaaatttttgatagggttaattagccgtgcggagtactacttccaaagcttaaattttagattgctaattatgataaactaaacgttagtgcgtattaccacttttcatgacaaatggaatgattgaaaattcgaaactaggaacaaaaaaaaagaagctgatttggtataatcagttgttaaattcatgtacaaatcgtatatatggttggagctagctagactgcgatcggtttgatatgtgatcaagtcataaaataagacttttgaaactctagtttcttcttcttcttgagacgcgggttaaattgtcaaagtcacaaatctttttgttttctgttttatggaaatttatatgcaattcttatggccaattttgattgcaacaaacaaaatttaaatgcatcacattcaattaaaccacatcaacgttagttaccatacatgtatggactaaaacatctgtagttgatttatagcgtagacttcctatggcttttagtatctaaaattctaattaatttaatatccaccaaaatcactataatgttttaacctttttaaagcataccgttgcaagtaatctatttacgtgttcctccgacgacttcgtaaacgatgctgttattcgtcgttttcatacttttggaataatccgataatcacagcatcacgttctttctcttcctctgttcaagattaatttatataataagttttttgattaatcatcattacaagcaatcaaccattaattatttatttctatattagtagtatatatacaaatgccttttctcctacaaaagactcgctgcttttactacaagaggaaacagagatgagcagagacggcggagatgtaattgagacggcggttaagagtcttggcaaaggtttcgatttgacggcggatttccggttgaaatactgtaaagacggcgacggctccgccggagatgacagattggttgtgcttgaccaaactcaaaacagagaattgcatattcctggtttcggtgtttttcaaaatgtctccgccgatataaactgcgacaaaggagaacgaactcgattccgttccgacattcttgacttcaacaaggttcctcagttttacagtttcttgatatccttaaacttctaaatcacatatagatatttacattacatgtgtgtttttgttgttgttgttttggatcattcagatgtcggagtattttaaccagaggtcgtcggtgaccggaaaaataccgtcgggaaatttcaacgcgacgttcgggtttcaaagcgggtcatgggcgacagacgccgcaaacgttaaatctttaggtcttgacgcttctgttgtaacgctatttaatctccacatacacaatcctaatcgtttgcggctcactgaccgcgtccgaaacgcagttccttcatcttgggacccacaattattggctaggtcagtagtacccatttttttttttagtatatactttcattgactaagtgatagatatatagttaacattatgagcacaacaaacatattatcaaaaaattctgaacttggacaatttgttttagttgaattgtgacagaacagctgtggcatttttgactaattctatgttagtatcaattaatgtagaatatctggtttttctcctatcttttgaatatttaaattcaattgtcaacgtttccaactacgatcgtaccgaagaatggggaagtttcttgattttttctcattgaactgaagctagaaaaactaataaaaaggttgaaaaacttgaacattatttgaaaagactctgaaacaataatctaacatataacttaccagccaacttgttatcaaaaacattagctaattcgtaataatttgtcaccactatagtatctatagtaataataatagaaaacctaaattggaaaaggacaggtttatagagaggtatggaacacacgtaataacaggagtgagcgtaggaggacaagacgtggtagttgtgaggcaagacaagtcatctgatctcgacaacgacctcctccgtcaccatctctatgatcttggcgaccaattgtttaccggctcttgccttctctctacacgccggctcaataaggcctatcaccactcacactctcaacccaaggtcagctacattatagctaacttcataattttaatcgaaatttcaatttagcatttaacactacgttacaatatccattttaaattttctaactatacaaccatttacactgttaatattgcagtttccggaggctttcaacgtctttgatgacaaacaaacggttgctttcaacaatttttcgataaattctcaaaatgtaagtaagtttcatatatgatatatgacatagaaaattgtatagtgaaaatgttcatcactagaagaacaatttgcatgcagggaataacggttatatgcgccaaaagaggaggcgacggaagagcaaagagccatagcgaatggctaataacagtcccggacaagcctgacgcgatcaatttcaactttattccgatcacatcactccttaaagacgtccctggctctggtcttctctctcacgccatgtctctctacctaagatgtaactactcttcttgcctcattttgactactgaaatgagtagtaatacctttggtaaataaatgatttcatgggtggtattttgtacagacaagccgccgttaatggacctacaatacttcttggacttctctgggccaagagcatgggctccggtccataacgaccttccatttggcgcggcaccaaatatggcttcggcctatccagctcttcacatcaacttcatgggtcccaaactatacgttaataccactcccgtacgtgtatttttatacatcccaaattacacatgtaagaatatttgtagttactaattggtgacgttttatttcccgggctaggtgactagcgagaagaatccagtaaccggaatgcgatttttccttgaaggcaagaaatgcaataggctggctatacacctacaacacctagacaacacaagaactacggttggggaaaagatcactgacgaacatatatggagaggctccgatcaaatcaccgacaatgatcgctacttcgaacctttaaacggtaagaaattctcacacgtgtgtacggttccagtgaagtacgacccaaactggatcaaaacaacaagcaatcacaagtcccaaaacgacgtagctttcatcgtcaccggagcacaactcgaagtgaaaaaacacggctcaaaatccgttctccatctccgactccgttacactaaagtctctgatcattacgtcgttcagaatagttgggttcatggaccaattgggacttctcagaaatcgggaatcttctcttccatgagcatgccgttgactagtgggagtgttcatcataatatgatccaaaaagacaaaaacgaggtcgttttggattcaggtgtcttccctggtggacctcctgtgccggcgaataacaagatagtgaaattcgtcgatctttcgcagttatgtcgaggacctcaacatagtcctggtcattggttagtcactggagtgaggctttacttggacaagggcaaactttgcttacacgtcaagtttgctctgctacatcgccaacgtcttcttgtctcttcttgaagaaaatataacattatttttttatatacaagtacgtttctttttttgttttcctccaaaattgcgacatacaaaggatgatttcttgattttggagtgtgtgaatatatagagctgtgtatgtgctttaatgggattggcccattcagagaaattgtttatgtacatacatatgttgagaggtcgaacatagaactcttagtggtagcaagtttttctgtttggtactaattaattttagagatttttgtacaaatgttttcgagatactgtaaaaaaaaagaatgaatgaagcttcaaatttgagttaattcgatcaaataagaaagtagaaacttctgatttcactaaaaaccaaccatatttatagaaattgctgattgcacacaaaaccaaacatttatgtacatcataagacataagtcagaaccaaaaaaaaaaaatcaaccgaaacgcagaacatggtctaaccgctcgagcgtctcctgccgctgacgcctcccaagattggtcttcttgatcctcacaagcttatcataaacgcaccacgcaaaacttaagaaatggtcacgattcaaaccctcattataaagtccccagtaacttgagtggtacgttacatgataccaagccgaagcctttgctgactcattttcttcttcttcagaagcattgaacaacgacaaagtttctttcctcaacgcccgaaccgctcttccaatcgattctgcatctcgtctcttggtgaatgactttgacatcctcattataccaccactaagaatctcagcctcagtcttaatcccatagtaatccatcaaattacctaacttgaaatcataattcgccttctggtagaaagcttcatcaacatactcctcaaatccgtcaacttccatgtctttatcataagactttgaggccacatcaagcgtgaatgatttgatcgagatcaacggtggagctcgctcttttacctctctaaaaagcttaccaatcacgttcttcgactcatatgttggcttatccggtttctccatgaaatcaggatactctttcacgtaaagatgttgcggtatcacagctgcaacaccagtttttgggaaatctaccgcagttgaaaacttctttgcaagctcaatgcatgggtcactaaacgccttgagtggttccttatccgcaaaggcggtatgagcattcgcgatgatccctaaactatcattcacaatgtagttcgcaaagtactcttcaacttcctggaaaccaaggtagccaatcaatctcctaacgccaaaaaaacaaaaatataaccaaagtgatcaaattttattataacctcaattgtgacatcatgatccaagatttgagttggttcaggagtgtagtccattggttcagacgttcttggcggaaccaattcttgatcccaacatacaaagtaaatatctccatctaaatcactcccagaacattcatttgggtgtggcctatgcacaaaagaacacaagattccaatgaaaagttcgagacttaaaacaataaaagctcgaaaaaaacacgaatcaagcatagaaaaatgtttacctcaagcccttttgcgggaacacaacgcagtccaccatatgatttaaagctgggacattgacagcttgaagaacacgcacgtcaccaggatgcaggcatgggtttttggcaacaacaacaggtccggtgatgatgaatcgccttcccggcctcatgggatctgaatactgcactactacctgaccatactccagtgttctggtctcgtctaggcatcccatcatagatcttccaccagaaatgaaaatccttgtttttgtccgtagttccaacaacttagatgccctgaaattctgaagcatcattgaaaggaaaggttcagcgtcaggtttatagccacacaagatcaatgccttgagaatatttgtgttttcccctggagccattaaaccaagagcctcgtgagcttccaaaggatgagtcaagattgcgtcgagacgatccacaacttccctttgtttcttctcaaacacactgtccgtaactccaagagtagacaaaagtgtaatcagttgtctgttcatataacaaggttggtacttgctccacgccagaacatcaagcttggtgttctccgattcgaatttgctcatactcttcctcagagacagtttctttgatgagtttggatcaacagccaccactcctttataaccgccataacggatttgaaaagcagatggagaaaactctgtaagaccacatttcctcgctacctttctagcaaattcagctgatatctttcctattccatcggaaaacacatagcgtgtccctaaagatataatctcaacatcaggaatcacttcaatctcatcactcctaacattaagtgtctctcttgaagagctaaaagattgaccaagccttgcagcatatttagctacatttcttatatggtcaaaatcacccatccaagctctgatatgtgctgctgtaatccgatctattggtgcaaacatccaagcagagttctcccgcaactggctggaagaaaaggcgagaaactcaaacttcttatcgcctatgacaatcccatcgcgaagaacagaatatatcctgtcgtataacttggttcttctttgagtagaagagcgtggagatagatccatggaacgaaccttttcaagatcttcatcaacaaatgagaccctgaggaagttgttgatatacttggagtaatgtcgaagcacacgattagaaacattcacctccggtccagagaaatagactcttgctggtgtaacttgaacgcgatacatataaacaagtccatcatcaagagatattgtaggagacagtggaagctttcctttcgatatccacttcttgtactcatcgcgaagccaatgagcaggctcatagcaacattctccaaggtgaaagagtttttcaagacagtgatctatgagagctctatcatattttttctgattaagcaaccgataaaagtcaagatcaagagctggcccggagagacacgcgttctgcaccaatgtgttaagtttaaacaagatctcaaaaggcaaactaaaccctggaggaggatcaacaacaggaacaagtgtgttagcattagatgaatagctagaaccagattcaatgagaaaagagctggctctgtgctctgcatagttggcaaaattctctctgaaatcaggaacattaagatgaacaggaagctctaaacaaaacgctgttgattgaccaatacaagaagatgaagtgaaatctgtagttctaatccattgctcatcagacccatcactgtaaaaatccattattccaaacaaaagattgataggttgatcctctttctcaaatattttaggagcaccaatcacctgaatcacaagaaacttcgatgatcgtccttgcggagaatgcaaatcaatctgccatatattctcatacgaaagctcaagacgataatccttttgataccaagaaaacgaaaaatgcagtttcctcatcccaattccaaacgagacacaaacatcttgagcactccatagagttaaaaacttcttagtcgagacttgacatccaaagaacatctttaaaccagagatggtgtgtaatgaagctcttggctttggaacaatgtcttgttcaacttcaaaagccttgagataagatcttccatagtaaagacgttctgctgccgcagtgatgatcagcctcgtatgtctctcagatgtgaattgaacaatggcatagactcttggaccacctttctttggttgtctaactttgattgcgtaaacagtgcctgaaccagtgagtctttcaagaaacttcttaacttcttctgcgctcacaccattagggaatccaaacacttgaattgtcttccccatctttctctatatcaacctaaacaatattttttgaagaatctaagatcactactcaaacaagaagaaacagagggcttaaagatatacgatgacagataacttaccgcggcgatgaatgatctctgttccctcagtttccgatgatagcctttggattctcactttcatttacactgagaacaaagaaccaagtacaataattatcgaaagaaaaagagaaagaaagacccaagtccaaggaccaaagtcttcttttttcttctcgtcttctcaggtctcttattggctgagagattaatcctctgtttcgcgtagcaagttaacttcgacatgtttacgtccgattgctgacgtcaatataccagagtttgatcggacggtggaaagaactctcattgatgtattattttttatttatgattaaagactaataagagaggatttagaaggataatgaatgcaactggagatatattatgaacgattgattaagatttaaagagtctttaaaaaaggaagtagagatattcgtatattgatggaaaataaacaaatcatatatataatagcagagttttctctcttctaaaagtgtccacgtcactacatctttttaatgtggagcccacatgtttttactcgccttcacatttttttttatgcgtgaaatagatttagtaatgtttatggggccacgatttggtcaaaaagcccatgagccaaagaaccaaatagacttagtgatgtttatcgggccaagatttagtcaaaaaacctatgaaccgaaatgacctaagaaaacccagttaaaattgcaaacccttgatttcattttctcctattcgatcgacgcaattcagaggacgacgaaagagaaaaagagtgtttcagtcactgccctgttgatgcacgaatttcaacaaagtatatttctaagttctttgataagggaaaaacattctcatcgcgttgaaggtcgggagttaggtcgttcttgcgataaacatagtttattagttttatagctaggcgaggagatggtcgttgagtgatgtggagcttgaagacgagctggagagcttaaagacgagctgaggagcttgaggacgagctcaggagcttgaggacgagctggggaacttgaggacgagctgaggagcttgaggacgagctgagaagcttgaggacgagcagaggagctagaggacgagcagaggagcttgagaacgagctaaggagcttgaggacgagctgaggagcttgagggcgagcagaggagctagagaacgagctgaggagcttgaagacgttttaatatggattttttcctccttttttccttgagatgcctctctatttatagaaaaactaagctggtgataggatcatggaccaacttttatgggctttttgggcttgatgttgattagtttattcttgatttgggccgagctaaaatgaggggtgcaatccatctccaacatgccccatggagctttccgtatttttcttccccagaagctcaaacatcaacagttatttactaaaaggtacttaaatacatggcttaattcctacaaaattccactacttgcaatttaattcatacttttaatatctcaaatcgaaactgtaactggagaaaagcaaaaacctcctatagatcttcctttaaactactataaaatcatcatctcccatcacccccaaacacaattatcaatttccaccagaaaatattacacactctgaaaatggctgaagttgatgttgttgcaattccttctaaagcaaactatgtagcttttgatgctttacgtcttggtcgctctactcaacaggttgttggtcgcctacttcgtttttgggatgctcgcaacatcaagaaagatggccaattcatgggcatagtcctcctgttacttgatgaaaaagtaaatcatcttagatgtttaatgttttttttgtttcatatgtaattgatggccaactaacacttaatttgtttcattaatagtgctccgtaatccatgcttttatcccagcagctcttgcttcacatttccgccaagttttgcgtgaaggcataatcttcaatgttagtgggtttgaagtgggacgttgcacgaaactctacaagatcactgaccatccttttctcctccgttttctccctgccacaacgattattgaagtttcagatgttggccctacaattgagagggaaaaatttatgctacgtaactttgacaaccttcaagctcttgctaacaccaacattgaacttcctggtaatattcttcatgattcttacattttttaaacatgaactatgattataacacctttgaaatgatctagatgttgtaggccaaatcactttcgtccaagggtcaaacttgaatgatccaacttctactcaacgtttggttttgcgataccggattgattcgtaagctagcacttccaaaccaaaaaaaaataatgaacaaaactttaaaattgaactgatacttccgtctttttattttaaggtctgttattgtctacttatcactatgggatgatgtcgccgcaacctttcgtgcccatcttagctctggtgatacaatttactcggtcatgcttgaggacgagctgaggagcttgaggacgagctgaggagcttgaggacgagcaaaggagcttgaggacgagcagaggagcttgaggacgagctgaggagcttgagggcgagctgataagcttgaggacgagcagaggagctagagaacgagctgaggagcttgaagacgttttaatatggatttcttcgtccttttttccttgagatgcctctctatttatagaaaaactaagctggtgataggatcatggaccaacttttatgggctttttgggcttgatgttgattagtttattcttgatttgggccgagctaaaatgaggggtgcaatccatcccccaacatgccccatggagctttccgtatttttcttccccagaagctcaaacatcaacagttattcactaaaaggtacttaaatacatggcttaattcctacaaaattctactacttgcaattaaattcatacttttaatatctcaaatcgaaattgtaactggagaaaagcaaaaacctcctatagatcttcctttaaattactataaaatcatcatctcctatactaggtgcatcagcaaacgatgaacgcgtgctcaaaacccttaatcttgctccgttggtgaagaaaccgttatcatgccgcaaacaccatcttattatgaagaaatgtcttgccaacaacaacccggatgctcactacataaaaggtataatatggtactttaaccttgatcattgtgacgttggtctccaccatattggcatagcagctaacggaggccagaaagaagcaatctacatgtatgtcatgctattattatgtagaggaaggactgaagagggaaaaacctatatgagccaacttgaatgggctaaagacaccaccatggctgaaacgtgttggaaacaaatcaaaacttcactaaatgggattagagtggcgagaaaaagatgctacatgatatcacttcgcaacatgaaaccccccgacgtgtgccatccaagaaatttggacaacacatgtgagaaatgttttttctacaaacaaatgtttaagtttatttttatggtataacttaaacaaaacaactagagagttggaaactgtttttaaaaaattccctataatgtttgtggcagtgaactatcacaaagactcaaaacaaagtaaaagttattactcttatttcttttgctttaatgtgtgtcattccttgctgttataaggaaatttatatttacaataaaatcaaacttttaattaattatctaagcatatcgtactttcaatgttaatattgttataatccaactctttttggctaattcgcgaagagacgttgaaaagtgaaatcttccccaaaccaaagagtagtttctaagattttaacagagacacaaagagaaaaaacaaatgggcgggttcatattgggccaaaattaacaatggcaacgatgtgtaaaataacttcgtcgttagtctctgttcttcgctatcctctgcagcaaccgcttaatgcgagagagagagagatttccattgtatttttaatttaaaataaaatatataaaaacaagaccaatgtaacaaatgcattgcttagatatatataactctaaaaaatattcttacaagatagtaagtttggtctattatcctataaattctagcatataaccggtaacaacatgaaaaaaaaatgtaaaactatacatagattacaaaaatgtagaaatcaaaagataagattagcaaataacaaagatattccctttttaatcaaagatcagtaaaaaaaatcgaagtggttagtgcatactaacaaaaccaaaaacaaaaccaaaaacaacgcgggtctcctccctagtcttagtaacgaaggagtgattttaggatttgataatatccactaaacaagtaaatatttgctataactatcaataaagtgggcccccactggttcagtcttcagtgtgtcaaataattgtggagcccggttgtcttcggtgagatcaaccaagtcggtacagattcgaaccggaaaattgccaagaggttcaagcgtgtgcatgatgagttcagatttaagagacaactttatgaatcaaagtaacaaaattggtcaaaatagaaaactcacagaacaaaaaatgagacaaattcttggctcaaatctaataatacagtgatctctttgtcaagaatttcataagaagcaaagtgagagcgggttcaaattcagagaagcatctcagcgatctgaacagcattcagagcagctcctttgcgtatttggtctccacaaacgaatatgtccagcctgaattcacaaagttatatccttttaggcatatcgcaaagacatttgcttcaaattcagtagaaaagagtgagactttacccgaaattgccatcttgagacacgtctcgccttatcctaccaaccgctacatcgtctttgttagagacatcgagtggagtagggaaagtatttgaagcacggtcatctattatataaactccaggtgctttcttcagtatctcccttgctgtgttctgttatgatacagtaagaaaaaccgttataacctgaataagaacttgatcataagattcttttaattgcgcaacaagaatcacaatacatgctaccagagcaagtccaaagaacaacttcagggtttaactctgcaagtgcatcaagaactatccaagcctacttatgctgattacatgctgctccacatttttcaatggcttgagttaaattaaaaccatagaatgtggtttaaaacttcaaattatgattcaaattgtcatatcagtgagtgaaatcataaggtaacacaacaacacagaatcagtagaaatcgggttcgacgtgtgttattacctcatcaagaggattctcaaactgaagattcacactctctgcatgagcacgcataactggaacacgtatacacgttgctgttacttttacttctgtgtcattctgtgaagggcaagaaattggtgtgagatatctaaaatttttgaacaaaagatcaaagtgaaatgaacacaaaatagcacttaagtaaccactcacccagatcttccttgtctccttcacaagtttcatttcctcttcgttgtaaccgttgtcaagaataggagcattatgtgaaaacaagttaaatgcatactgcagaacaacatacaaaaccatcacattactcaaaaagggatttcataatcagcacattcgaaatacaaactataagcaaattaagcactcacctgctgcccgaagatgttacaagtcggaggtttaccctctaaaacctaagaaaacacaccaatgcaaagaagacgaagaagcagaatcacaactcagcacaatcattaaacaattcaatcaaagaaggctgaaatagaaacaaaacctcacgagtctgctgaacaagctcttccatagctgcagcaccagcaccactagctgcttgatatgtactaaccaccattctcttcacctattatagccaatcaaacattattcagagcactaaagtctaaagcttccattgattctctaactacccttcaaaattttggactaagcagatttcagaataaaaatcgaacctttgcgtgatgatgaagaggcgtaacagccatcaaacagataatggtggagcaattagggtttgcaatcaaagcccctttgcccattccaactttgatccctttcattgcttctggattcacttcaggaatcacaagcggaactccatcaaccattctaaaagccgagctattatcaacaacaatggttcctttctccgccgccagaggaccaaactctttgcttatggatccaccagcactgaacaaagctatgtctacaccgttgaagctatccgccgtgagctcctccaccgtgtattcatggccatcgaaggcaacacgcttccctgcggagcgtttcgatgcaagcatcttgatggagctataagggaagtctcgatcggataagacggagaggaattcttgtccgacggctccggtaacgccaacgacggcgagtgaaggcgcagattcttggagagacattttgactcttgcggagaagtgtctaggtttagctctgagaggaaggcgagagaggaaatgggtttgtggggtttgatgagtgaacgtcgccattgtcgccgccgtgaggaagaagaagtgagagacagagagatagagagattttggaggcggctgatagaaaaaagcttgggactttaaagtgtgttagtgaattgaccaacatcttcaaaattcaaaacagcaagattgtttaatttaagatacagaaacagcatgatgtttgaaactgctcattcaccagattgagtatattcacacaactttctcatgtgtttcatcatttcttcttttggaaatattaagttgttgaaaagtcttttgtcatataacaaggcttagggatcatatttaagagctcgtgattctggtttttagctcaaagacatctatagctaactttggaatcttacacgtacaacaagaggacattaagtttctagaagttagtctggtctgttgatcaatcctgctttacagcttacttatgatgtgaataagaaaagataagcaagagcgagcactcagtcaccagattgaatatattcgcattactttctcatgttttcattgcttcttttggaaatttagagatgtaccactagttatgttctgaccattacaaatattcaggttaatgcttccaaaaataaagagctaaacattattgtttgttagagttactggagcagcctgaggaagaagaacatcttggattgctgtgagcttagctcggccaccgtactcttccggtaaagcatctgctccgatctcctcctcgaattttctctgttcttctccatccgtaactatcacaatctatgcaacagcaaaatcataatttatgtgattcgttgctcaagaaccattagagatagatacatcaagaggagattaaagatcaaaccttttcctgagttgctttctctagaaaacggcagacgaatttccaaacggtcacgaagaatccgggcatatgcaaaatgtagcattttgcaaggcgttccgggtagtaagactagagaaacattttccaaatttaatagacaggacttctttttgtgtgataactatattgtttcaggaagaagggagatgcttacttgtaagaattgaaagccagtgatcaatccacgagcatcaaggttcttgtatgtaatgtttgccagatcaataacggctactaatttctcacctccaacttctttgccattgttgccactgaaacataaaaaccaaaaagcttgtctcacaaccaactaaccggaagattattgaagtgttttggtttcaataatgtgtaaacaccttgcgattgttttgtctagcgcataaacaacaaactctgcaacatcaaacagataaaagattagttcatagataattatcgcaagaatcaactcaaggaaaacacatagatggactcaaaaaacttcattcatttgaagtcaaatgaaactactcaataattagagaaccaggaaagaagctgatcagttctatgaatacaaaagtcactgaaagtcaagggacagattatttccaacgaaagtaaaggtcagaagcaagtgagaggtgattactcttgaagttagctggatccttagaagcaaaatgcttagaggttatgacaagcaccaatgggtgtccggatttggtcggaccctgaagacagacctttctgaattccaattcatcctgcacttctgactcagggatgaatccagttggaggaaccatggaggctctccatttttgccaatctacaaacatctttgctgccttgactgggtccattgatcttgccaccaggaacctcatcaatgttggtttgtcatatcccttttcagaggaaacaacaacaacaaaaaccattgatgagattttctgattatggattcacttttactaaactgtctctactgttagggtttctgatgggaggctcaaacctaatcagacaaaccactatgacgagaatggagacagagttttaacagtgtagcccatataaaacccatcaaaatcaaatgacagatatttctcattttctaacgagacattgtcagtgaaactcatgaaacggccaaaagatgcaagctttgtaaactgtaatgaaactaaagcgtcgaattagattacctcagtagaagaagagagtttctcgaccgattttctcaactgggtcaaggcaagttcttggctttcctccatgatctttggctctctcagatcctaaaaaaatctcacagagaaataaagagagagccttttgtggtccgtacagacgcacgataaagtaagttgaaaaagtaaagagctttgatgttgacaaagacccagaagccacaggaagaagaaacagacaaagtattgggtacttgtctctacggtaagtggatagaaataactcaataagcctttccccaactcgctgcaattaatgggcagctggaagttgaagctctctctttgacttttgtttctactactttgacgatttaaaacagctgtgatgattacattgctttttaactcctaaatcccgaatcttaaggcttacttaaagttcttttaatcatttttctgatcaaccatgtgaaacaggctttgttaacggttatacatttagctgcttgttcttaattgagcattggaaattcagttctaacgatttttattgtttgtgacagaagaaaagtcctttaggttaataagttgttctatctacatgagatgtacattaaattttcaagaaagattagcttctttgtcatctatttgtttttaaacttgaactggatccaaatacagtaatggcacaagtggagaccaattgaataaaaatcaaagattagcttcctttttgtctaatgtaaagagtgcgacttcaaaatatgtcttaactgttctaaaaaccagtattcaagaatcgaagatacacaccaaaaaaaagtgggaaagttgtgatagaaattagcgacccaagaaaacatgagtagtcgcgtgtatgtttgtgtagactggaagttagaactccaaacatatctattataatgcagtgtgcccacacgaacaaagaaattaacaatataaagaatatgtcttagcaaacccccttacttccaagccactgcatcgatgtcgtctctagcttgtttgtaaagctctagccgtttagctaaggttcctcttcgttccatcagctgtgggtcttcgtccaacatagcacccagcttctccttctgcaccatcatttttcttaaatttattctcgatttgggcatggcattttctacaaggtaacaaaataatccaaagggtaataatatagtttacctctttcctgccaacttgagcgtagaagaagttgagaagcgatctcttagcttctctaacttggcagtaaacgacagctttgggaagagagtttctcaatgtgtcgcagaccatgtttatgtatgcactcacgttggatcctgaattatccaaagtcaacaaacaaagacttgataatgtatcatttctaagtaaagggaggcgagagagacacgtaccgatctttctgaagtgattatcggagtaggggtctgcgtttggtgctggggcattccttgggtttggtttctctttctcgggttcaagatggagtttcctgaagaactcaaccgtgaggtagctagattccatatccaccagacgcaaaaccgttttcctgctttcgtctctgaatctttcaagagcttcatttgcagcagctgctatatcgcttgctagagtcgggaaacgcttcagttcctgaaaaaaacagcaatggtatgttaggactaaaacagagcgtaaagagctaggaagagttctcaaaaccaaaggcatcttgtcagttcttacctctgtttctgaaattgactttctgaccagctccttcaatacgaaatgcacctaggaaatatcaaacagcaatcaagaatatagtcaatttactaaaacttaagtctcaaaagtaatgcaatctaataaattttggaagcatactgcatcgacagtggcttcagctggtcctttgaaatagcttatggatccatcaatgagccttctgtatccttgttcaggagcaataagatgcggctgataaccatctgcttctgaaacaaccttctgaacatttttggtagacagatgtcgatcaaagggaagtttctttaaggctgctggtaattgatggtcgaaaactccataaattcggtctccaccaggtcgtctgatacaaacaacataatgactgtcagaagaccaactttaccggacgtacattgtgaaattatgtgaagcattttctggcaaacatctatgaaaaggtcattgatgtaatttttttactaaaactgcacatccttagtctggaaactgactagaaggtaagcaaaattcattatagagcagcacattactctggaaacgacactatctcttaaaaaaattcatagactccaagttgatcatcacagtcgcaatgtaatagtacaccaacaagaagttataagctttacgaataagaagtagaataactaaatcacttaccctccatccaagtgctccttaaagacacgatcaaatgcccggcagagttccaaaattgtgtaaagttgggcctgaaatcatatatttagtgagtgactaaccatacgattctgatgcaactctgaattccaattacttaatggtttaaaatcttactcctgaatctactgcaatgggtctcccaatcctatcaagttctgcatttatctcatcgatgcttttgttgatcaaagcaacaatactggggattttctgcctgataacagtctctaagtgctaatagagaggaaaacaaagaaggaagaaagtcaaagctaagcattcaagctttaatttaaacgagatctgtgcaagtaaatccaaagggtacctgagacaagagttttgctagatattctgatcccattctactggctaagtgcccgtattcagggcttgtttcaaaatattcttgctcttttctacgtgcagcaatcatatcgactctcttattaatatcagcttgtgaacgattcacaattccaacccagggatgttgcaaacggtatgaccttccctcaagaaccttcatcaaataggtagaggaggtgtcacaatatattaaacaagtaacagaattagttgacaccccaaggtgcagaaatcaagaaagacgcttacatctagacaatctgttcctttatccatgatatcaagcttggttgcaacaccaaaagtcctttcgcctacagaaatatattagaaggttaagaaaatgttgtggagtgtaaaaagtcactacttaccagttattaggaaactacatttaggtcgtacctgtaggatcaacttctctagcaagttttatagcatctgaggtagcaatatcttgatttgctggagaaatagccaatatgatgcaatttggctgcagttaaaagattttatggataagcttccagagttgacattatagtgagtgatgatgatcaaatgcattcttctgttcaacttggttggaaaagttgaaaagattgccgaaaccgtctcagtaatagcttagagcaagactgaccttttcaacataagaccggaccatattttcaatgtcttggacaatactttccggttgtccatctacacgaataatattcatatcagtgactagtttaagcacaagattcatatcagtaactagtttaagcacaagctaagctactggataaaaaatagtaaactcttacctacagcgaccttggtcaaacccggaagatctatgagcgtcagattaacaactgtagagaaaagagtagagtgagaaatcaaagtcacatggaagaggttagcaaaattggaatcttcaaatctaattgtactactcgttatctcattacagctggtatcaaactatcaataatataggaaatttacggtgttggtttctgaactaactacaataggaatgcataacaggaaatgtggtcttaagcacaaaccattaggagaatatatgctcagctgaattggaatgtttgagatttgttttgacttcccagtaatacgatcagtttcatcctcaatttctttccgcacagcagctgaaaagagaataacacttagattagcccgacatgcctttgtcgatttcactgtttccagcaattagcgtgaaagattcaatcaaactaccaaaatcagcaaatctcttcttaggagcatgaagaaactcagcgtactcagttgtcccgtcttcagtcttatgaagttgcaacaccaatggcctccttgtaacgatacctgataaaatcaaatggtatcaatttagatggtctccttcttcagtctcatgtttttcgaagtagtcaaaatgttcatgtaatgctctcaagatcacagagcttcgctaaattgtttgaaatcgaagcaactaataagagcacgaaattccgaaaacctaatttcaattccaaacatcgaagacactagacaaaattgcttaacgagaggtaaaattaccagatccacgaggcagaaaatctcttcccacaacactttctagaactgaagattttccggaactctgatccacaatatcaaccaaacaaaaatgataaatcagaaacgtggagattgaagaggcgagaagtgagatcggatcttaacgtagaaatgtgtatattcaatagaaagagatcaaacctggccaccaacgacagcgacggttgggagagcttcccaaagcgacattccttcaccgccatgatctccgaggacagtacacgccctctggattttgtttatcagacctatcaaacttttcatcgtcgccatgtttcctggaacgtatcacagatccagaaaatctctcaccgacgctcagatctagatctaacgaaacgaatatagttatcggaggatggatttgaaacgtccggtgagttgttactctctcgcggtagcaggagggattgatgaatctgggagaaaagaggaaagaacccaatggagcagagaacggtaatgggaaaaacaatttcaaaccaaaaaagtaggactacttgctcaaatatataatacttttggaccgaaagtgaaaatatatcaaatcccacgtcgctaaacgcgtaccggtcaatgatacggaaccggttcaattcatgtggttatgttctttttttctttcttttttactcaaaagtcaaaactactaattatcattaagacctgattacattacaaatgtacttttttcccaataaagtctgactacaaatgttgtaaatatccttctcaaatctcaatgatggtgttcttataactcatgtggtgttcattaactctatctctctctctttttgtatatagcttttttgggttttaccagttctttttttgaacaccaagaagagttcttttaaagataaaaaattaggctaccaatataatcgaggttaataagaaaattaactaagaggagagagtgacacacacaaaacaagagagtaaaaaagcttaaaatgttgaacaaaacaaccctacctctactactgcagtactactatacataacgcaacagagtaagaaatatatcagctaagtgaagtcaatgtctccctttaccttgaatgttggaatgctttagagaaacacacatcgaatcaatcaggtactttacacgattatctctttcggcttttgaatcccttctctcaatttggtacaagaaccttaaggcaagccacagagaccaaccagtgattgatcgaatcagtttgtcactgtgtgctcctcgtcatcccgattcgtccagacactctaccaaatgataaaatacataaacaataatgacatctaaaggtaataataaagcttattgtagttgatatgataatacattaataccttccagaaagtagctgagctgtgtttccctttgagaccgagagacgtctggtcttactatcttgttgtcctttatcaacaacacgcattgcagcaacttctttccccattacagctacttctcttcgcatcttctttgcctcaacgtccatcgcctttgttaatgtttcaaccttcttggccaacatctaaatatacacaacccatatctttagacttatattatacaacatttcatataaaggcggcaaagaacaggaaaaaaggccaaacactagcaaacctcaatcgcttcgtccttgtctctcaggctctgatctttttcatgcgccgcttttcttaatgttatgacctctttctgcagcagatcgtacaagacacctgggacgctatcattatttgttgccttgtcagctgattcttcttccccttttattgagctaggcgattcgcctctgctagttccttcagaagacttgtggttcaaaggaaaattcgatctcggtccatttattagcactttgcttctatccaatgatctggtgcccccatcaaatgatcttgatgttcctttcgcatgcttcaatacagtgcttgcactagcagtcaatgatctcaactgagaacttggtgttctcttaatcagcgagccatttgatgtaatttttggacttgtttcagctccaccaagggattgtcttcgagtaggcccgttgctcgaacttctaccaacagatgtgcctctgctgctgctgctcgtaggcccctttaaactctcttctaacactctaagccgcagtaaaaatttctcctaaaaataagtaaaagcagcaattcctcagttaggagattaaaaaaaataagatggtgtcccgcagctatgattctaccttcagctgagcttcagattttgcagctcggtcagctatggcaagtttgtcgcgtagttgttgcatttctccctgtccaaacataacggtggtggcaatagtataagttaatctccgtgaatatgaatcacaatttgaagcagcaagagaatttaaatattaatatgtatcagcaatgacctgcaaaaatctacgttcttcaagccactgccttacaggcatcactttgtcattagaatctttccattcgttagctacaacagtagcaactctgtttgcatttaccttcgcacgggccaattcccgttcaaggattttcctctcttcctaaggaaaacacaaaacaccacaattacgatcagtacgagaccaaaacactaacaagaaaaacagtaagttattgaggtactatagaagcatatgaaatatacattcatttcttggaatttcctttggtaatctctcactgcgtttgcggctgcaccaccagcaagaacagcttcttctaattcccgaacactctgcataagcttttcaacttctgcaaccttctgtctgtgcatcttgtctataattctattctcttcctattttaaccaatgtatcaacaaataaggccaccacagtggtaagaaaaggaagagataccctattctggtgttccaatatgtaaaagaaatgatatagacatacctgacaaatttcaatctgtttcatcaattcttggttcttattctggagatcatcaaccattgaagcctttgccaatgcagactgaactgtcctttcagcgtcaagcaaagctgcttcctttgatttggttaggcggtccaatgatttattgtcgtcttgaagtttagcaatctaccaatcaaaacatgtaaacccatatgagaaagctgttaaatgtcccgtaagttgttgaatcgagctatacaaaggtaattctggttcaaaggaaggaaaatacttcttgtctcgaaagtttcagttcagcttctaaaggggcaagaatagcttcaattggaggcatgtcatcatccttttgagcagcatgaaccctacgaagagaagcttctgctgcaaactgagctgccatggaagccttcttttcttcatttatcttcttgatttcaaggttctgtgacaacatacaacatcattatatatagaatcaatataaataagcgatcaaagaacaaaggagatattagaagcatactttactctcaagaagattttcaataagtttgagtttttccgccatctttcccaactcttcagtgagcttcagcactcaaataaaatagcagagaagtcagtacacagagagtgtaaagagagaaactttatatgacataattccaaacaagtaaaaccaagctcaggctacatgactacatattctataaataggaatatcacaatgccactcaagctaaatactttgtttatgtaatggaagcttaaagtgtaagggcataaacctcttcaacagccttctctctttgtcgttcagacaacctcaaagctttgatttcagcttgtccttcagataattccctatccttatctgtataaccaagtcattgtttcaaacacaagaagcaaagtactaatccaaaaaccaatctcaaattccattgtcaaatcatcaacaaaatcacatttctcgtacctctgacttcattctccagccgatttaactcaattctcacgggatctgagccatggagaaggttcatgaactcgttatccgcgtcaaagcttggtctcattgacctccgtcgtgacatgcctttgcttcctccttctcgataagaagccgatatagccaatgaaggtgacataaatcctctttcctccattacttccgatctcaatcctcaccacaattcaaaattgaaccaaaatgctaaagttgtaaattagatcggtatatatcagaaaacaaacgaagaggacaacactacaaagctcatcaaatgcttgggcttaagagaagaagagaacacttcttgtttttgttttgttttgttttgcagagagatagagagatttaaatgaggtttaagggtatggttgttaaagagtgacaacgatagagactgattagcgtcactgttaattactgtttaattgtgtgctcctctttgattttattaactagtttcataaggagaaattgggtaattagcaatgaagtagtacattcttgtccaaaagaaattatcataacactggtgtttcgtagaaatatggttaatttacattgaagggattagggaccatctgtatttattttgtatgtgttgtcaaattattagggaccatcccattttgtccaaacatgtacgacaaatgtaaaatcactagacaccatgtctcatgattctaactaaaatgacacaacttctattctggttttttttttctcaatcaaatttcagatttaactttggtgtacattcatgttattttcccctttttttttttttatcatcacgcataatatatttgtatagattaattttcgttgaatttgatactgtattcatttcttgaagatactagtagtatatagtgaagaaatcaatgtaagaggagacaagaatctttgagctttaatgagccgaacatgtccctaagtccggaccacggtcaaaccaactaatctcaaattttgagctgtttctttacattatattatatcttagtttcatactttcattgtattacgttattcatctaaacacatttcatttacgtagttacgtttcttttgttttctaccgtcttttacattattcatctaaacaaatttaactatttcctgatagacggtagaaatctacataaagtttacatgcagaaacaaccaaaactttacatactcgtgaatatcattcctaagtttgacgtaaacacactaatctatcctattcctacctaataatttgttgctaatttttctattgtgttgtttttttcctcgagtggaggataaagatcaaccaaaaaaggggaaacaaaagctgccagaaaattctactttggttctacgaaaatttggaatggaatccaacgtcgagagcaagatcagtcaaagtcaaaactcccaattgtgcaactgtataacttttaaccaagattttctttcaaaaacttctgatacatcattttcaagtttgtaagaatttagcatgcaaatacaataagttaactaagtttaaaggaaaaactaaaggaaaacaagaagtatttagccaacaacaacacctcgatgaagaaattacataatacagatagaattgacagacaaggccccgaatataagagggaactacagaattattttctcttttcgtatttttgattctctttgaaggggaaatttccccaaagagcaatttaaagttacaagaaagccgctaaaccctattaagtgaaattggatgcatattaagaaagaaagaaaaaagtgatggatcagaaggagaatggacttaagagagactcgtcaagttctttaaaacctgcgtatacaccatccgtcttgttcggtggcagagctagtctcctaacctctgtcatatacctgttcgtaaaaagacatatcttcgtgttttcagagattcttgattttaaagtatacttaaaaattaggggtgggcaagaaaagcagaccaaatcgaaacaaaatgacagagacaaacttgcctgtttgcagcgtttgcaatcttatcacgtgccccttggttaagagcagctttgttctctagcgcaaacgagccgcctagtatcagagaagacctggttggactcgaccccattctgtctgacaatacagacattgcccattcacggagtaccactagaactgaacgaaggaggcggattcttagatttggggatggcacaacagctgcattggataataatcggtcataagcgttgagcacaggttcagctgcgcctttgcaagcggctagaagagctttagctatgtcttcatccctaacattttcaatcctttctgatctctcctgtaaaattttccacaagatgcactcaaattcagttcataacccaatgaaatgagtcaacaactctactagaaggatgggcttacaagtgcagctctctcaaggtgaaggcataaaacatccagcggtaaaacaactccatcgccagggtatatatgagatccgactctcttaagaactgcacaggcctcacgtattccgccttgtgaaagagcttggtcaatgagtctagcccatgtttcccttattatacttgaatcagcatcaccagaatagttggcaaagtaaagcatttccagacagatctgcacagagtgaagccagaacagcaaacaagcaatgtaagcatacacagagagtcgactatactagcactgaatctttccaattcaatagtttaatcttatgattttccaattttaaactaggatactggtgcaacaattctcagcatgacctaaaacagtcattatcgactttaagttacgtttagcatgaatagaacctacgaatttccagaatatcagctaagttacagctatagaggaatagtggctctcctttttctatggttacttctagaaaaccagttacccagaaacatggtccaaaaatacattgattaacgagaatatatatataaagatgatagtttatgattttaagactcacctcccagagctcaaatgggacagcatactcattatacaactgtgttacacttttaagttccgaggagacctccatggccatttcatttgctgcatttgctaagttggtatcatcactagaatcaccatccagtacttgcccgttctggtcagagtcctgcatggcaaccgaggactcaaaattggaagctatagcttcaagtttgtccctgatcttaatttggaactgaagaactgcgagttttccttcaagcagatcaagcaatccactgtcagaaacaccttgagcagaacctactaaaccatcgctattactcgcattcttggcctgtaaaactgcttgacttaggtcgtctcgcctaaattcacaaggcagcaacccattagagatgaaaaaggaagggagagtagaagaaacaagtaatgtgacttagggaaacattcaacatttaatttagggatatattcaacacataacataaaagaatgtttaccttcgttcaagggtaggactgtcccctaaactaatagcacgtctctctgcaagccttagaaacacgtgagcagcaagcacatgttgtctctttgacacatagtattttgcaagaagatcaaaatattttgcttgatctgatgaaatctgtgttcctgagtgacccagcggagatgatccagtagatacagccccgacctatggcataaggagacaaatgtgagtattcctataaagtagttgcagtgtctaccactaaacctgacttattttttgtttcgcagttggtggcagactgaggctgctagtttttagctatggaggttatttagtataacaagtagacaaattcctgaacatttaaggttatgcctcatttacgtgacaaaatacgatagaaaatcttgacaccataacaatggaaataactttaaagggctaacgtgtaattagcaaacctgtgattcagagtgactgccagcattctggagaaaaggtaccaaatccggaccaccgtactccaggagctcgttttcaagatgcagttcaatcatggccttgtataggtactctcggaacgctctgtcagttgattgcacaccaagatgaacgatctggcatatatattgactacgtgaagcctcgtctagcgtgggactagctagaggactagctagagatcgcaaggcgttggcaataatctcatagcattgtttccgctgagcaagagcatgctctcttatggaagcatcaagttggtcattaaaagcatcaccagcaggatcaagagcttgggccttctgcaaaggcaagcagacaacagcttcatagaacctgtagaaaattagaatacaaaaaagtggaatcttaaaagagagggtaacaaaacatgcatcatgtataattgatttcgaattaagctggccgttttgccttgatgaagttggtttatgcacttaattcttgagtgaatccttaattgtaaattcgatttaaaaggctaaaataattcaatttttctctgactgccactacgtataatagcttaaactaaaattaactaaaaggtttattgactaacgatcacaaactgcaacaaaccaagtgtgtagatatctacttggatagaaaaaaacctaacctcaaatcctcaaaacgtttgcagacagtttggagatctgcagatccagggaccttactcaagaaactgaacgcctctctagcaacattctccttctcttcagcatctgaggttaaagcagctctctcaaggcgttcaacagctaagtagaatttgtaatcagactccttgaagtaacttgggcaaccttcacgtagtcgcgggctaatatcgtcaactgttcccctgccatctgagccagtataatactgcggcacccatagtatcagaattaaattggtgagtcaaaacatttaggaaggggacactaaggctatataaaagactggtacctccatcacggcagatatgagccttgttgcaatttggtcaccctcttcagaacaaactagctgatggaatgtcaactgaactaaagcttgctttagatttgcatcaagctcctgaactaatctagcaacatgatgttgagaaagaagttgtagtaggaaaagggcttctgcagatctgagaagtaactgcctaatacactccatagccctcacctgcaggagggtaagactaattaatgacttcagacttccacaacagaccaattaaagaggacgaaagaaataatagtttataagaattcgacaaattatacctctgtggcagccaattcagcaggactatatggcaatcgctgtcttttatttgctgactcgcctccgttggaatatgctccaaacaagttcctaaccatattcctctcagtagctcccaactctgaaccagtaccatacaaaatagagccagttacatctcctaacccagcaacacatccataaagcccccttctctggttccttctagatcttaagaatttctccaacgatcgaatcttgctttccagcacatgcatagcactggtagaaagacgacaaatcacaactccgtcctcagacatggtgtcagaactagttttttttgacatcacgggaagttcccataggggaaacagtaaccttgatgtgcaaaggcagagcccttcgtgagcacctgagaaaatgggctcggcttcttgaacaacttggcccatgctgaaacctccagttgctgttctagtatttgacaatccactactgccatcaaattgtggcattcctacaattctcggatcctcaaaagcctcagctgctttatcggcaacaatgttactaattaaatcttcaaaatttattatccgggcagctaacatcaagcacatggcagctgcttcgcctactccaaagcgggtgaaaaaatcttctagaagggaccttggagagttggattccagaagtcttctcaagatatcaacaggcctattgaaaacaagttccatcatacccatggtggtaaaaacaacaatctttctccttggcaaaatatgctgggttgaaagatcacttctcgcccagagttttccacatgccttttcataagattctccggagacttcgacaccacagtattctagttctgaatataatgattgaatagtagcagcagtatcaggagaggggagcacatctgctacaaaaagcatacggccttcaataggaagggaagacacaacttctcgtaaagcccgagaactccttgaacttggccctgaactgctgccagcctgagagtgcacgcttgaatctctgctaacaacaagaagagaagacatagcaggtggcgatgaatctgaaaggacaagagttccaacagaatagtatgctgtttcaatcttcatagataggtcgtcgttctgagttctaccggctacagatgcggccccaaaacccagtccaacaccaacacccaatggaggagatggcctggttgaaaccactttcagacagtttggagtctggcggtggttgttgaaaccactgaagctaatagtactaccacttccacttgaggaggtggaaagatacatcctcctgccatctgataatgctgcaacaaggtgcaaccattttgattccaacatggacaatggtgaaatactgactatggatggcttgttagatcgacctgccactgctgactgacgatttccttggctcaaatccttctgatttaatagattcctttcttctgccaccttcttaagaggaccttccccatttggcccagaaacatatgcttgaagtttcatctcttcagtgcgggcatataaaatttgcctttcattatcaacaaccatctctacaacaggatctacagcaccaaacttgaatacatttggaacaacccacctaaaaccaacagaattggggataaatgtttaaaaaactatcagaaagcttggtttatctcagatttcagattcaaacagcagagagaagagataaaatagaaggacatagagaatgtgtgtaccttgagatcatactacctacgcctgcagtaaggcacactttacgacaacgtttattccagccagagccagttgtatatagcagctcatatatgtgaccatcacgtccagccatgaaaatacgccctttattggtacatgtaacgcatgtcattgtcactccatctgatgatattgtatagtcgggcagaggttgtactgaaatttcagcataaggatctctaccatcaggtccttcagtgcagcacactccaacaagaaccaactgatgagaagtaaagttttataagaaatcagatacagtacacacaaaaaaaaactaaagaaagttgtgatcagattgcatcattgaaaaagagtcacctcaacaggagttgccagcaccagaagatattgaatagcttcaacaaaaactccaggtctacatttcgctagaccaaccgcacaaattgcctgttcctccccactatactcaggacactgcccatccctaatttgacatcacatttatcaaaagaaaggacaactacgaaagtaaggcaatctcaagcttctaagttctacattcccctcttaactaaaaggaaaaggttaccttttgtcaaaacgccacagaaacaaagaattatcgacggatgcccaagcccgtcgaatctctggaaagattccacataaggccgtcccttccccgccggctgtattatacctctcaatgagtacagaaggcaattcccaagtctcaccaacctcaatcaacggcggccactgcaacaaagccaaaacacctataagacaaagctcgagctgctctaaccctaactataattgagctaaaatctcccatcaaatcgagaacccaatagcaacaatcgaaagaaaagtagctaattgaaggaggtagaatcgttcctgaagctaacctctctgggatgagtagaatatggatgactagcgtatctagaagcttcaagagcttcttctagatcgagctgcgatgcggcttctcggccaatgcggtcaccaatacaaattcccgcgctcgtcacatcacgcatcacaatctcatcgtcttgtgacatcttattggaagaataaacaacactggaacgaatccaaaaccacaataaaatacgcggatttttaaacagagaaccctagtgaagttcttgggagcgagaaaaccaaaaccctaaatcgattttggctccctcgcaaaaccaagagagcgggaataagaaagagaagttcaaaattccgattggagaagaagaagtgagggagaaggaaaacaaaaggtgtctgcctggacacagtaaaagagatagtcgcaagggtttaatacggacgggacagggtttctctcggaaaatgctaatttgcctttcctttccggctaaacaagtcgggtcgaactttgttgttgccttccccgggtcgggttaattcgtttcaaattatttttaaatttttttaaaaattcgaaaacaaaatattttcaaattgattgtaagattatagttataaatttggtaattattatatttatagaaatgatattattttaataaaaatatataagaaattacttattttttaataaaataaatattaagtacatttatcattttcttctactcattggcacactggattattttaaaaacatgtacagtttagagtctaaacttaaaatcattttactcttaatttgtcatacacattaactgcgtttcagcatatggtaaaatctcatatgttaaatttttcttgaatttgtcgtatgtagagagaaaacttatgactcaagaccttgtataaacttgtgggctggtgaatagttttggttttggatgaatttttctaaaagagtggctagctgaaaagtaaaaaccaacaataatgagaatttgtaataaccctgtcttaccaccttataaacaattttcacatttgataacaaatcatataagtatatgaccttgatgcatgcatctaggtgtaatcacatacaaatgaacgtgtatgtttttatattctatatgcaatttcaaaattcaacatttgattgtttaattatatccgttaggtttagtaatagttgtattaatcatttattgaagttttttatattaaaaaactgacataattcacttttcgtggtttagtgaaaccattaatgttccatctcttttccatggactcacagaccagtaaccacacgtcctaatggtggggttgacgcacatgacgtcgtcgtccctcaagtgtaaacattaacctgccgcgtatggatatcgacttcggttctaaaatattatagttacatgttttttgttgtttttggtaaaaggttaaattaacaatttgtattcttttttgttaaaattcacccttatggtgtcactaattgtttttttttttttagattttaaattaaccgctattaatgatttattttcaaaagttgataggaaaaaataaaaatataaagagcaaaaaagagtttagaaaatgtatgtcgtttttctataaaaaggataagccgcaaggaggcaaaagacaacgctttttgtcttatctcaaatcttttgttcactcaccccatcataacttcataactcctatccaatctttgcttataactattatcaaacaattcttaacttcgatctctaacctgcaaaaacattcattacactcttcagatcctccttccctttagccgccaaagcaaaaccgtcatcgatctctcttcttttatacagtcaaaaattagattcagattcttcaagaactctgtttttctagtagcatggtgtgtttggtctcccgtacgggtcgtcaatcccaaagatacaacaagggacggcgtcaagtcgtcgggtatgtttcatctatatctttttccactaatcaccattctaagagttgactttgtgtgagtttaaaatttgcaggtgtattccatacagactcaagatttcgagtgatggcacaattagcgacgaatttgaggttcttgttatttcatcacaaaagggtcacgctctgatgttcccaaaggtatactaactttgactcctaacaagaacaactaataaatcataactattcgtttataatattagtcttctaggttttaactaatttaccctgtaattgattttaataatgccagggtggttgggagcttgatgaatctgtagaagaagctgcgtcaagagaatctctagaagaagctggagttgttggaaacgttgaggtaaatttgaaactgaacacatgattacgttttgggattgttttacttatatctttctccaaaatttgtaaagtaatttgatatttggtgcagagacaacttggaaaatgggatttcttaagcaaaagcaaaggaacattctatgaaggattcatgttcccaatgcttgtgaaagaagagcttgagctttggcctgaacaacatcttcgtcaaagaatttggatgaaagttgatgaagcaagagacgcttgtagagattggtggatgaaggaagcgttagatgttttggtccaaaggctttctttactatcattgaagcctatggaagaagacgagaaccttccactgatctctatctactgatcaaaaaaaaaacaatcagacgtgttcttgatcactttgtatataacatcttacgcctgcctttccatgaagagtctactctactgctgcaggaaaagtatgtacagtgaaactttaggtgtgaacttggccgagatttgtttggatttcggtttggtttaacaaaaaggttttgtaattgttgtcatgatgtatccgcaactgcttaggatgggaggaagaagacagaagcaaagagtgcaaacaaaaaactgtacaataacgtttcctctctttgcatctctcctcatcttcaaatgaatctatgatctaaatgaaactaataaagagaatttacagaaaatcatattcacaagactattatacaacttaattctgttttcttaactgcatatatttgttattttgaatttcatgataagttaaaaaagaaaaaaagaacccaacagctactaaatacgaatatatgctatttttagttaaatatagggagatattatatcaagtaataaagaaatattaggtttggttttaaatcaaaagagaaaaattaggtttgcacacgaacgatggtggagacatgaagaacatgctggtgacatcattgatgatggtgatgggttacacgtggtatggtaagggagttgctgagtcatcatcccttgggatttgatgtattccgctttatcttttggcaaaactttgttcgcattggtaacaagatttttccaactactttaaagtgtcatcatcagccaataatattgattattcaaatagaagataaaatatttactagtctatggagttaacatggattttattattattaattgtgggaaactatgatgttccacgtctttatgtgtcatcctctttgtcggtaccaagaaaaaatgtcatctgatctgatttacggtaagaaaaaaaagcaagatccacgttttgtccagtccctgtgaaagtgtgaacgatcaacttctaaacatatgaaattatttaatttatcactacctaatatacatttgattattggaatataacaagttagaccgtttgggcccattattctttatcgacaccttcatcagatgcaaaataactcggttgggtgtgctactcaaactcaaaataattcgcgttggtcacagtcatgcccgaaccaaattttagcgaggggaatttgtgaattttaactttgtcaacatactctcgatgattcattatagtcaataacaaagcaattttttaatatgatatcgctcattgcaatgatgtaatcgacgacatcggatgtccgtaattacaacaccaagtcagcaattcatctaaaccagttaacgtgtgtatcctatagtattaatcatcccttaaacccatgcaattttccacgtctaaaacgtcatccgcttaacagtaaaaaaacgtcaaccaaaaaatttcaaattttcaatattactattttattcttaatttttcatccaacttcatgatagtcaacttcgagagaaaaaaatatatattttatgtaaatctcctttttccatatacgtcgtgggttactcgaacggaatgatcaatgaaagttccactgttcatactcgtaaaaacccaaacgtataatgcaaaacccaatcaaggcatatatttctatcttcgagcccaatataataagcccaaggtttgaagtgggctgttttaatacaaccgaattaaaccaaccaaattgaattgaattcgaaacttaattgaactaataaaactttggttcgagtttagccataactttactcggaaatcggaccgaatcaaaccaaaaccaaatttaacgttgaaggagaactagtgaaggtgtattatcagcgacaaacggggttggctaaacagatacattttgaagttttcagacaaataaaaaaataaattcaagtagacgatttcaatttggcatttacaatctcaactaaaatgtaatcatttgatgtataatgccacacaagttgactatcgtatatgtcaaaaccttgaccgaagatttttttagttaattctccaccaggcccctataccatcactcgtttgatagagcaaaagaggaaagaagttaaactcaaaaagtaacaacaaaagtagacagtttaaaacgaacaggatattctctataatttgtaattttcacttttcatggaagtttcgtggaagtagagctcttactatttcgatcttgtttctttgttttaagtttacactagtctaggttgcacagaaagaatgcaaaaaagtttagactagtcttccgattaatgttcgttgaaagacgaatgcaaacaaattatctaacaaccataaaaagaactgtatatatatgaaaatcgtggatttcttctactcttgtctcttactttttttttttttcctttttgcagtttagatgcaattaaatattatgttgtgctttaattttcatcaataactgtaataaaataactcataattttttaatttttttttataaaaacaatttttctgaaacttagattaattaggaagagcgagagagtagtattgttttggtgtcactttctcgacgttgtaatttaattcttgtaaccaaatagtggaatatacaatgaagaaacattcatatactgtatgtctaaactttcacaacaagcatttttttttgttcaaatcacaacaagcatattaacaacacaaacagaggattaaacctcgttttattactacatataaaagacaaatgaattacataaagaaataattcttagcgggtcatgccgccttggaagaccggagcacccatggccacacctccttgattctgttgtctctccacgttccccgcccatcctaaaataccacattaatttttaacgaatgtcaatgttttgagattacacttaacaatcaattattaacaaaatgaaacaaaaaaaaaacagtataacgaagaaataaattaccaagactcatatcgtaaccgcggtgcttgagttcacggtattgttgggtcaaagaacaaagctcacagcagaaatgtttaaggcaatcagtacaatcatctcctttaatattatattgagctctcatctttccacgatagaaacatgagtatatacatgcacaaccagttactacggctatcaacgcgtatagagctccagcagtaccacacgctgaaatgttttgaaccagcaataatttatcactatgccgccaaatttgacaaaggcatttttatgacatcgtgtattataagaaacttacatgtggatcctcgatctacaatctcggcgacttggccaaaggtgatacatggacaccagaatgtgatacaacctgttcattaattttcgcaagataaataataagtactttttacttaattttatcataattaagtcttaactgattaagatatatagataaagggtttcaataacatatttattacaggcataaattacttgttttcagttgtttacacatacactatatatatatatatataatatttataagtgattgtgaaaagagtgattacaatttttgcagtcagaaaagcaatcacagaagcctgtggaccattctccttcagcatgaggcttggcatgaaggtgttgagcttccatgaagagagagagagaacaaaaaagaagaagagagttttaaatggaaagcaatgtaaggttttgtaacataaaggaagaatgatgcttgtatttataaggacattattccattatttttttaactcgtcagaacctaaattttttaaaaccatgaaattcgtcacacggttttgtttgattttgaaaatagccatcaccattaactaaatatttgcgtgacttttaccaagtccttctaatggataatgtttgaaatatgagaaattgcacatatatataactgtttttccatcatttttcacgaaagaaaaacatacttttttttttagcacttacatggacttacaaatgcacgctacaatgataactattactagctcttttaaaactagtcgttatttttgttagaatatttagatattttatataaacaatcaattaatagaaaagcttcgttttgaaacaagtctttcatctgagcagtcaataccattacagaaaacattcttttctaaaaaaatattaatgccccaatattgaaatatatatacatatttgttttactaatttagagtgataaaactaatagtatttttctaaaaataaatttagtatatttttcttaaattattataaatatctccatgatatatccaaattattagttttactaaataaaaattcatacttcaaaaatctacatatgtgactctagaaattaaagtttctcaaatggttataaatctcttttttagttttattctttgtttttttgtcgtctttttgttctttgtttttatgttgtgggaagtttagtgaatatttgcgttcaaaaattcagtccaaatcgatgagaagtataactattacaatttgcaaagaattggtctgaatatatattgtaacttgtaactgagaaaataatttaatatgaaaataatttatattaagaaaactaataataatttaaagtattaaaataaagaataaataattcaagtcgacggtatcatttgtatctttccattggcatatcatttgaccaaatatttttttaaacatatctatagaagatgtctaatggatgactaatggcaagcaagtgactatttccaaggcatatgccgcatattattgaccaaatatttttaaagacttatactctccaatcattttacaaattagtgttctaaatagcaaaacatgtgtatatatatataaactaatcaattttgcaatattagataactggacgtgtaaagatagttaagaaggttaataatttcaaaatacttgaatatttggcctagaaaattagtttcgcctaattaaaacaattttcccgacttggcgacttgttcacccggtaaattaactttgaaatgaacacatactaattttcaaattaaacttggttaagaacttccaccaatatatcaaaccatatttaactactactttttaacttaataagtagaaatcctcgagcaaagtcacaaatgcatgaagaatcacttatatcaaaaaattgacacttatatttcgcacacaatatctaattgccactatgttcaagacaacattactatcaaagagaaattaaagaaaaaaacagaacttgagagagattgtgaaatatgcctagtgagaatatttataaggaacacattatttttagttttattaaaaattcgttataacttcaaaaacagttttattctacaataagtttatgtgtatctggagctggtatccaaaatagtaaaataggttgtatctattttttagggttacttctttgtatttttgtatgaatatgcactaacaaaaaaaaagggtgtcatgtgaatatcagacaaatgatgaaatggatcgtagacgaattagttaattacacacacacgataaaagaagcaagtggagttttttcaatcgaagaattcgtcggatggatgtatgtagctaactaactatcatcattaccatatggccatcttttgtctctgtaaattattacaacatgtaccaatatcttagctcattggtccactttgccttttggcctttgcgtgttgactgggagaatttggtgaagccgtccacaacattcagaacaatacgaaggttccgattcgttctgacgtggaaattaaatcgatatgtagaatagtttgaattaaattaatagtggaaaataaacagtgtacgtgcataataatagtttcattttcttatatatacatcactaatcataaacacttaaagactgacaaaatttgaaatgtgtaagagccgctatatagatgtaagatttttctttatttgataatttcaacttgtttttttcttgttttgatcttcttaatagtgcaaggctagtgggtgtacttgttgagctgccgtagatgctttattaatctcaccggccatataggtttaaaggcccaaatgtatatttttttctgtatatgttcgaagttagtatcactttattaacacaccctgttaacaaatatggctcattaaagtgaattggaccatgacttacaaggattctaacgcacaatataatgatcatatgtgaaactcactataagagattaccaaagtacaatttcaaacttcattatgaagatgagatgcttcttattaaaatgcgtaatcttatttactaagagaataaataaaagagagcttatgatgcattcaattacgagtacaactgtatgtttaagaaaaacaaaaatactagttgttgtacttgtaagagagaataaagatgtgttgtcgaaaaaaaaaaaaaacatcactaaaattgggatggagctgagaaagaaagcctttgctccagtccaaagtccaaaccaagtgttgacactaatgggccttagagtaataggcctaatacaatttaaaatatatataatttttattttctgtatatttttaaaaatcatttttttgttatgttttaaaacaaagacattattttgtatttccacgtagctgcaacctcaagatcttcttttcttgttttaggtttatagactagtcttccgattaatgttcgttgaatgacgaatagaacgaccaaataacctaacatccataaaaaggacgtaagtattgttttggtgtaactttatcgacgttgtaatttaacactcgtaacaattgtgatccattacattgggatatacattaaagaaatactcatgttcaaactttcaaaaacaaacagaagattacacaacacatacacacacgacagaggattaaacctcgtttttattacacataagacaaatgatgatcacatagagaaatcaatcttagcgggtcatgccgccttggaaggctggagcacccatcgccactccaccttgattttgttgtttctctgcgttccctgcccatcctaaaatacgaaaattaatttgtaacaagtgttaattaatttttcgattacactaacaaatcaatcagaaaaatgaaaaaaaggtaagatgtatcatgaagaaataaattaccaaggctcatatcgaaaccgcggtgcttgagttcacggtattgttgggtcaaagcacagaggttacagcaaaaatgtttaaggcaatcagtacaaccatctcctttaatattgtattgagctctcatctttccactatagaaacacgcgtacatacgcccacaacttgttattaagtctatcaacatgtataatgctccagccgcacaacacgctgaaatttttcgaaccaacaattatttatcattagcgcttgctcccgccaaatgtggcaaaacctttttctatgatttattgaattataagttacttacatttggatcctcgatctacaatctcagcgacttggccaaatgtgatacatggacaacataatgtgatacaacctgcattcattttggcaagataaattataagtactttggctattaattttcagaaattagaccaaattgatgaagaaatatggatccaaagtattgaaagcatatctattacatgcataacattacttgttttcagatttttacacacacgcacacactatatatataatatatatttataagtaattgtgaaaagtgtaattacagtttcggcagtcagagaagcaatcacagaagcctgtggaccattctccttgagcatgaggcttggcatgaagttgagcttccatggagagaaaaataaagaggtttttaaatagaaagcaatgtgtttaaggttttgtgacataaacgaagaatgatgcttgtatttataagaatattaattccattatttttgaactcgtcggaacctcgacttttaaaaatcataaaaaaaaagtctcaagtttttgttttatcttgaaagtagccatcaccatttactaaatatttgctttaaggagtatataaccaagtctttctagttttttttgtttttcttaagaaatctattttagtttgtaatggataatgtttgataaatcgaaataacatatggattttcatttagtaaagattttcatgcagatatttcatggagagatttataaacatattggaaaaaagtttttttttttaatttatcagttttatcacactactacacactttaacttataagaaaagtttatttttgtcttcccccatttatttaggatataatgtaaacggattcaaatgggttagtccgtttaagcctgcgggcttagcaggtttgatgaaaattaaatggacaattgtatctttaattacagagacgagtgacgagcgacgagtgacgagcgacgagtgacaagcgacgagtgacgagcgacgagtgacgagcgacgagtgacgagcgatgaccaaatcctacagaaagatgtctaatagtagcacgcaagtgactattcatatgattgaccaaatatcttttcgaaagacattttgattcttagtttaattataagggttccacgtcccgcgcgccaatcattttgcaaattatagtgttctactttgcacatacaatattaaaatttatctaatcattgcaacgccgtcattttggcgttcaacgtttctgctccaccctgataaattagtttttatattaaaacgaacgtctcgaggaatagagttaaccaagccagttattgaataatgaagccctatgtgagatactatatatggcatcttgatagctctcaaagctttgaaatcaattaagagatactatatatggatcacatactgaaaattatagcataaaactaaaaagtctaagtgagatactatggatgatggatcacatatacattgtagtcatgaagttcttaacgttgaaaagatctatacaattccaagtttattgaaaatgaagaataaattgtagttggagcaatcgcagaaaccaatcgaccatttgccgtcagcttgaggtttgccgccatgcatcgccttcaacttccatcactcacagtcactctgtcaattcttcacccccacaaaaggaaaataaatttttaaaatgtaaatgcctagtgataatatatataaggaggatattattttcagttttattaaaagtcgtcttataacgttcattaatgttataggccatctttggtctgtatcttaaacatggaccatatattacatgttagctcattagtcctctttgctttttcgtgttgactgggacaatttggtgaagtcgtccatagcattcaggcaatatatgaaggttccgattcgttctgacgtggaaattacattgatatgtagtttgattaaattaatcgtcgaaagtaaacagtgtaattgcataatgatatatagtttcattttcttgtaattaatatacattactaattatacaaagttggagaataacaaaatttgaaatcagtaaaagccaccatataaatataagattttctttatttgataatatttgaacttgtttcattttcttgttttgtttactatattttgaaatatctgccctttaataagagaagaaataaaaagagcttaagaggcactcgtttatgagtataactgtaataaaataaaaatactagttgtagtaaaagaaattaaagatgtgttatcgaaaaatttcgtgtcatttgaatactcgcatagctaaaactgggattgagctgagagagaaagcctttgctccaaaccaagtgttgatgctgatgggccttagagaaataggcctattataagttttacgggcttcattataggtatgattcgaggaatttaacaaatatttcgttggaaaaaaacaaccaaatagtttttcttcttcttttcattgtctttttctggtaaccaaaaagttttggaatttacagaaaattcttgttttgatatgattaatattaatatttgaagtgaaaaattctattataatgattaatgcatagttaaaaaatttactaagatatgaaggcttcaaattcaatcatatacatatttggtaatcatatatgaatattactaatattgatttttattactaaccaagcatataatatatgttaacacataacatgaatgagaatggtttaaacgttactaatcaaatcctatgtatgtaataaataataatatatttagtcggctacctccccactatagtctataaactatatagtacacactcatttttttctaaaagtggcattttaagtggacttttcttcttaagaagcatggtgtggatcgtttactaaaacgatcatgtcatcattttcttctctttcatatatagcattagatcagaacgctacaatttttctaataaaattccaaattatattgatactctctagggttcctagttctacaaagtaagttcaaaaattcaaacaattcgagtcatatatttgtctcttgaatcttgatataacagattcaacactaaaaatgagtaaaatctaaaaaaggtgtctatttagaaagaggaaaaaaaagacattgttattcaatgagttggagcattttgagaaaactattagtacaatgttaataatcacgcgtgcagatattttcttctcggataatttacttttatttagcagaattattgattgtaggcgaatctccacatactccatccataacttggtgagtcccatcatagtattcaccgtacgatcctttcgtggtcgatattgcaactgaggagtaatgtccacccaaaatctcacttgcgacccatacctagttcaacatttgtgttcatactcgacatttataaacaaaagtgcatacaaaatatagttataaaaatgaagtgttatggatatttttttaaccgttgatatgttatgaacatattttcttataaaatttaaatatatatgggatagataaccataaagaatgcagttccttttaaggtacggctaagatagtgaatctaccaagccttccttttcacaccaactatggataaaatacacccgacaaaatgattagtggccataatgtgattataatgagcatgaatgggcaaacatgtcacatttctccattactcaatgtctacataaaccctccaatctcacatgttaactcgaaacaaagaagaaataaacagagtaaaaaacttaaagcttaaaatggggaggcagctttatacgacgacggttctctacttagtcaccctactcttcatttgccggacaatctcagccgtccgtttccctccggaacaaccaacaaccgatgatctagatttcatccgtacgagctgcaacacaacgctgtatccagacgtatgttacacgtctctagctggatacgcctccgccgtccaagataatccggcaaggctagctaaactcgcaatcggcgtttctctctcccgcgcaaaatacacggcggcttacctctccaaactctcacgtcgcgctgcctcagctgctgtccacgactgcgtttcgaacgtgggagatgccgtggatcagatgcgtggctccctaaggcagctccgagagatgaaccaccgtcgtcccggagatccggcgtttaggtttcagatgagtaacgtgcagacgtggatgagcgcggcgttgacggacgaggagacgtgtacggatggggtcacggaggagatggaagacggagagacgaagacggctatttgcgatagagtcgccgacgtcaagaggttcacgagtaatgcgctcgctctcgttaatacctacgccaacaatggagcctaactaactaagctaggtcttgaaattcctaaagttataaaaacacttgtatatatatatgtgttaagttgtgtgcttagtttataatgtgtattcgaggctttgaaaccgagttagaactctgagtttgggtgttcaaattatacattaatctatgtttgattgtattaatattaatatatgtcatatgtgtttatatggtgtgtgctatatgagtaatgaagataattatacatggttttgatgagtaaatttgatacatgaacctggtttttttttttttttttttttctttgatgaatttggatatgatatggatgaattttggccatcatgtctaaggggaactgaaacccgtgagatgattagaacatctgactatgaccccaaagtttgtctattagtggcccactctaaaatctttacgaaaacaaggttttgtcctttttgttcacggggatgccaaaaagcttccatactctgttcacagtttctatttcaatccctattgataatgattacacacattcgcttcacagatttttctaattgaattccctttgaaattttcaactcccgcgctgattccacagtgattctttcttctgctaactgtagcataattaaattagtgacaataatgaatgtttagcattaccaattacatagttttcccctcattattaagtgtgaaaatgaaatcaaagcagcaataattgttcaacaagagaacaaagtttcacataacacaatgcagtaataataataatacacagtcgctaatgttatatcttatctcaggactaagcaacaacacacacacaaattctaaagtttacaatccaaatactgaaagaaatccaaataaatctaattaagctaaattaaagcactctcttactctctaagagattccatttttcagtaactaaagattccgaaattgcataagtaccgattaattcagcacccaaccggagcaaccaccgtcggcttcaccttcggaggtctcccacgtcccctacgctcacctgtcgcctgagctgccggttccggcgcagcaaccgtctccgaatctgttctcggtctcttcggtggtcgtcctcgtggccttccagatccggtaatgaccttctcctggggaggctccgatggatctttcggcttcggtggacggccacgagatctaggcggatctgtagagacgacggtggcagcaacaacagcagcagcagcggcgtcagattcggcctgagtcttctgcttcggaggacggccacgaccacgcttaggaggagcatctggatctggtttcatataattgttcttcaccatgattagctgaccggttttcttcatctggttgagatggtagctgagcagcgtcatgtgtgacggcggtagagtttgttgagtcgactcgatgtgcttagcaatcgtcgttttgttgcagccgttcttatcgttcaaggactcaatcgcttccattatcatctaaacacaaatttcaaccaaaatttcagaaactaaattgagagagattgagagattttaggggtgtacttcacctgaggataaggtgggagagaaaacgacggaagttctgatgaatgcgtatctgaagctgagccatggtggagatcgaaggccatgtcaagcgtagagagtgtgtgaggtgatgaaggaaggaatctgtgtgaggagggattttaaaaagcaatttgggaaagtggttttctcattattctcatattaacttgtagtgttgatctgacggttggggttttcaaacttacgggttgatccaacggctctgagtttatagcagctttctcgagcaggattactgacgtggacatatgggaatgacttctgctgactattacccttaaattacctaattctcctccaatcttccttttttattcaacgaatggccattggttcagcctagctggattactagaacagaaaacgacatactacgtagcgtttttgctaatcatatttcaaattattttgttaatgtaacacaatgagttatatatatctttcattttttttccaccaatgaaaattcatttatataatcaatcccgaggagtctttctctattagcagaacaagatttgcaagactagaagatgatgtgattttattactactcacaaacaatagaatcatatgagacaaataaagcattttgagaaatatacgaagatgggatcacaagaagcccgtgctgccgaaggggttgttgctgttatgttgctcatgagcacctgcgtttaccgggaactccccaaaacccgtggtgttttgcggttctgaaaccgggactactggaaattcccccaaaccggtggtctttgacggttctgataccgggattactggtaatgccccaaacccagtggtgttttgtggtgctgaaaccgacactactggaaattccccaaaaccggtggtgtttgatggttctgaagccggggttactggtaatgccccaaacccagtgatgttttgtggttctgaaaccggcaccactggaaattccccaaacgcggtggtgtttggcggttctgtaaccgggactactggaatctccccaaagccggtggtgtttgacggctctgaaaccggtactggaaatgccccaaaactggtggtgctttgtggttctgaaaccggaactattggaaactccccaaaatcaccaaaaggatttgcagggctgggtgcaacctgtagctgtggctgctgctcttgttgatgataggttggctcatagagaccgaatgggttgtttacggctgaaggcggtgaaacactgtctgaaaatgcaaacaggtcttggacctcaaacggattggaagctgggacgccataggcaggctgttgggctgctctcaaggctccatcgtcatatagactgttcagggtgagcgtgtctaatccacccgccttgcatttgttgcagaaaaaaatgttaatgattcagaagccacaaaatcaattccccagaggtgacatacgttaacaggacaatggtacgtaattgatgcatcccattatcactaatacaagaatacatcttaccagctgtctctctgtggctgcagatatatcattgctaggtgttgtgaccaacgcaagctcccatcctgacggatccaaatctcttgcttgcccaaaactaaacggcgaagaatcaactggaaacagaaacataaccagaattgcgactaaagacaagcaagaaaggcaaacttagagctccagtacatagaccaagaagctcaccatcattggaaactaaggccaaagctagtgcattttggtccaggattgctaacggatcaggtgtatcatcatgcagaccctgtgtgtaatactgagagaatcagagacaaaaggataacaatgacagaataaagaaatcaagaccatatgtaataagcataatttaccaatagatcatcagtatcaatgaagttctgtggagtttctactgaaggaggagactgggaagaaagttgcgtttcttcagagggaacaacggcactatctgaaggcgatgatgtttcatgttcttcatgtgaaggtccaacatcttcagaagtaagaccatcatcaggcgtataggtcagaagctgtatgttgacaaagtttttagaaataagttataaaagaaaaatcatggtttctgtaggagtaggaccacaatgagagtatatatgtaccagtggcccagatgtgacgtcgaccatctgaggtgcgtctctcatatattcctccattgttgtaagaaaagattgtggaggcttgaaaaaaacaaaaatagacttatttagtattgataaagtacctgccatcacaaatttaaatgtaacaaacaagttattatctgatacctctcttaaaacaggaaactggaaattccttgcaagttctaatcctttgcatacttcatagaaggcagaaaggttgccagcctgcattgataaactaacccttgttaagtgaaatctaaattgatctaacagagaaaataacccaacaacattacctgcaaacccgcacgcttgtatatttcaagggccttgatggcctcatgtcttggcatttcaaagaactgcaatatatgcatgtataaaacagtaagaaatcaaaaaacacatgaagggagagagtaactctgggggaaaagaaaaaactggcctaccttctctactagattgataattccttcattgatggcacaatacactttaaaactctccttcaatacctgcatacacaatttacaataagatctcagagcttaaatcaagctgttctttccagatagtatatatttgacacaacactaagaactagcggatatatgtaaattatgcccccgagtttagtttaatgtaccagggagagtgcatattgaatgatatgattgtgcttagcagcaccttctggctgaaaaagtcgaaagagcaaagtcagttcatacgtcaggaaaagcttctccaacttaatagaaaataatacgggatttacaaaacatagtgcacgactcgggaaatgacatcaaagaagcaccttacaaccaatgagacgatgcagaagctgttgtaaagctggcaactgttccaagagtttttcaccatctaaatcccttgttttgctatacccctgttcatttccaaaatcgaataccctcaggaaggaaaggagataatataaggccagaaaaccaagtaaaacgcaaatttgataccttctcctgccctggggaaacttttggaagacgttcagcctcgatgtcatatttcagaaccctgaagcattcaagccgttcctcaagaaacaacgcataagtgcgtacccaccctgaacaatcccatgctgtaagcaagcataaagcaaataccatatcaacaataactctatgcagaaaccttgaatgaacctcatttgcttctaaaaacacatagacccgtgaatgtagcagtaaggactcaccgactgggctagagtcatccttgaaattagaaatttgcataatgcgtcctttttgcgaaaaattcaatagctcctctctaaatgtcggatcaccatccctcagaagccggtgtataactagcagtgcttttaatgcaacctgttgaagcaaaacacacaataaaatagccaacagaaagaatgagaaacctaaccaaagctatctacaccaatttgaaacaatgactgaatcgatcctcagaatttcacaccctaaaacatacagaggatgaaagtgaacacatctaatcatactaaacgctgcaaattactataatcactatcttccctaaaagattcagatcataatccgagaaagagcaaatcaattaccgtccaatttctggttttgtgtaatcgtcgggagagagcatgaatgcagtaagcaacatctgctcgaggcctaatcgctgacgttgcgaggaaaatttctgtaacaattcacagagaataagatatttagaaaaacaataaacaaatacaaatctaaaaactctgcaaaaaaacaagtgagaagcaatcacttactcctgagatgacgatctttgggaggacactcgacatggttagtagccttcactatggcaacatctaattcctgtaaattagaagatcaaaactcgaatctatgagtgattcaccttcggtggtctaagatatataaaactattcgatcgaaatgctgaaaaaatcaaagcaaatcgaaatcgaaaggagcgtacggcgtaatcgctattgactcggacaaggccgactttggtggtgtcttttaaggctccgtaagctcttcgccatgactgtagcgttcccattggagactaagcgaaaaaccgttcagatctctctctctcgaatcttcttctcagatattatttttccccgagaaagaaacgcagagactgagaagaaagaggaagaaaacaaatgagacgcagatttggattcgtctcattcttatatttctttccttaattcgcgactaattgctttttgatttgtatttactctttttattcatttttaactctctttttatcctcttttttttacttcttcatcattcttttttgtcggttttcacttttattttgtttttggctaagatcaagtgtaactttttttagttaaagcagataagtgtaacattcttataaaagttacgattattcatcttggtacttagacgtatgagtcaatgattttctttaaataatgatgagaagaagaaaaaaaagtgattcttaaattaatttagacgcaaagcatgtcgctgcaaatacataagagtgagactattatttgactcgattctgaatcgaatccacggaccctttcattgttcttatgttgtgtcagcaactcgtcattcagagccatgtgtgtgtacatctcatgacttatactaaaatttataatttgtggattaaccttttgtggctaaatgttatctagcgtccaatatataactttgattagattgtgattttttaactatacgaatcaaattttgtagtcactgattttgtaattttacttgactatatcattttttatgtattccgtttttgtgttatcataatgaaagtggggttgtctttttccaaaagcattcctttatgggtcctttttttctactaaagaagttgtggaaaagcatcaccacaccaatgctggtgggggacagaaacatagtcatagagttataggtgcagctctagttgtatcaatactctcatttgacattttcgattggtcgactgaatgttagtttatcttcattttgctagttgtatgaattcgttacaaaatgtatgtagttgtcaacaaattctcgtccaatgttttttcattgggttgtcatattattcgtacagatttgaatggcagatcacaatgaatgcaactttaccgaatcagcacaaatctgttatcacttgtcaccaccttattctccctacattttacgaattgggttgtttatttagtatggatcaagcccaattctttagtagtttaaaataagcctgtactatagtgcaaatgattcccacatcaatcatctagcccatcaaattcatgtgtcttttgatcccaactcggctagtcctgcacgtagcgtccagtgtccactgtccacgcaatggtaaaatatatgaaactatcatgttttgatgatacgaccaagttaacgatgataattgttgctggttaacatcgttcctttcttatccgcataagacttgtttttgggtgtgttaacattcattttcatggtactttaagctacttttagcattttactcggagatatacaattggaatatagtattatttagggacgtatgatgtatctttgattctgtcaagtaggttataagaacaaaatgcttaagtactatacgttttgtttccacgttattgaatgggtaagtggaataaaaacaaggacacctctttcttattcatcacgtgatcagccgccaacaaaagcaaatgtcgtacctctcctcgctccctccgatggttacgtgaatcgagaagataatatcatgaatactcagtctatatatacggtgattaattcattcgctactagagtatgttttacgtgattatattatatatttatgtgatttatctacgtaaaagattttataagaagtaataaaatgtaaattcagcaaaaaaaaaaagctagaaaattacaaacaataactgtgaaaacgttacgaacaaacaacaaaatgattgtaaaacaaagtctaatagaactatctaatttgtcaaacaaatgattttataaccatattacggctaatagaaaactagaaatcgtagaattaatatgttatttttttcattttgcaagtcagccgcaattctaaagtttgatatcaggatgcaaatgtgaacttcacatgggcagtgtttcgtcggagtctatggagagagagattcatgaatcttgttaataatatgaacagataaaaataaaatcgaagcaagagtacatgtgatattcgatgtagggacacgtgcgtatggcctcacaccattatgtcttcatattcccccaccccaaggacatcgcacgacaccttagtgtcagtccagttccagatttgccggctttatattttgctatatgctttttacaagttaaaaattaattatctgattaattaatgtctacaattacttgtcaatttgtcataaaaaaaaagaagttcacaattacttataacaaataaatgtttcatgttaagttagtttggagtactcatttgtacttcgaattgcgaaggcgatttggatgcataacgaataaattacacaaattaaccatgaaattatattcatagatcttccaaacattattgttatgtgtgaaatgtgaatgaatgcacatatctctaaatgagtttgttatggaacctaaaaatcaagtgttaagcttatatacacattacacagaacctagacctaaagtgttaagttgagagatacggatctcatgacatgttttactattttactatttcagcaaatcaagattagagcacgagtgataaatatcatgttttgtttgaccatccgatttaattattcctttggcaaattcgaatctttctggcacaaaatatgtttaaagaacacaaaagcacacgagtacacgacttcatataaaaaaaaatgataaacacatattgattactaaaatattgatggttaacatcttacacatagttacaaaatgtctagtatgtctttattgttgttatattttgccattcaaagttgaagttgtataattaaaggaaaactaagagaataattaacattctaaagctataaaattacttacttagaagaatgaaggagtattaagttattaaccaaatacgttgcttaaattttgtataggcgtaactagagtttaaatgcaacgtacaatacagactagacacggccacgtgaatggaccagaaatgatcgtacgcctacaattagcagatcggcgattgtaacagaagaacgctaactttcatgcttaaacgacacttgtccagactagcctgagctgtctccaaccacgcgattttttttttggttcgtaacgtcacgcgcccactcacgaaatggttaccacttaccaccaccgtctggttttgctaaataaaccaaagctgcaaattaagcttctaattcatctactacaaagccttccatcaacctatttcatctctatctctcatatgcctaaccagacaaaaagaaaatgcaacttaatgttaatcaatggaagaaagcaaaacaaagagtaattatagtgctgattgtaatcatgcaactttttggtgccgttaagttaacgcccacaattggtccatctgccacctcatatcagattttgacaattcacattttttggtccatctattttgtgccgatgcgtatgcatggttctctatcattgaaatttgttaagagacacttttttcactatttcaaaaagactcaaacaatcttgtaaacccaagttattcttcctttttttttttgttccaaaaatgcctagtatttcaagaattcagtaatccaattttacttgtttaaaattggcttgtttatgtaattaacatatatcacgacttgtattacttctttagaaaaaataatgtttggactaaaaagcagactaaatattcattacgaatgatgtgacaccattttcatttgttagcttctactactataaaaaataaataaaggaatcaatgagtgcacctttaatttttttggttaatcaacgagagcacttgatatcaagtatgacgataaccaatcaaagtaaaaaactttggatgtctttttctctttgctagtaaattaataattatacctaccgaatttgtaacacattacacattgacatggtgcatgtttaatccaatactatcgacgtcactctatactccgtaagtaatagtatatatacattgaaatgatccattataccatctgataaatttttgtgaagtggctaaaaatataaacagtttttttttttttgtgagaaaatgatgtaacggagcataattattcgtggaacacaagaacatgtaaccaaccatgtagcacagcgttaattgagatggtccatacgaagagccgtcaacggtgggaatggtcatctcaattctcatcagggcctagcgtataaaaatactttagagacgtgtaataatcacatgggatctttgggaccacagtctaaatggcgtacggtaagttcaagggacccgttttacacgtggacccaatcacatgttgtcagttctgattttcacgaaaataatttcgaatatttttgtaagacattaattagtgggactaattgttattttctgatctgtgtaatcttattatgatttaagaatagttgccgtaagcgacggcgttaagtacatactacaattgtattaaccaattttatctacaaatagcaaaaaaaatcgagactatactttaaaaagaaacgattacaacttaactctatcgtaacatgtaattgacaaaatagtgaatgctatttaagtgtaaagactgaatgctactatttgataattactgttattttgaaatgggtttatatatactgcagtttacttttctacccccttgctcgaaacatgcctacattattacaaaggggaaggctagggcactcaaacagtatgatgaaagcttttagttccccatccaaagaacaaatataaaagtcttttgtaattaatgaaaatgttactagttcttatccactcttacagataaatactaataaggtttaattttttttttaaagatcttataaaaaatgttagaaaaggagctttttcttatattcaatttaaattttttaacaatttaaaactaaaacgggaaaacgtcatagtccctcaatctctttttaataaaatggaatattaatttccataatgggtttaatgatggtttacttttcccaatacaaaagttccattttatttaataagactatactaaatacttaaactttttaataaaaaatatctgtattttagatcaaaagttacaatcacacaaaaccaacacaacaaactccttaaaaaagcgacaaaaagtaaattgtaccactagttgcatgacaatctttttagttgttcaaaattgtatgaccatctaaactctaaagtaatactaactttagaaaatattaatctgtaaaaagctatatattccctaatatattagtttattaatttcaatatattccctaattacaaattttggtgtgtgtgtgattttcagccttatctctttgagctgtagatgttgctgttagccctctgatccatgattcatcggacatcgagccccatcacgagcctttttattctcaacaataataatcattttttttcttataaccttcctctctatttttacaatttattttgttattagaagtggtagtggagtgaaaaaacaaatcctaagcagtcctaaccgatccccgaagctaaagattcttcaccttcccaaataaagcaaaacctagatccgacattgaaggaaaaaccttttagatccatctctgaaaaaaaaccaaccatgaagagagatcatcatcatcatcatcatcaagataagaagactatgatgatgaatgaagaagacgacggtaacggcatggatgagcttctagctgttcttggttacaaggttaggtcatccgaaatggctgatgttgctcagaaactcgagcagcttgaagttatgatgtctaatgttcaagaagacgatctttctcaactcgctactgagactgttcactataatccggcggagctttacacgtggcttgattctatgctcaccgaccttaatcctccgtcgtctaacgccgagtacgatcttaaagctattcccggtgacgcgattctcaatcagttcgctatcgattcggcttcttcgtctaaccaaggcggcggaggagatacgtatactacaaacaagcggttgaaatgctcaaacggcgtcgtggaaaccactacagcgacggctgagtcaactcggcatgttgtcctggttgactcgcaggagaacggtgtgcgtctcgttcacgcgcttttggcttgcgctgaagctgttcagaaagagaatctgactgtagcggaagctctggtgaagcaaatcggattcttagccgtttctcaaatcggagcgatgagaaaagtcgctacttacttcgccgaagctctcgcgcggcggatttaccgtctctctccgtcgcagagtccaatcgaccactctctctccgatactcttcagatgcacttctacgagacttgtccttatctcaagttcgctcacttcacggcgaatcaagcgattctcgaagcttttcaagggaagaaaagagttcatgtcattgatttctctatgagtcaaggtcttcaatggccggcgcttatgcaggctcttgcgcttcgacctggtggtcctcctgttttccggttaaccggaattggtccaccggcaccggataatttcgattatcttcatgaagttgggtgtaagctggctcatttagctgaggcgattcacgttgagtttgagtacagaggatttgtggctaacactttagctgatcttgatgcttcgatgcttgagcttagaccaagtgagattgaatctgttgcggttaactctgttttcgagcttcacaagctcttgggacgacctggtgcgatcgataaggttcttggtgtggtgaatcagattaaaccggagattttcactgtggttgagcaggaatcgaaccataatagtccgattttcttagatcggtttactgagtcgttgcattattactcgacgttgtttgactcgttggaaggtgtaccgagtggtcaagacaaggtcatgtcggaggtttacttgggtaaacagatctgcaacgttgtggcttgtgatggacctgaccgagttgagcgtcatgaaacgttgagtcagtggaggaaccggttcgggtctgctgggtttgcggctgcacatattggttcgaatgcgtttaagcaagcgagtatgcttttggctctgttcaacggcggtgagggttatcgggtggaggagagtgacggctgtctcatgttgggttggcacacacgaccgctcatagccacctcggcttggaaactctccaccaattagatggtggctcaatgaattgatctgttgaaccggttatgatgatagatttccgaccgaagccaaactaaatcctactgtttttccctttgtcacttgttaagatcttatctttcattatattaggtaattgaaaaattttaatctcgctttggagagttttttttttttgcatgtgacattggagggtaaattggataggcagaaatagaagtatgtgttaccaagtatgtgcaattggttgaaataaaatcatcttgagtgtcaccatctataaaattcattgtaatgactaatgagcctgattaaactgtctcttatgataatgtgctgattctcatgaatatgctcttttaatgtgcatggtattataggtggaccagattattttaacaatgctaagtcgttttcagttttcttatttgttaatttgaaagaagaaaagtaaacaaaagaaaccgaaaagatacaaatgtccacctttaatacatgtatctgaaagatatagtaggcgattatatatgtcacctaaaaaaaaaaaagagtaggcggattatattgttcaacatcaactgcacataaataattccacatatgtaaaaatgggagatgttgatgttcttcgtaaataaaagactgaagttttttttttttttttttgacagcaattgaagttggtttacgaacttgtttaagagataaaaaaacattcgacagtggtggtagtagactagacttcactcgtgaccctttggtattatatagttgagtgactgtgacatttgatcctttgtgatgtataaaaagggcacgagggcggtttgatggttgattatagtcaacttttgctaccccacatatatgggccgaataagtgctaatgggccttagtaaaaatcccaaaacaagtagaaatggttcagaaaaaaagatagcaactttgaggtgggaattggtcaattggcaaaacagagggttctaaaatctagggtttatacgttctatagaagggagaggaggagacgtgagagtctttaggcggaaaaatatatttgcatatttacttttgtatgtgtttgattttgtttcagaattatggatattttggattttggttaatcaatctctctcccctcgtgaaaaactttctttatctattttgatgaaatttttattaggagatggataatgagagtcatgagactaaatgactaacatacatccgctttatatcttacacaaaatcgtataactaacacacttattttattacgaacacgcataataacatcacagacagagatggtatacataagcatacaatacaattgcttaacaagaccgccattattattagcataacatgtaaaggcggatgataaaggcacttacgagacaagtacaaaagacacatgcatgaggatgatttacgacgatgaccatggagggttattaagctttgttctggcccttgaggatgtggtcatccatatcagcaactaagctcttgacaaacttcatgtagttgatgggttcgggggagtcttcgttgcgattctcccatatcagagtgactttgcagacgcagccttcgttcgacttgggaatgaactgtaagataacctcatacttcttgtacttctccatcacatgaccctctagtcctctgaacgtcaacgccatcttctcgtcgtctatctctcttttctccttgatgacttccggcttcccatcttcatacacacacacacatttttagtccacattagaatatatagatatcatccaatcctcgcgtgttaccaaacacagaaagagatagagtaaagtatggaccaagtgtgtagttccaggatttgatggagccgtgggagtcccagtcgccatcgtggacggtgacgccttggacatggtggccgatggcgtccgggaagagattgttttggctcctccatcgcctgtagtgtttctccgccgaccctttcagcggtacttccgccacgtattttcctgacatcgccatttcttgattgattgttttcttttgaaatgtgtcaagtgttttattcgatggaaaaacccaagtgttgcgcttcctttatatacaaattaagactcaccacaacactaacaagaaacgaaattatggcgataaagatttaattataggtggtttatatcttttaaactataagataaagatttcattcgtttaacatttgctaaatcctgaatatgaaatgcttagtccatccgtaccattttaagtgacttttaaccaaataattgttttattttaagtgaaagttaaagaaatgtatacgtaaggatagtttgtaagcgcttgaatataaggtttgaattggttggaatatgtcattattaatagataacacataacagattattaactggataaaaagaagcaagaaaagtagggcgaaatagacgggcaagagggttttgcgttatttaatgaccatagatgtcatagtgatatgctccacatgtgtatcccatgtgtcgtcatgtccaaattacctcacacttatagattctttgaacctatttttgttttgttttgacacaagcacccttttatgttataaccatcgacttaagaagtatctttaatttacataaaatatgaatatataacaactgaaaactgtccttcaattagatacgaaacgtgtccatcaaaattagttatgcatatattgatattcccacatatgaatcaatgttggaattggattgatccgagtttatgataaaatgtgggattaatgattatccaatatatattagtattttgtatataatataattaagaatatatgtagagtgttcaggttttataagttttttagtacgtattagaataatctatttagggtatctatgtttagtttattctttctttgtaaaagctgcagattgttatagatttctaaatttcagtctttacttggttatctttttttggtcatatcgttcgtacttcttaattatcacacccacatgcatgaatatttcaatattccccttttttagttaaaagactttacggtaaacgagaataatttttttacgatcttgtataagacgtttattatgacgatcatagtgaatatgcatttatgagaatctcaatgtgatatatgaaaagaaaaggaaacctagtattaaacattagcactgcatggtagggatcatattgtttccatgaagactactttgagatgaattagtcacttcgttgagatgaaacgttataattataccaacttcatagtgttgcgagtccaatcatcaaacaaattaaggagtgatcgcataaatcacattgagattctcataaatgcacatccaaaaattatacaagagatgataaggttggagcaaaattaaattgtcaattgatctgcttcttgaaaaggttacctattttagtgaagatacttatgtgatagataatgacgattgagggtatatatatacatcctaatattatgggctattttacgtcttacaattactattttattacgaacacacacttacaccacgaaaacatcataacaacatgtaatcatcaaacagagatgatacataggcttccaagaccgccattattattagcataacatgtataaagggggaaagaggcggatgataagtcacgtacgtacgtaaagatacacaaaagatacacacacataaagatgaagaccattcgacgatgaccatagaggggattcaagctttgttctggccattgaggacgtggtcgtccatgtcagcaactaagctcttgacaaacttcatgtagttgatgggttcgggggagttttcgttgcgcttttcccatatgagagtgattttgcagacgcagccttccttcgacttgggaatgaactggtagataacctcatacttcttgtacttctccatcgcttgaccctctagccctttcaacgtcaacgccatcttttcgtcgtctatctctctcttctccttgaagacttccggctttccatcttcatacaaacacacacacacacaatgctagaccaaattagccgatcgtcaatcctcgtattaccaaacatgattaaagagagtggacacccggtgtcggtagccctactttgaaactcttggaggagagtttgagaaggttcgaggcctagctaccaacatctgggagaggacttatctaccttattccttggccccaaaaaatatatggaccaaaaatctaaaactaccaaaatactacaaaaaaagagagaaggtaaagtagagaccgcatgtgatattccatgatctgatggagccgtgggagtcccagtcaccgtcatgcatagtgcaaccttggatgtggtggccgacggcatcctggaagacgtggttttcgttcctccacttcttgtagtgtttctccgccgatcccttaagcggtacctccgccacgtatgttccagacattgccatttctcgattgattgttttcttttgaaatgtgtcaagtgttttgtttgatgcaaatactcaagtgtcgcacttcctttatatacacgaaactcaccacaacactacaaatagcaaaacggctatatatatatatgtatatgtaacattatacataattgtctccttcaaatatagggtttaattcttttaattagagctaaaaaaaatcatttgttcaccatctactagatcctgagtatgaatgcttagttttactccagaaataaaattgtgcacccatatatagtttctttctgaacgaccggtttttgagctagattgttgactattttaactctagttctagatctaatttgttttaactgtagtttctagattgaattttataaactccaaaatcaaaattaaaaagtaaagctaatatttgaaaaacaaacaccttaatagaaagttgaactattactctgattctaacaacaaaaatcccaaaccaaacatagactaacaacctattatacgaacacgccattgtctcttaaagcatattaggttttagtctccgaccaattcaagttagtttttccttaccataactcaaacgttcaatatatgtataagaggaaatatttaatctataaactacaaattgaattatctaaaatatccaatcgcttggaaatatcgttaaatctagtacaacctccatatcattttaagtgatgacatgtgaagatagtttgtaaaagctggattaagtttcgactcggttagaatgtcattattcatatatagtcagagactcataggtattaggtaaccgattattgactggatgattaatcatttcattggataaataccgactgagaaagagaataaacctaggcataagaggttttgcgtaatttgcagatcaacgacatcatagtgatattggtgctccacacgtgtggactaagtgtcttcatgtccatctattcctccttatagattctttgcacccatacgtttttttcttcggatttagtactttcttatcacacatgcatatcttaatttccgtttcttttaagttatagacttctaaattcaaaagacttgaacctacatacagaaaaattactatggtttaattactacaaatctatcttctcttattcattgaatatttatttgattgtggttatttttactgaaaaaataaattgtacagagcataattagagtagaagaagctgagaagtgattacaaaaatcaagactaatgtgataatatatgatagacaaaaatcagtaatgcatcatttgcaagcgctacatggatcatattgttgcacgaagacctatttggaataatgatgcaacttcgttgagataaaaagctataattataaattaatttaaaaaataactataattataccaccttcatggtgttgcttgcaagtccaaccattaaacaaactttttttagctaaagaaatctgataagatgtcaaattaagatgattatttaataacattcttattcttttattgttttatgtagttttaatacgtaaattattttaactagaagtatgtttttgttataggatttacatgacttttaatcagtataagagcatacatgtggtttggtttgtttgtttctatagttaatgcaaaagatttgtaagttttattttgtatgtctgcttttgttgattcattaatggatattttggattctgcaggttagtcaagttgttacctcgtacaaatttctttaatactttttctctttctttatgaaattaattatgtgatatacagtgagactatacatcctaatattgtgctctttatatattacgaacaccaatactacaccataacaacatcaaatcatcaaagacagagatgatacatgcataagtttacaagacgtaccgccattattatcagcataaaatgtacacaagacaaggaggcggtttcatcatgtacaagacaaacacaaacgacacacacacatatatattaggatgtttctttatttatttttatcttcataagtatggtcactatgatgattaagccttgctctggttcttgagaatgtggtcatccatgtcagcagccaagctcgtgacgaacttcatgtacttgatgggctctggagagtcttcgtagcgcttctcccaaaacatagtgactttgcagacgcaaccttcctgagacttagggacgaattggaagatgacgtcatacaccttaagctgctccatcacatgaccatccagccctctaaacgtcaccgccatcttctggtcgtctaactccctcttctccttgaacacctcttgcttcccatcttcatatatttacatgaacctttcattaatagaaaccctagctagtaataaacacatattcatacaaatagagaatgagatagaggaccgcatgtgtagttccaggacttgatggccccgtgggagtcccagtcgccctcgtgaacggtgacaccttggatatgatggccaatggcgtcagggaagagttggttttcgctcttccacctcttgtagtggttcttcgctgaccctttcagaggaacttctgtcacgtatgtacctgacgtcgccatgatgaagcttctaaaatacttttgattacttgtttttgaaagtgtttatgcaaatgccaattgtttattttctatggaggtgtacaaaaactaaagcatcccccttcgcttatatacacaaactcgtcacaacattacaagaaaccagatatatatgtatgactttttcaagaattaaacatatataaaatcaaaatcagattttacttaaaatatatgtgctgtagagtttggattaaatcttgtttgtcttttttgtatacagatgtaacgttaccactaaaaaatgtgacgttcgaatttataataaaaatgaccaacaaatattttgcatgccatccattgtgctgaaaactatcaaattattatatatggtcggaacaaatttttgggatttgctggccggttgaattggaatggttagtgttcctcacgttaatcagatttacaatttacaaacacttagggaaaacagttggaaataaaccaactatttgggaacatacttatctatttgttaaaaatgttgtacaaagcagaaaaatattacaatatttgcgataaaagcttaacccatgagggaatgcagttacaaaaagtggagatatatgtatcacagattgataattagataaacagcgagtaaaggggaaaaaaaagacctgagcgaaagagacggacaaaaaaaagaagtaggtgaaacttcgaccgttttgggttatttaatgctactcaacgtcatagtgatactggtagtccacacgtgtggtctatgtgtcatcatctctattcccactcttcgctttaggttatttgccatactttgtgttatctaactattgatcttagaattagggttattaacttatttgaaaatattaaaatctcttatgttactgtgtaccactgcaccggcctttttgtaatacttttggattatctcgcttgacctagatccccaactatttccggataagtttgggctcataccagattgtacaagtacgtattaaataaacgaacatcatggtgactaaaaagaaagacaaaaaaaaaacgaacaacaatacttttataaataaacgttggacatacaacaccatgatgatattaatatcatgtacgagatggacacacattaattaagataaataaaaggaggatgtgatgatgattaagcatcgatccatcattcctggttttggaggatgtggtcgtccatgtgagcaatcatctgttccacgaacttcatgaattcgatgggctctggggagtcttcggtgcgtttctcccagaccatagtaattttgcagacgcagccatctttggactcggggatgaaatgtaacgtcgtgacataaaccttgaggacctccatgacgtgaccatcgagtccattgatcgtcaccgccatattctcgtcgtccatctctatcctctccttcaatacttcctctttcccatcttcaccacacacgcaaacaccacaagattgtatactaatcaacatacacatttatatctaaccataaccaaaccctacttttccatgttaaaacaaataacttgtaagggaaactcatgaatatcacatatagctaggtgtaccctttaagtcatttgtatcattatataaagagaaaaagagtataaatacgaaccacgagtgtagttccagattttgatggtgccgtgagagtcccaatcgccgtcatggacggtgacaccttggatgaggtggccgatagcttcagggacgaggtggttctcgctcctccacctcttatagtgtttctccgccgatcccttaagaggcacatccgtcacgtatgttcccgacatcgccattgatgaatcaattagctttggattgttttttgtgtgtgtgtgcgcgcgcgcgctttgacttttgagtgcttttattcctgttttctgatgcaaatactatgatctctcccttcctttatatagacaagctcaacaccaagctacgttaacaaggaaactattaccaaaatttttatacggcttttaaattgttgacggttcatatattataaacaattatagtcacgtattgatatatatatatatgctatatgatcatgtgttcagttagctaaattaatcagttaatatgttgattgttataattttcatccttagaaattcgttatagaattttttttactagtaccctttagatggaaaaatttacacccttagaaatgattagctaatattctaatattaatgcaatcatttcacaccatatatcaaattgtggattattcaacatgcttagaaaaataattgcgtatattcttgtctctcacaatatcactaaatttgtatttttaatgaaccgcgaatactagttatacaatataaaaacagatgccagccatttgctgactcacacaaatttttcaaaaagattagtcaattgagtaatgtcgtatatcaatcgaaaaagagattttagaaaaaaaagtaagttgagaatgttaaaaatcattcaatataatatatatatatatatatatatatatgtcatatttagattaaataggactcaatcattacattataagtcaacatcataattagttttaaagttgaaataaccatatatactaagaccagaaatatatgttcaaagttaaatatttgaaataattaaactaagtccttctttcaagttaaactaagatcaataatagaggggtatctcgatactgaattattgatgatctcatgtaagatcttttgacattgaattcggaaattaataatggcacatgcattcggatgatataacttttttaagtaaacattgaaataataaacaacttcaaacgttcagatgtaaaaaacaataaaaataaaaaaaaaacaaaaaaacaatacaaaggcccaattgttaaaggcaaaggcccaagctcatcataaaacaggtaacactaaaccgggtttttttcagaaccccgaaatagttgtggttaaggcttaaccacactataagtctataaccaccatcgacggcgaggttaatgaccacttacgtaagcagactagcagagtcacgaagatgtatactcattcaaatgtgagcatgatggcagtgacacaaaagtagcgagagatactaaacaaggattgattagcatttagtccccctccttccctaataagatatggttcagaacaaaagcatgcaaaagcgtcaaggtgcacaataaagagtctcaattgcgtaccaatcatattccaattcatagcccttcttcaatagaacttatagagctatgtaatctggcatgccaactgtggaataagcatgtaggttcatgtgttaatcaagcgcatacaaagcgagagtggccatttttaacaagacgaatattattcaagatcttattactaaacatggttctagcttctaggccttgttttcgtaggaaactaaaatgacagacagtaaaaaacattggactcaccacattcacttggaagaaccataagaaagataatatttaaaatgaaatgtaaacaagattaaaccaaaaaggaaccaatcaatgtacaaatttttttggcagctctcttctcccctatgatctacatttatttatgggcaaacccaacactagaccaccaactatacaaaactcaaaaaacttttcaaactgcaaaacacaaatgaacatccaaatgctatcctctccgcccagaaacaaacgtgggaactaatctcagtttctcgtgttagatacatcagcttcaatgtgttaaaaaatctcccccaagaagaatgcttgggaagtcctctctgtctcgctctcgctctgtttggatgcggatgtggccaaagaattgaaagaattagcaacacatgtaaataaaagaatgcacaagaagaatccagtaaaagaatgtgtcaggtggctgatgctgttgttttgttcttccggcacatacaatcaggacaagggaatatgtaaatggagtcacttgatcgtttcagctcaaaccccttggagtcactatgggacctcatacttagcatttgccgtttaaaacttttccatctgccgtaatatcagaaacaaccattgagggatcaaccagatattattaaccaaaaaagcatgtttgtaggtggaagaggttagagttcttaccccaacttgggattgtcaaagagtacggctaactttcgcttgtctggctgaatcgtctttgaatgtcctccaaacaaatacctccgatgccccatgaggaaatgagggaagtttccaccttgtgttgtcacaaatacctcactgtggagacacaccgtgtaatctattgcagccattctcgaggagaagttctaaacacagacacataagtttacaagtcagaaaggactcatcctggatgaacaaacagtggaaaatcgtagaaaccttaaaaggagccaggtcttcctcagaagcaagcatctcctttgtctgtagattagggaacatctcgagtagtggggccatagttctatttgcgctatatatcgggccagcggcaaggaatatatatgtacttttgttgaagcccattcctctaagcatcaaaccgacctgataggtttacaagaacgaaaattgaaccaatatcagcaagttaatctactcacatgctcaagggtttgcacaactactctgattattccacagcagtgtccatggataaataatatacaacaatattctcgtaacactaatacttaatatagaccacaatcgtggataagtagagtaatgtccaggttctaaagtatttatgcttacctctaaaggagttaaagggcatttcccattgagcctgttagctcctggtcgtatcacacggcccggttttgtgaacttccctttccatcctcgttctctagcggcaatcatgtcttgtttttcttggtctccaccatcaaatacacaacaagagaacgcaaccatatcctgcaacatgttcttatagtgtattatatctctcaccttagatacagatctgttttcagaataatcagccatgataaagggacaagtgaaagattcctgatgcgtttcttctttacaggttacaaacctcttcaaaacgaagatgcacagaaacgtatttcccggcgttgtttgcactaagacccttcattttgttcaccaatgtttctccttgggtcagtatgggttttgaaaatcgcaaggctacattattcgccaaacatctaaatctctggacagctcgaggagcatcaaacgaaagtctatttgcaaatggggaaattcttataaccctgtgccgtcaaaagacaacaaacaattcaaaatcagtgtagtataacagaataaagagccccttacacaaaaacaagacagcttattatggaaactaaagtttattagttagcaaaagaggtgtgactcacttttcttcaagcagctttggcaggactgagtcccggtaataggaggtgggtgcccatgctttaactctgaagttgtagacatttgtcaagttatagtcaaaacgctccatcaagtattcaggaactgtatcgaccacccgcacatcatttgctaaggtatcgataaagtactcttcatcatagatgtccccaaatttactgcaaggaaaaccttttttcagaaagtagttgaaacagggatggctttgcttaaatttataacaccaggagaagataagaaaacaaatatccgaaacctcggatctttccatatgctgtgatagtgaaagttgggaattacaagggtcgcattaaggtagcctgccacagcaaccgcattgcatatctaagtaaaacatggaatagacaagtcaacagcttcacctttgacaagtttgccagacaatagcaagaaaggcttgtgtgaaaaaaatcaatttgatgtaagatgattaacctaccgaagtccgctgctgattcaagcctccatttgcctcaataaatatgaaaccatttgacacaggtaaaactacaattgttaacacaaacaacaacaagaaagcctaattgattcaacttattacttaggacaaagaacactaacgaagaaactaggagaacaatgtaaaatacctccagtagacatgttcacacatggcttccattctacacctttataggaacgcttccaaattgttgatatcttaaatgaatacaattgcattgacgatacatgacaaatgggaacaagaaaagaacagagatcaatctatgttcaacattgttatacgttctcctagatattatactctaattggatcaatctatgttcgacaatggccacattctcaaaacgatatcacaagcgggataaaacggaggcaaacctcaccgcatcagccgtggtattatcggcttcaatctcgccgcgaagcctagcgtaaacctgagggctccggtagacggatcccggagcaggacggcggtggataatgggagaggcatcaaacgacgccgcgtgtaggtgaaaaagcatacaggagatgtagatgataggagcgaaaaggagaattc

SEQ ID NO: 41 - DNA, 20152 bp, Arabidopsis thaliana
aacggaggcaaacctcaccgcatcagccgtggtattatcggcttcaatctcgccgcgaagcctagcgtaaacctgagggctccggtagacggatcccggagcaggacggcggtggataatgggagaggcatcaaacgacgccgcgtgtaggtgaaaaagcatacaggagatgtagatgataggagcgaaaaggagaattccctgacgccggagaagaacagataaaatgatccatgagagacggtgagcgacgttccgactttgctgttgcccggagacagaggaggatttcgaccggctccggcagagatgaggagatgttggcggagaaggagtagtgtgatcgcttcccggaagccgattttgaatcgacagatctctctccacctgggaaatcattgtttccctgctctctctctctcttctcaatgcgctacgccattaacgatataatgcattgcttgtaacaatggcaggtggcaaacgccgattgaacggatttatcccggcggcgaaactgtgagtgaagtaagcaaaagagagagaaattttatttatgttatgtatgtatgcgctcgtgcggtggaagcatgatcgattaatcacatgtacttgagtatttatttggcttttcttatgtgttatagttctttagtctttttctttcttcaattctttgatttcagtttctatggaaaactattgttaaacgtgagaattcaatgcatcggtttctacgtatggtctaatttgtattggcagagagacttgtccaaaaatagcaatgagtttcatacacatttttcagtttttggttagaaagatgaaatattttcaatcaaccaacctatactaaatttgaaggtgcgacaagacaatatactacagttgtcttatcatccaaacgagtgggttaaacaactgaaaatccaaaattagtagttttccaaccattgtgaaaaggaaatcaaaagacacaactttcagaatgcatagacatggacctacttctcgacctgattcagttgtcaatatgtgaagaaggagatgctatataaaaaaagccatgcggccaaatgagcttatttcttttgttatagcatgatcatgaataagcaaagtcaactaagctatcgtctacattggctattgaagttgctgcctaaacgtaaacgaaaagcatccacagattacggaaaagcacaaaatgagaagatgcaacacttgggttatccatgtgattgatgcccatttgtaaaaattcaaagacaggttcataaaggtagattcaatgataaacgacaacaaagtccaaccacatcttcaagataaactaatttataaatgacttctcctcataacacaaacaccaacatgaaccctcgtggttaagttggcaagcttagccttttcaatcctcgtgcaaagttcccaaaacatcctcgtcccggaagagatggtacctgcgtccatcacacaaacacaaaagttactcactttgagtcaaattcttcttcatttgtaatttcttattcgtttctaaaatcaacccaccaatcaatatgtaaatctggtgttcaaattggcattattaaacattgatcaaaatgtttttaaatcctctgttacaaaattttcaatatcttcacagtcttacaagtaattcccttagttccatccattaatctaattaatggataatgattcctgaacatgattagctaaacataaaggttcaattagatcagatcagaattttatcagaatattagggcaataataagaaagaagcgggtttaacttactcgttctcgccgagcttgacctgtgtaccaccgtactctggaagaagaacagtgtcgccttccttcacagagaccggaatcaatttcccgtccttatcccttgatccaggtccaacagctatcaccttgcctgagttcagctgcaatcacccaaaaatatgtttatttttcagatctaagaggcgaaaatcagaagaatcaaatcgtgaaatcaaagctcttttaccttggaggatttctcaggtaggagaatgccgctttcggttttagcgggctggatgactctctgcaccaagatgcggttgaacgttgggatcagacgcttcatcatttctcaattcttcttctctctcagttgatgaatcggaattttctagggtttctgagtttttaatttggggcagagacacataagacggaaggttctagatcgtagggtttagcgcgacagaaaaaggccaagggttttgggattgtttgggcctataatatcatactatttctttaatgggcctcactcattaaaaaaaaccagtcgcatttgtgtttgtctaaataaattcttggaagtgttgtatgaccttgcagctcaaatggttagttccttccatgattctctttgccaagtttttcaaactccatgtacaatcccatttcatataccacatccagaatgagatgtttattttcggcagatttttcgtggaatgaaatcttgacctttcttttatcaaacgtctctgctgatgatggaaagcttcttgctctgtcagttttccccatttctttcaaggtggtaaccaaagtttttccccggattgttgctttgctatgctatatgtttattacattgtgcctctgcgggaattacatgctcttaattttcagagtacaaatctgaataatccatgtaagccaatggtacggttccggacttatacaaacaccatacaaatgttccaagataccaggattcgaatttgctataacaagattaggcacaaagctgaaacaaagagagctggcgccactagccacttccatcgagttggccttgagatagaaggtgagccatgtattgctgcattcacaataaaatgagctcaattcttggttctaaccccacatgattcgacaaacatttctatcaatggcaccacaaagtcagtaccatcaagattctagacttatggaaactgacctttacaacactaaaatatccgcaccacagagattatcataaagagattgaagaaacttacggagtggtaaacgtatggagattttccctggcgatcaaaatgcttagccattatgcagaattcaacaggaccccaatcttcagattcatagcaattcccaagcgccgctttgtacagctttactccaataaaccccaatcatcagttccacacagaactaatcaactatataaactgtaaacgacaactcaaaattgtcatcaaggacaaaccttagctgtgtcggtcaaaagttcggtgccagcagggtaagatgcataaaactgatctcccctggaatatcctgctcttgttctacacaacattcgaatcagtaacattaaatcaaattaaacctgaagcagaaaccaagagaagaacccagaaattgaaatcatctgcgaattccgatattgaaaagaaagaacaaccaaaagaagcaaactgagatcggacgaaagacattacgtgttgtttgtatagaagaatgtgagggcagcagtgaagcagtagaatccggcgtaagagacagcccgtcgtagcttctggatctttataacctctgagcaaacatccaagatcatcatcttcacaccttcggaaactctttcaggtattatatcgaacaccttgtgatcactttaccaaacagagatgacgagtagaagaagcatctcacgaaatttgcaattgacaaattgtaaacgctttgtattgtccaactttttatgggcctatctgacctttttctcttttcggcccaataaaacttttagattttatttcttttggcaacaataaatttaaaataatatacattatggaaaatcatctacaaacaaaaacctttaaattaaaaaactcacatgttaatgcaattaggttagtaagcaagcacgtcttgacaaaaatgttattgttacacatttaaaaattcacatgttatacaagacaaaacataaacgtaatgttttgcagtcaaataatgaaataaatgaaataatacaaagggatctttatgtaaaggcgtcaccaattagtggaaataatggagcaagccactacactcttcatattgctttccactctcctcctcgccgtctccgttgagtctcctcagccaccgctatttcccgatgaagctctccccactaaatctggctacctcccggttaaacccgcacccggctcgtccatgttctatgccttctacgaagcccaagagccaaccacacctcttcctgacactccgctcctcgtttggctccaaggtgggccaggctgctcttcaatgattggcaacttttacgagctcggtccctggcgtgtagtttcacgcgccacagacctcgagcgcaaccccggcgcatggaaccgtctattcggactactttttgtggataacccaataggagtcggattcagcatcgcagcctcacaacaagacatacccacaaatcagagacaggtcgctgagcatctttacgccgctctcgtggagttccttgaacaaaacccaagcttcgaaaaccgaccggtttacttcactggagagagctacgccgggaagtacgttccagccattggatactatatccttaaagagaaacccaatgggaaagtgaatctaaaggggctagccattggaaacgggctgaccgacccggtgacccaggttcaaacccatgcggtcaacgtctactactcgggtctggtcaacgcaaaacagagagttgaactgcaaaaagcgcaggagatatctgtagctctcgtgaagtcccagaaatggcgtgaagcagcagacgcgaggaccgaactgttgacgctactaagtaacatgacaggactcgcgacgctctacaacacggcacgggcgattccatacagaacagacctcgtggtggacctcttgaaccagagagaagcaaaacgtgttttgggagtgagtgaaacggttcgttttgaggaatgtagtgatgaagtagaagatgtgttgcgggcagacgtgatgaagagcgtaaagttcatggtggagtacgcattggagaggactcaagtcttgctgtatcaaggtatgcttgatctaagagacggcgtcgtttcgacggaggagtggatgaagactatgaactggtcaggattgggaatgttctcgacggcggagaggcgtgtgtggaaggatgaagacggtgtggtcgctggttatgttcagagatgggggaatttgtgccacgtggcggttacaggagctggtcattttgttccgacagataaagctgtgaattcaagggatatgattgaaggttgggttttggggaaaggattgttcggtggtaaagatgtgaagcagacaacttcgtcgagcttataccattcaatctaaatattgtgtacttgtacttagttctgtaagattcaattcagattctaattgtactctggatttagatttgttacgtcatgttcacaagttcattttagtacgaattggtaacttttgctacttagtttatcatttgcctgttcctgaagtcttaaactttctcaaaaaagttagcatacagtatacacttaaggattgattcagataaactgttttggtaagaataaggagatttgaagcataaactaaagaatttttaaaaacatgtaatggcgattggaggcgggattgtgaatgagattcaaagtgatttgagtataaaaaatacacaaaacacagagaaagcacaaagaaacccgtactatgaagccattttggtattagggaaagaagagcaagggcaccccgtagaaaacctacaggtatttcagagctatttatcaaaatctctcccctgttttttgcctctttcccgattcaattttctcggaaaaacattcgcggaaaacagaaagaaaactactaatcatatgaaaatcaatctttcgcctaattgttgagagaatgatattcagaacatcgaaaaattgaaacaaaattcattggaaccctaatgacggctcctgctaaaacctgtgaaactcgcaactttatagtgcgaaattaggagagttagggcggacgataatccttttagttgggccgagaaaaaattgggttcagagttaggtaactattaagcccattgggctactgtgtataatctatgtccatcgtttgacctcaccattgttagaacaaacaaaaaaaatagacatcacttcaccattatttcttaaattaatgttaagtatgagagtaccccatgattccttaattaatcatatggattgattcgtacgttttttggatgtaaacaaaggagaggtcaatgtacatataattattggttgataaattatgaggatagtacgttaatgggattgacatttaatgatatctccaatttaacaccgatccatctttttcatcggagcttcatgtttgatgtttttttatttggccgtgtcgacaaatttgtaaaagacgtgtaaagctgaaattgagaagaaacaaaagtgaaattgtaaggaaacgtgatcgatggtgaccccatcaatattacgataaggtaacgcgctaaagcagccttagccgtttttattaaatattatccaaatataacttataaataatcccaccaattgtgtctcctaagcaacagaaaatggaaatgatactgatctcgtcatcgacactcaggttccatccattgaggacatcacaaagaatcgccaccggaaccaatagaagacgaaccaccaccgtgtgtgcagactactacagaggaggaagaacggtggacgagaacatggtggtccttaggaaacgaatccatgagatgaagatggttgaacgcaactttgaacctccttctcattggatgcaatgggagaaacgtttctactgcaactacgacgctactatatgtgatgcactcactcttctccaaacttttctcatgaactctcgtcccagcgtcgcgtttggaacgtgtcttcttctcctcgtcagcgttcccgtctcctccgccgtttttgcttttcgcatccttgatctagctctttggcttttggacgccgttcacgtagtatgatccgtaaatatctttgttattttatctagaaactatctttgttattttatgtcgaaattaaggtaattttccaaaactaaaatggaattatttattatcaacaaataccttgagaaattctataatgattttgtttaaagaatcctaatttcatcttttttggaaaaataaaaataaaaaaaatccgtacttcatatgatttaggaaaaaaaagtaatcagtgtgaagtagtagaagaaaatccttgcttcatatgactagagatccgttgattattcggaataccggaaaactagagtctctcagatctgttgatttctcaatacaagaaacgaaaaaacgtgaagaattcgttgattctctgcgaataccgaatcctacgtcttcttataatcgttgaaatctttcaagatctaccgaaaagagaagagtattctaaaaactctttaatttaattaatcaattaactgaatacaaaagaatgtataaacggcttatttataataaaacccaaaaatcaaaataaacagtaaaataatcatataattatctaaaatataaataataaataatatggaggataatgattgaagatatttgaaaattatcctagttacgcgctgcagtgtatataaactctcaatggatagttatcaaaagagtatgtagcaaatagaaaagagacgagacaattcaatggacgtaacgttacctcatcatgtggtagaagatattcttgaacgacttcctgtaaaaacactccgtaaattcaaatgcgtttgtagcacatggagatccactatagactcacaacgtttcaaggatagacatatgattcatggacaactactcgaagatcccgatatcctccttctcgggcgttgggatcctcccagtctatccaaaaacgcttctctaatgacattgacgtttgactcatcgaccatgccgttttctttcaagattcaaactatacccggaaaagccaacttttacaaagtcactcaaagtcactcaaagtcactcaaagttgtgacggtctatgattcgaacatggaggctactggtttagtgctatatgatatgactcaatcagaaagaacatttgctaacttttgtttatcattcaaaaacagagagacacccactgcttatttcccaagcttaatcactatttaactttgacatagttaattgatagtctttgtattttttttttaaagttataccttctgtttttttgttttttcatagatgagagagtgaaaaaacaatttttgaagatactggttcagactacaatgtcagtgttatggttttcgtatcaacaaactcattccacaaagaaacccaaccaaaaccagttatgaagctttttatgtattaaagtggccaacagactaaaaagccgtcgatatagaaactgcagaagaagatggtaacaataatgaaaggcgagagattcaataggacttcacaaaggagctattttggtataacatatagattgaattttccaaaaatttgaagagaagaatctatacaatccgtaagaggagaagaggaaagggacctgaagcaggcgactttggcatctcaacctcaacgtctttgtatctgttgtctgtaagttacaacaaaaacaaagctcagtttcagaatgttaaaccatgtgagctttttctttttaagttaactcatctctccttttccctttcactttcagtgttactgaatgtgttcataaccatataattactattatatctctttaaatagtgcggattgtaattatacttccggttcttctgctgcgtcctccagtagcaggctagtgccccaaatgcgcagcttgcaagtgctatggccaatgcagctcccactggcacaaccagagcattggtcggtactgccatctcttctgcagctgcaataacctcctccttgctcacactctcaccatttttcttgtaaacagacaccagtttctgtccatagtacttcttcaagaacttgtagacttgatcatgatcccagtcaatgtttttctcggtgctcgaaagataacacgacgggcaaagctgctttggtggccatatcatctttgggaacttggggtctcctgttcccagagaatcttcgtccttcttgagtctctcattgaccttattgtgtgtgctccacagccacagcgcaatatcacgtgcctttttaaatggagttttgacgctgttagtgaaacacataagctgttagatgtgataatcgagcttgttagccaacccccagatatgtctttaccttaagcacatgtcgtgaaaatgccgacggcaatcatcacacatgaagaagttgttgatgaaatcacaaatggccgtgaatgcaaactgactttctccatcctcaatcctcacggaaagtgaatgcatcaaaacccataatccgcagctgcagccaaaatattttgataagagttcaggagcttctgcttgaattatatgatatatgacaacagattaattttgcagaagactacctgaatcccctcgtttcgtttttgctgccacggcaaaacctctgccaaagtatgattacgtacagaaagcaggagaatcagatttctgtgtttaagcacacgaaaaaagaaagtggttggttgggtggcactcacgtagtatccacgcggaacatcctttccacatatatggaagtttcgaagggaatctttcgctccagattcctggtcatacgagcattcgcctgacgggcatatatcatcaaaattcacaagaatttcagcacttccggtacggcacctatagaaattttcagcttttgattagcatgagagaaaagagtgagcagcagatcgtaaatggaaatatgaagatgagatactaccttcttgatggatgatgtgccactaaaagctgcagaaacctaataaacgaagcactggtttcagatgacttgattgcctgttgccatgaaaactattcataaacaaggctaaaagggatttggctgcttagaacaataaagcaaaaactcttctctaccttatgtgccaaaatgatatcaaaagcttcttcagttgcctcctcaatgtcaaatatggcctgagaaatctgcaataatcaacaaccagaactatttagtgcgttggaattaaaacaaatgcttccacaatgacaaagtgggggcagaacacactatgagagacctgttcctggtcagatatatttgacagaagatttcctaatttctgatcatctaagccgtaagagctgcacaacattaacaagaaaacagatttatattagtatacagtattacccaactgaataagttacaggggttttcatattagccaacataaagagaaacagattgctgaattctataaacatgacttttaacttaaatggtagatatgacattccagtgcgtacatacctgcctatctgcttgttgatccagttcaacaaaagatcagcagtgcgccattcattgactacgcttatctcatttttctcttgtttaggtccccagctgccaccaacgaaccttttaggaggagcccaaaagagcattggataatgattgatagagaacttgtcacaaagctttacattcatctgtgctgccagaaaagtcacaataacaattagaaagaaaaaaaactatacacaacctcataagatacagttttcaagccccacgctctgactcacacgatccacatgaagtaagagaaaaaagagaaaggaaggtcaagatacacgttcatctatataaataaaaaagatggtgcaagtacctttatcgcacaatcaactctggtcatcaaaacgacaccaggatatactgcgtctgctccattgaatagccttgcaactttttcataatgtggctgcagcagagtcacccattggatataaacaacattgacaagagtaagcattgaataataagacattgaatggcgttgttaccttgtagtttctacatgcagggcaccttgagccaaacaaaaattatgggtcaatgtcagtatacaagcctttcgcatttatatataaagttaagttatttccggataaatctcagagaattggataacgtaaagtcaggttcgaatatgaagaacacttgcaaacaaattccgtgtaagatccagtgcttaaaagcctaaagtttgaatttttttcagattttttacgagagagagagagaatgagaaaactgaccagtgagcgaagaactctaaaacggcatatttggcgggggaatcttggaaaactgaatcaaagttggtagcgttcaattcgatagcgttgtctttctgatcggcgacgttactgccgatgtcccggagaatcgagcgcgatcccggtgaaaacgacgccgcagcttcaaggctcagcagacccaacaacaagaacaagtgtatcaaagacattaaatcgaataaagcatacaaattttgaagcttgatccggatgagagggaagatctaagagcaaaaagagcttccctccttccgttgagaaacaaaggtctctggtgtttattacgacgtcgtaacgcctttgaccggcgtcgatactttgttctcctccgacaactttcatactgggctttattataacgttataggcccattactaatctccatttgatgtttgtgtttgtttccttttgacccgcccaaaaagaaagaatttgaatgtagataagataacgctatctctagtcaatactcaatagtcaaataaaagttggccattttgtttggaaatcggaggaacagttaatgttatccaatagaaaaacttatggagtggttttatttgagatgtttttgtttttctttgtttatagataaatttcggattggatataaaacaccatccgttggtagtattaattttacaaaaaaaattaatcatatatttattttctttgtattctctcatctatgaagataacatgagaaagttataagaaaatatatatatgagataacatgagaaagtctaaaaatggattaattagaacagagagtcaacaagttcatgtctcctcctcactctaaccacaagtcaacaccatttgtcttagtcatgaggagacacacatacacacctcacattaagaaaatttaacacatagcttccttatactattgccacttctcttgcactattcggtatcaattgtttttaagtgcccttcttggtactggggaaaaaattgacaccaaaaagtatcgatcatgtgcacatcctcaacctctaataataatgtcacttaaataagaatgcagtaacacagtccacgtgcatgaattcatttttctgatatagtttgcattcgtctgacatatttggtttcctgatttagatgaatattaaaattcagaaccattttagtatagtgttctcatttctcaactcctgcctcgatctctatagacgttcatgtatgcttttttttgttttcgtttatcaactctcaaaaggatgagatattaacaaccattcttaatttttggcaagtataacaaactgagagagaatgtttaaaagtccaattttaagattccaatatgcttaaaaaattcttacgcagcatctactatccgccgttagttttagacccttttattatgcgggaatttcccaattgtaccttttttgtttttaaaatcaccaataagggggtgatttcaattttcaactaattatttgggtgtaatgttgaatacgaaaaaaagttgagcaataagtaataaaacatgaaatacaagggtcaaattatgcaaaagaaaacaaaaataagaggtgcttcaatctttttattaaagagtccccttttattgactgtcctctctctctctctcttctttctctttgtcatgaaccagtaatcttgtttctcttcatcttccattgacgtttccttctatcctcgttgccttcatttttcactcgcacgctaatcttcgcctactttgttagattttcggttttgggtttttgtcttttggtcgatttcccctgttcccagaatctccgattaagctgcttccttaatctcttgtctgaatataaactttttccggcgtgtaatttagataggtggttaaaattacgagtagtgagaggagtgttgttgctgttttgtttattcggtaaaacgaaatcggaagttctttgttgtcgtttgattccttttgagaaagagagatgttgggagctggatttaacttcactcagcttcagagagctcaaattgacgtctcttatggctgcagatcgagtcacactaaggatcgtgagaacggctctgcattgttgaaacaccatgtttctgaggcatcgtcaagtaatgtggaacggtttttggattcggtgacaccatctgttccggctcactatttatctaaggtttgcttctacatgtctagtcaatacctttttctaaaaagacaaaaactttcagctaattggtgtgaaatttatgtgtagacaatagttagggaaagaggaggcagtgatgttgagtctcaagttccttattttcttcttggagatgtatgggaatcgtttgcagagtggagtgcttatggcattggagttcctctcactttgaataacaataaagatcgtgtctttcaatactacgtgccctcgctttctggtattcaagtatacgctgatgttgatgctttaacttcatctcttcaagcaaggtaagaactgttcaagcttacgtgttcataacttgtagtggttttagtctataaagctcaagtcttgtctttctctaagaaatttggggtgttctgtttattaatgtgcaggcggcaaggtgaggagagcgaaagcgattttagggattcaagtagtgaaggaagcagtagtgaatctgaaagaggactctgttattcaaaagagcagatctccgctagaatggacaaactctccttaagaaaggagcatcaagaagattcgtctagtgatgatggcgagcctttaagctctcaaggtcgtttgatatttgagtatcttgaacgtgatcttccttacgtccgtgaaccctttgccgacaaggtttaactattttaactctatcattctatcaagtcatcaaggcatatgcaggagttattagaaaccaaaaagattcaattatgatgttaaatgtctcatattttgaaataaattttgcatgaggctacacggaagttaggtattgaaagatgtatttattcatgttttgagcttcttttgtactaattttactgttattagataagttgtgactttcaaaacaaacagttgaagtaacatccaagatttatttatgaaagtaatgctattagtcaaatgcaacaactcttctgttcgttccaaagcatccattaaggactatcaactaactgtataaagttcaattactgtccagcgacttgtttattcttgaatttgaatacaccacttatgatctaaaaaaatgcaattcctatagctgtcttattcaattgttacctttgcagatgtctgaccttgcctctagatttcccgagctgaagacgctaagaagctgtgatttgcttccttcaagctggttttctgtggcatggtatgagttctttgtgacatgcgtatgtactttgttccacattaccgcattgtctctcttagaatccattactctacttttgcaggtacccaatttacaaaatacccacaggaccgacactcaaggatctggatgcttgtttcttgacctatcattcccttcacacaccctttcaaggtaagattggtgttgagcattgttgatagtaagaaacacaagttcttcgttctaaccatgaccacatcatcagaatttgtatgtttcaaatgatccgagagtaacaactttttgagtaaagatacatgcactatctatctttggctcttgcaggtccaggcgttacaacagggtctatgcatgtggtgcagccaagggaaagtgttgagaagatggaactgcctgtctttggtctcgcctcatacaagttgagaggttctgtatggacaagctttggtggctcgggccaccagctcgcgaactctctcttccaagccgcagataattggctgaggttgcgtcaagtcaaccatcctgatttcatcttcttctgccgccggtaatgatagattatactatgatgacgaaaaatgatataggaagttataaaaaggaactctttatgattactgtcttgaggaaaccttacatataggatactgtcaaaagtttttcatttggtagcttctgtaaattcacagaatgctagttttcttattgtgtgtaaaactgtttttgcaataaaggctaatagttgagaaaaaaggaggactctatggtcctatctgtgtgttcgggttctagtagttttctcttgatggcattggagcaaagacgagccatcatatggtggaaggaaagcatatcagacagccgctccgccgaaagtttgtccattgctctctcttgttcctctttcattttcatccttttcatatacacacatgagttcctcaccgtcgctcccatctgcttcagcctattctcttgttgcttgcttagaactgtattagcctgcatgattcattcagccatgtcagaaaatccaatattgagtggcaaaacatagagcctgtatgtatgtaaaacaaacgaatctctgacctctagaaactcagcttgggagaagcttttgacgagtgtggtggtcttcctcttcatctcaacctgtgttgcgtttacttgtttcttctgaaatgcgatcacagctttcacaaactcctgataaactaaagcgcagcctggataatcaaactcatcagagcctggaagcctcatcctctctggatgaaactgcagacccatcaagaactgaccttcctttggatcatatcgattcggatcataaaatccttcaatcaaaccatcaggagcataagccatcggcacaaaacgttgagccagtctcttcacaccttgatggtgatacgagttcaccattatctccatctcctcgaacaacttatgtaacggagtctcctccacgattctagcctcgtgtctgtgcccatcgtagttgtcataatctatatgatttgtcgttgtcatcgtagttccgagttctttgtcgatgtcttggtaaagagttccacctgcggcaacgttgagaatctgagagccacgacaaatgcctaagaaaggaatgtttctttcgagacagagtctagctagagtcagctcaatgctgtctttctctcggtcgatggtcatgtcctctgcatgcgccttcttaatctcctccatgtcttctggcgagaggtctgataattcatcgtccgcgtagagagaaggatcgacatcttctccttcgcagaggaggacaccatgaataggctcgaagctctggagcatagaatggatcccattgacacgtgggacaatgacagggacggcaccggaggagacgatgagatcgagatggtattctcctacgaagtccacgtacttgttcttgcggagagtccgacgagagacgatgagaactctggggagaatcttggacgagagatcattggcgacaaccatttttatgtaataaataaatctcttcttcttgttttgtcttgtttatgtcttaatcctctctttcttaattggatggttatgtcttagttctcgttctttatttatagattggaatggaggcgtcgaggcgcagcgtccactcaaagctgacgcacactttttattatctgtatacgtttttggtcaaacctttcctattgcctattggatgctgagatggacttctctggatattccaaattattccttcttttgatttggttatgttaaacaaaaaaacgttttcttagtaataaatggatatggatcagattaggttcttaggaggattagatatgaatggatgactcattgacttgtaacaatattaagcatgcagagcatatactgtatatgtctttattttatactatataaatgcatgtctttctgtatttggagggtgttgaattaattatggaaatcacgtcatcctaatcagccaccggttcagtcactcttacgtgtaaaagataacgtcgtagactttcaacaactccgtatgaatgaaaatgtaagaaaaaagatcgaggttgtcgccggagttgagctctcttgtcttcacaaggccttcgatatcctactcatttttcgtttatgcggattatgaattgaaaagtatgaaagataaaatggcaaattcaccatcgtaattacaccactatatcttaaaactggatggttcacaatatcttcgtatcatggtaagacgagaatccagacgtaacatatcggagctctagtgatcaggatttcaccgaaaaaagtagttcgtggttctttctttatttcgaatataatcgtattcaaagttacatttaccttttctcttttgtttcatttccgattcaaggctgacttggaaattataacaaagagtgaagaaagagagaagctaatattaaaagggaagtacagcatcgtttcttcttgtgattctcagccgctccacgctttctatgaactcactgtcatttacaaatcacaacacatgtaaacgctttatttcagtaatctacaaagaaagtatcaagagcttacttccatggaacatccccagcatttctccacagaccttcttcgtctctgtagaccaaacagaactcagactccatctggaacaacctcaatcccgacacactctgcatccctacagattgtaatgaacatccggtataagcctactaggaacattactacttatagtacttactcatctttgaatcccaagcttcccatgaaaaacttaccaaacatgtcctcgagttgatgagcaagagttgaatagcttccatgatcaagaacacagaccttgcgacctaccaccaaaccatccatggtgacctttacataaccccacttccgtctgtatccttcattactacaatatcctttgccacatgtcataactcataagtaaacaccgtctcagagttgaaaaaatttaccaagaaattaaaggtaatggaaatactaatggaaacggcaaagaaactcactttggccagatgagtggtaaatctcatgttgtatggttctcaggctgagacctaaatcgattacgccaccaaactccgtggtctgcgagtaatatggatgatacttgggagaatttgggaaaacaccgagtgggtctgagtccattgttggtttctataacaaatacatattcagcacataacagatacatagaaaggtgagaatgatgttgatttatatcaagcagctaaggctaagagtgtcaggagagttaagagacatcattgcagacagggaacaaacaaaagacaagaacacattaccttccaggaaaggatcagtttgtggtctttttgttgtttgtctgatgccactaagtgcaagggatggggaggatcgctgcaatacatctggtcagccaacacaaaaacctgaaattatcgtgaagtcagaattgtactatactaatcacagcaagcacatctctatctagtgaagtgtctcaatgttatcagagagtgttgacaactcattgtctcaagtcaaaacctgtaatcactcaacatcaaacacgttacaaaagaaataggtaagtcgtgctagagaattctgtaccatagagaatccaacgaattaatttatggacaaagaaagagaagaactaggtatggtcttacatgatggtggagagacaatatctttcatgaaagagagctctgttgtttaatactagacaattcagatctatcattacatcatgtatcccacacattatctgagaagtagggctgtgtcattaatggatctaagacagaaaatgtacacataaatccatgtctatacaattgctctcatggataactcaagtcctccaaaagaagcaaagcagtacaagagaacacaccagttcttctaaagataaatgttcaaataaaaagctcgttgccataacaaaacaagggaaatcatcacagtagacaagagcttccagcatctcattcgatgcttttcctaatttacaggtgtatgacttgaaaaaactgcatcctaagctcatgtacagtttgcccagatactaaatgtacgtgtcttaaacggaaatggcatcctttttaacaggcgcttctgaaacacacttcttcgacaccaccttagtgcgacgtctacaatctacatgtgctatagcatgcaaggaacagaaactcccgaaatgtttcacttatgcggaatcatggtggctaagaaattcagttatgcaaggatagacttgctccactgcctgcagtaagttgtcagagaaacgattaacaaacgaaacaagcatgcacatgatacagcattgaacaaagttccaacataggaggagacctagaaatgactggggaacaaacataccagtcgtcctccaaccaaatcatagtgtgcataatgtggtccatctggttctccaagtaacttataagtgaccaagttctccggaaacagcttaacagtgtctgccatattcacaagcatttgtaattagtcataatggtgaaaatgcatgtgtgagtagcttaaaaatttatttggtgtgtgtggaaagtatcacaaaagttaatccatctacgccttatacagcctctcataactcgaaagaattcagtaacagcaatgtagaatttaaaatgaaatgcatatctgggtaaatgaatggtttcatgtatatgctagagtcatctatgcagaatttcataataaacattatgttagtataccttccacagccgcaggggggcagatcaagtcccgatcacctgcaagagctaagacagggacactggttctgggaagatga

SEQ ID NO: 42 - DNA, 141984 bp, Arabidopsis thaliana
gaattcagtaacagcaatgtagaatttaaaatgaaatgcatatctgggtaaatgaatggtttcatgtatatgctagagtcatctatgcagaatttcataataaacattatgttagtataccttccacagccgcaggggggcagatcaagtcccgatcacctgcaagagctaagacagggacactggttctgggaagatgatccttatagtaaaatttaccactacgatcacgtaagcctccctctcgaaaggccgttgtcagctgaataagtagttttgcaggtatggtacctagatgtaagaaaacaaagaaactcttgaaaatcaccataaagggagcaattacggattgcaaaaaaagtcatggtacattcaagcatctaatagtaactgttccagcattttctttttcttaatgaagatacgtttcttttccacttaaaatacattaagaactcacatacttaaatgggatcaactgtttttacttacagaagttattcaagacaagcttttctaacatttcagggtgcatcatatctgttgatgatatcaaatcattaagccaagataatacatatggaggacgtgtcgaaagaggaaaagcggcagccaacaaagcacccagaggaacaactggaacactcagagcttctgcaggattggcctgtaaaagaagtatctagtaaattagctaccaaagatatttatggcacatcaattcttgtcaaagattcctgcgcagagtgatataacataacgacacgtacaagaggtatgagcaatttgagtgcagaatttgaggttgtgtaatcaaccgatgatgccagagttgccacagctgccacggaaggttctcgtccttcaaaagctaacaaaataatagagaagaaatgaatttcggccttaatatatgagcctctgtttgaaagatgaatactaacttaccacaacgtgatagcattgcatagagtaggataccccccatggagtgcccaattgcgaatagtttgccgtccttgggcttgctttgtgctcttacatactcaatctatagcaaaccaaagacggacacccaattcaaacaaaattcagacacgattatgcgaagtattcagcaagatcaacattgcctcaccgcagcagggacatcctcttccaggtagtgatcaaaatcccagtcatatttaactatcaaatccagttgcttctgaaaatcttctatggtcgcagtgaggcgctcttgtaaatcaatcagcggaggcgagacagacctttgaccatcgtcgaaaagattcacaaggcgctgagccaaatctctgacttggttaacaagtcctgagttttgctttgactctatcaaactcaaaagcttcgatcttatatcattaaagcgctcgtacagctgtgtatcatctacaagcattgcaattttgtcaaacaacttagcagacatgaacacagactgaccttcactgagaaagccagaaagtctttctgacaaactcatgaaagttgatgtcaatctcgccacaagctgtgactcgtcccaagccgatgcttcgccaacaactgaaacatccgacgctggtgcaggtgcactactgtccataatatcagtagtctgcttttcatcagaacaagtttctttacctgcagcagctctagcagtagattctatctgattcgacaattcatgagcagattcctcaacgtccttaagatcagatactcgtgtactcaatccagctccacgaacctcgagaatccaagtctcaaatccctgtccagacatatgccttgcaaaagagcactgcaatgacatcaacgaagatttacttgacattgatcaacaataaatctacttcctcatctaaagatacactagtacaatgtagatcttgatgataaagattgacattaaaaacgatgaaggtaacatacaccaggagataaatcatatccgatggcattagttcctactccagacaacagtaacaatggatgattcctcgtcggagcctaagagaagagagaaaattcttgatcacaaaaaaaaatatataatccaaattgcagatacagagaaaggtgattgttgaaattcgaaaacctgaggaggaggcaagtagcgccagagagcgagacgccaatcggtgttaggaacggagacgtaatgaagctcgtcggcggtgcaaagagaaggtttcgtggggagcttaacagaggaagaagagaaagctctcggtcgtaacaacgtcgttcggtgacgaaacgaaggagtagtagtgacggtgctgatggaacggtggagatagacggtggaggaagcccggcgaagagctgagcggatctccaagggaaattgtggaggcatggtggacatggtacggactctggcagatttggaaaaaaacaatggtggctcggtttcactccggcgtgtttttaaggatcttcattcattttccggtacacgtggagagacgaccagtgatgttgatgattgacgaagacgtgactttcttattttgaccgcaaatattttgggccagtgatattgcaaaagcccaaatttacagtgagagtttttttttttgtttctctggcctttggttgtgcgttgaagacaaggaaggtattagtgtaaagcaaattttgtccaatcatcttgatttggaatttaagatgtgttatctcaaaaaaatatcaacaaaaccagattatatatcactgataatgaaactaaatttataatgtatctaactaaatagctaaaaatgttaatataataagctatcatcttaattatttaaattaaatttactaatatactaagcgagttagtgagaaatataaagtcagatttgatctaatcatcatattatttgtacatttagtacttttcttatctcactaaatttaggaaatattgatctaaaattgaatttaaaaaagaaaccaaaaataaaaactttcaattaaatataatattttttgtggttagttttgatgttttcttttacaattttatatagttgatttctttcctgatatttttgaacaactgatttttaacagattaaaatattaaacagagtagtctctgttatttctgacagacaaaaacataaagctaaagagagaggaggttgctttttctttattggacgaacaaaaaactttatctttccttcctttgaaatctcccggagaaaaactatagagattttccgtttcccgctttaatacagtgccccaattcgcgcgacacatagagtgtagagacgctttcacgagcgtttccgacgtcggactttcagctcatcatctccacatctttaacggtaaaggtacactctcatcgtcttctctcctattgatcactgatgagtattgagacacaggttatagtggaatttagtgattcttgtttgtggccattgtgcatctggaattgttataggccaagcttgtaacttgaaaagctctttttgagctcgaccaagttccctttgttttctaatttggcagctttcagcaaaaaccccagttttgaactttattttcgtccattaacagcttctcttgtgaaattctagattaatcatgcctgaaattcatttgggtgctcatacaataagatcccatggagtaacagtcgcgaggttccacatgcatgactggctcattcttctgctgctaatagtcattgaaattgttcttaatgtcatcgaaccctttcatcgttttgttggagaagatatgctcactgatctcagataccctctgcaggacaacacaattcctttctgggctgtcccggtaatacattttggattttcctgatttcttttatgcaacatgtaaatcttggacgtggtctttacaagtgtttttttttttatgacagttgatagctgttgtgctaccttttgctgtcatttgtgtttactacttcattagaaatgatgtttatgacctgcatcatgcaatactaggtacctctttcttcttccaattgtgtttcatgtttcgaattctctgtagctcttgattttgaggtgtgttctcttgggtcttcttcagggcttttgttctctgtacttataaccggtgtcataaccgatgctataaaggacgctgttggtcgacctcgtcctgatttcttttggcgttgtttccctgacggtataggggtaagcagcacacatctccttgcttactcttataaaaccttggataaactctgactggttgaatttctgaaattctagatctttcacaatgtcacgaagaatgttctatgtactggagctaaggatgtggtcaaagagggacacaagagcttccccagcggccacacatcttgtgagtgtttatatttgggcctgttgtgctattagagtaatacagttgcagaccgtcagactttagtcatgtaacctgcagggtcgtttgctggtctaggatttctatcgttatacttgtctgggaaaatcagggtgtttgaccagagagggcatgttgcaaagctctgcattgtgattttacctctactggttgcagcattggttggtgtatccagagttgatgactattggcatcactggcaagatgtttttggaggagctatcataggtttgtttgtttttgtcttttttaactcatgaattcaaaattacgtgagaaacaaagctgatgacagacacacatctttcttgcaatgtccaggattgactgtggccacattttgttatctgcaatttttccctcctccatacgatccagacggtgtgtgactgaggaacctcttgtcttcaagataaagtcactttgtttcatagatattaaggaacactgatctctatatggattgtttgctttcaggttggggacctcatgcctacttccagatgctggcagactcaagaaatgatgtccaagattcagcaggaatgaatcatctaagcgtgaggcaaacagagctagagagcgtacgttgatggagaagagacgtccatggaaatatcaagaagcaacacgcgggacaccacccgtatgcttcagaaccgctaagtgaagtctttgtactcgttatctatcaatcttaggcattgtcgcattgatatgtattggcttaatcacaaggcccaatattggttggaagcccattcgctaaaaatagagccctataaagagaaaagaaaaggaatcgctagaaggagggcttgaacctccgaccttgtggttaacagccacacgctctagccatctgagctattccagctttttgtttaacgactaaagtattaattatatatatacacataataccggattgtgacaccacatataaaatcactaaattacatattccgacagaatttctgataaatgtatatatcttgtcttttattcaatggcattaataacaacttacatatgttatttcttcttgtcaaaaggttaatccgaaagggatatttgtggggatcgaggcccatgcgcctcttacagaatgacccaggccgattggcctttcccttgattttaggatttatcatgattttcgtatttaccagttcacatcctttttctctctttgagtatccaatgattgcttttcccaatattttatggccattttaacgaagcaacattttaaaatatgagtcgttttattcagccttttgatgaatatgtccaatgaggtttgcactctatctcttggattcctcttaaaagtcattctttttctcccacttttacttttacctttgttgaattatgcagaatctttactactttgttatttaaaaaatataaaataaataacaactatggaatgtgatattaatatgtatcatatttattattgtaattttagttgtttgctgtctacttaagtattagtggagttttaatttcaccatgcttgtggacccctaaatgatgattcaaagaatttaaaagattagtgagaaattgttgttcattttcgcccaaaaaaataggtctttctatgtagaaagcatgtaagcctgtttatgttttcattattttcatttttctagtccactaacgtaatatcaatcatattcatattatttaaaaattcaacgtgtaataatagctttctatatatgaatatgattatggcttaaagcaagccctttgacttccgtgagacacacacaccccacctcatactactaataggaaaagatatctgtgttgtatatgttatatgttcacaaatattctcattatttagatcattttacgtaacaaattcttagaggaccaacaaaaaaagacgaccaacgtaaaaaaaaaaagtggaagacaaatgaatgacgcagaaagtggcgttgtgatgatgtaattcagtctaatctgagtagtgcggtgtgtgaacggccaagattgaaggagggcgtaagagtggagggtcaacgtaaatagatataaaggtgtcaactttttgtctgttttagtcactaaagagtaaagatgtttgacaaaaattgaaaaaaagtttacgacacgatgagactgagactgagacccccacctgcgactttattttcttgtatctttgattgcctttcaaaaaaaggctacaaaatactcatgagtttagtttatacttagagagtagtgtgtgaatctataaacggaccagctctgcaagtcggtggaactaagatagatttgggatttggaaaatagatatgtgcattgggcgatgaatgattatcacaaatagcacacaaagtcacacatatgtgcgtgtgtgtgtgtacaatataaagagaacgtacggcgacatgatgaccaaatgagaaagacccatttatttgtctgctcatcacctaacatccaaatctatattcatcgctcgcctcactcactctcttttgtatttatatgactactcttttttccataatgaatacgtaaataacactaaacagaaacgccaatagtgattagtgactaatgactactagattgtgagatgaaatatttactgacggactaacataacaataaaactggcggaaacatttgaactgaactatgaataactacaaaattatatgaaattatttttgcgtagattgatggatattcgcttgttaaactagttctaaaaataccaagaaaaatattccaactttatatatttgtatgaacaaatgaaagagagagatagagagcatttggtagagtgaggaaaagaaggaagctgcacaacactcaaagccaagactgttccactatctcttcatctacgtgactttctatgcacattcttcctaataagcatttcactaattaatctactactctcattgtctatattaattctcacaaccatgcttcctcttaaaactgtaaaaaagattttagggaaaacatacatacccaagaggctcggagatcgatattatatagaattctttcacattcccctaagtttaaaaaaatcacatttgcccctcaaagtcatactaaactccaaaccccaccccaaattgtttgtcaatcgcttgtatatcatttgctaatacacaatcatatttacttaaaaaaaaaaaaagggacataacctccttgaccctttatataagacccactcatcattcatacttttgcacattgcctactatatcaatcttcttcttcttctttaatttgctgcttttatataaccaagtctttgcttttagaggtcagctatggtgtctacagaagaagacgaagatcggagaaaaaggatggaagttgtttcatttattatgaaacaatgatgacagcattttgtggatggtttagagaaagatgagctttgcaatagtttacgctctttcatagaaatgtaagtctggggagagcgagattattgcattgcttgctgctggggaatcgaaggttactggtccgattttttttccttacccgaaaaaaatcaatcttatatctcttagttgtttgtttgtgttcattagtctacgattattttcatattcatgtttatgaaatgaagagtgtccttgtggtgatggtattatcaactactatataacaaaagttacatttcaaataaagaagacactgtagtatcattattaacatcaaatggattattatgagttgcatcttgaggaattgaactgcttatatttagttgtgactcatttcccatttaattcacctaaagaactctcatacaacgttttgagttggtaaactaagctaagaaaagcagaaaatcaactttatgtatatgtatgtagaaaaatgttgaagatacattagtacattttgttgtggaattagaaaaggctcgtcattcggagccaaaacaaggctaatctataatgttaacggggcctattcagtttggagatataattatttctaagcccatcttgtttgttatcgtgacaaattaataagcccacaaagttctctaaaggtaaaagagagatggtccaaaaaatttatacaaatggaaaaaattacatatgaaaaacattgcaaactgaaattggaatataaaccttctccactccttcaatttgtaaaagaagtggatgggattcaatttcttagggatgaatcttcaactaaaaaatcactcatggttcaaaaaagttcaataataatgattgtcctcactggttcgtctgtacaataaagacgtataaaacatgaatctgtttaaaaaaaaacatgaatctgatatagaaaaagtgtgttaacactgttgtccaacgaccatccttaattacacatgttattattacatactgagaggtgttgtaatcaaggccagatacgtctacaaatctaccaattccttttcttatctttttcacaggaacaaaaacataaccaaaattcacagtgttgatgaattgagtttgcaagatttttcaaattatactggaattgatatcttctccatttatatatactcaacagcaaggaacaacaaagatacaaacggtgaaaatttgtatattcaaaatttacatattccaaatcgaaaagtaaaaaaaaaaaccaaacaaacaaaaggttctcctctcacagaagaaagagacctcaaaaaaaatccgagaaaagaaggggcgcacgcgcgtggtcaaaccgaaccagccagccaccgtagatctctcagataccatcggatcttcttcatcttccgatcttttactcagtggagagagaaacacgagatcaaatccctcccaacgctacgctgcgttttagagacgcaatcatcggaaaccaaagcagatctacaaagaggacaagtgaaattgaattgatgaagccatccttccaaacacttcttgtggaacacgtgtcgacattccagcttcctcacctcttcaccttcctttaacttcgacaaacacacaacacaatcggagccgccaccacctccgtcaccgcaccggtacgagaataaccgattcaaactaagctgatcggcgagaacgattatgttggctagtcccgatgctatagagacatcgtctacggggagattaggatttgatttagaggtgagacggaggaggaaagatcggagatggttgatgaagacggcgaggagagagaggagcataagagggattgaatcggaagagacgtcacttagctgaccttgtagccccatctttcttcttcttcttcttcttcttcttcttcttcttcttcttctctctctgttttctatatatatagctgtctttgcttaacctatacacattattgtgttcctttactttcaccttttattaatttcattactaaactgtcaattagacttttaattttggtttattactaaaggaaattaattatttaagatacttttccatacaatttaatttaaaatatataaagtggatgtatagttgattttttattttatttcaagctatattatggtacgaaatcattattatgttgcatatattaatcgatttggtatatttttttacaaaatacagaagaatacaaagatttttattattattttgaccacctatttttgtcaatttttattaccagtctgacgattatgtaatttagatcaaatgaagttagtagtaataaataccaaatctttttatacacgtgatctggtattttacagatctgattttatattacaaaccaaacgtcacttatttctctctcttttttaattcagacccctccattttgccgtctatgcccacaattccccgttagttttcactttcagtgtctttcttttgtggtattttttgcaaaacccaaaattaaacatgaaactaaaattatttaaaatttattttaagtagagaaatatttgagatatttaatatataatattaagttaacttttgtgtacacatgcattgtttaccttttattattttatgaaaatggaccaaatttataatagcttaagatgaatattttttcttattgaaaaacaatttgttgatctgatgatgaagattttgcacgatcctcgctaacttgttgtctcaccaccttccatattttatatgtttcggaccccccaataatcatgtcatatctacggtttctaccttattaaaatatactccaaaattttaaaataagatagcaagcaactacttaaacagcggactaaacaacatcagaattttcgggaatattatttgtaaattggttaaagcataagctacaaattttcttatatatcatttatttggggaaatggttaaatttttattttcaaaattagtatttctatcttttaccaactaataaaatggtatattggtatatattcttgttttttttagaggtcacaataaaataagtgaaacgtgcgcatctacagtaatttgaatcgaacattacttttaatgtacatgatgaataacaaaggataaacatgaccatcatgaaggaaacataaacgaaagagtgaaggataagtaacatttagtcagtattataaaaatggtaaacggcgctgtcaacgtattaattttgcataatatataatgataagtttgggtttatacttatatttaaatagagaaagtgggagaaaagaagtctctatttcgccgtccaaaagatatgagaatccaccgactgataaaaaaaaacaaaacaagttgggattaagaaagttgattaacacattaattaagcaaagaccaaaaccattaccactgatataatatgaaattgccgtggaatttttaaaatagaagaaataaatgtccaaaaagggaaggcgtaaaagtgattgacgaaaaggatgtgttgtcctctatatcataattagcaagagtttcaattaattggtgattaccaactccaattagatgatgagcattgtgtggtgacaaaacaaagtaaaagcaaagagcatccattaccgggagagaccattcattttaagccatcatgtggccaaagggagaccacacaacacaattttaaaataatggtgcagcagaaagtcaagtcgctgtcatagactcatagttgaagcaatcagactaatctctgttggatcttattgggcctaataaatctactgtatgggcttgaccatttttttgttagcagtactccaggcctaatttgttatcaatgaccatttatgttcatgattgtctttttttttttttttataaataaaaatcggaaaggtgctagatgataacacatgcaagagttgttgcgatgttacttaatttgattgaatttagacacatgtaatttggtatagacgtccatcattgtgcctggaagttcaccgatatacgtctattgcaccaatatgcaaacgctatacttatctatcacataagtatggattgatatacatcttttagttctacattttcttgtcttaaacatttgattttcagtatatctatatataggtaaatcgttatagtctaccaaatagtttcttgaaaggtgttattttccatattacgttttcgaaaaagggtacttataaccaaattgattgaaaatgaaaaggggttatatatgacagttggatccaatttgcgtgcatttaacaagagcaattagttggtggttaatgtagcattttgaaaatactgtttgcaagttatattccttggatttgcaagttaagaacatactgttttgactctttctttgagagagattgtaaaacatttgatatcaattctgatatttttgagctttgactaagaaaacataagtatctttaattatcttaataaagaacaaaaaatgtgtccaagctctaggggttggttgtattagcaacaaggagcatgtggtggatcagtcatatagaaaccataattaaagtcgtccggacggatcagaaacaagaatggaccactcttccttacttgtcttcatatgctaacacttatacttgagactgactattttgaggttgtcctcctcatattatttctagatgtagaccacacccctctctctcctcctcttaatttacctaagtttgcttgtggtgaaacagttaattgataggcttattggttacaatcgtcataagtatatgttgaaagtccttaggagttgtatgaactttactacgaaagcattatcacactattattggtgtcaactatcgatacgatattaatgtagtggtaatgctgtaatgctttttattctgccaatcattactacttgaatgatttcgaatatcatcgaatcgaaattcttaatcacgctctctatctcatcattatctttgaccctaatcattattagtagtatctctctatttatcacacacgcttattcttctgtttaatttacctgtgttttactctcacttttaatccaagaaaactatccacttttcactgttggtttcagaatcccattgcttattatttagttattattactaatgaaaaggttaaggaggaggggtaagtaatgttgtgacaagtgacaagtggtgtctccatctgcatggtcttcttgtaggaatgagctgtttatctttgtttgtattccagtttcaaactttataatactatttcgttagtgctttttaattgtattcgcagttatgtgaattttaatcaagagctagctgacctgaccgtatgcttattatagttagggtccattctctacaactacaactgtacatttataataagcatgctagtagatttattgtgacgatttcaagcacatagaagagtctatatcatcacttcacttgttaggcctctctttaatttcatattatatgacacttttttcattcaatgaaaagaataaaataaaattaattgtttgatactcctaattagggatgttattctctgcttctcctttgtacttttgggaatatctgtcaaatcaattacttaaatgagaatattaataaatttggcatttgatgtgctttatttggctgcaattaaacaacaatcatatgagttattgagtatcattccaaccccataaatgttagcctttttaaatggagtatatattactaccgtttttttgttcgtaacgcatattacaaccgctttaatcagagaaattatttaaagacgaatctggtgaaacatgaattaattttgtcaaatagaatatgtgaatagtatttctgtttatgttaaattaggcaataacattacatatatacttaatcctttatctgaaaacactagatttatgataaatacgaaaggtaacactggttagcgtatggaaccatcaaattttgactaaatgttttctaacactatgagtgaccaaaacatttccttttacaaattaaaatttgtattagtcatcctgcatacatttctttttccccaaacattttcaattttggaatttttttatatatatgtaaattacatttgaacaggtctaatttgaatggttaatacgcggttcaaataaagttggcaagtaattaacaaacgaatccacatcaaatttcaattactgtatgtaccaaaaccacatttataccaaaccgcatcataaaataaaataaaaattcttaaggcctgttttgtagattttgtaagagtttttggtttttgttttttaaaaacttattttcataccaatcaagattttaaaattttggtttccctacaatttagtaaaactattttattgtaattttccattcatgattttagttttttagtttttgtaaaatttaggaaatctagtttttgttcaatcaacgttatttttctcaaaaaccaaaaaccattttttggagattttttgaacaaaaaatataataacaaaaatctaaaactaaaatctaaaattcagaaactaaaatctaaactcaaaaactaaattaaaaatcagggcctaaattttgacataatatggatagatgatgatagtgagaccaaaccacataatattgcatattttgatgtcaccatttgatagcctataaaaaggagaagaagcaaagggtagttctggaaaaaaagggaatcgtgggggaaagaaagcagagtcgttttcagatcgtgaatagaagcagcagcagaagccgtatctatccctctctctctctctctctctctctctctctctctctctctactttgaccgttcctcttctttttattcatcaacatcatcgagctttctactacttggattcctacttcttcttcttcttcctctgattctctcccattccaatcaatctctagggttcttcttcaggtatctcaaatctcctctcttttctttttattgctaaccattttcatttactttggcttatttttaagtttaatcttcttctgatattgcgtctgcttttttacctctgcaaagacagaacctttctctgtctctctctgcttgtaccttgtaccttttctctctgtatacactccattgtctgccttttctcgtctctcttctcttacagtttttattcattaatttctctcgaggatgctcctcaggcccctctttatctcatctcccagctaaagtttctctttttgtttttaatcagcaatacttcagaagctggttttggccatggaacccaatgggtacaggaaagaaagaagaaaggaacaacatttggggagaatgaatggtggtggtggtgatgttgagactgatcttgatccatggactgcatgggcttacaagcctcgcactatctctcttctccttattggcgcttgttttctcatgtgagtcatcatttcttcctgcttcttcccttttacctctctgcccatttctcgtaatcctcaatttggttttgaattttacttagttgggctagtggagctcttgatcctgacagcactacatctgatgatcttgtcacttctgtcaaaaggttctctttttccttctgcccacatcatgtttttttttcttttttcatttgattccatcaattaacactagtctactatgtttatgttccttttctaggggagtgtgggctatgatcgctgtctttcttgcttactctttgctccaggccccttcaacgtttgtttaccatctcagctgttttattaatttgctttctcttttataatgtagattgtggttgttggtgatacttgtgatgtgtctttaatcaagtaatttgctttatgcagggttctaatcaggccccatcctgcaatctggcgcttagttcatggaatggccgtcatttacttagttgcacttacttttttgctctttcaggttcacttttttttcctccctagatccttcttacttgcctatgcctgtgatttatatatggattcttgttttaagtgagcaaactctaatagttacattattcatgctcccagagacgtgatgatgcacggcagttcatgaagtttctccaccctgaccttggaataggtaagagtttcggagaggaatgctgtttattcgaggagctaccacatcaatgattgaccatcttattgagtttgctcatgttgcagaacttcctgagaaatcatacggtgctgattgccgtatatatgtgcctgatcacccaacaaacaggtttaagaatctttatgtagggtatcttctcaacaactcccctttaccttaaccaaccttcatatcacctaaaggcttatgctttgattaaaatttatcaggacacagtatttgatgagtttttcttggctcacatctttggttggtgggggaaagcaattctgatccggaaccagccgcttctttgggtgctttcaattggttttgagttattggaggttggtctttgtcttcgttttcttatattacaggttccaatttgatatatacaaaaatatcgcttcgcctgtgtcaccgaaaagttatatttatgttctccaggttacttttcggcatatgttaccaaatttcaacgagtgctggtgggacagtattgttcttgatatcttgatatgcaactggtttggtatgattcttaagctaccttgctattctatatgtagtgcttttaaacatgttatggataacagcttttcttgttttaatcatggtaggtatctgggcaggaatgtatacagttcgatattttgatggaaaaacatatgagtgggttggcattagccgccagcctaacattattggcaaagtaggtttgttcaaccttgagagtgcatacacatggtcctagccgttgtacatccaatgagaattttgtatattttttcaggtgaaaaggacactggggcagttcacaccagctcactgggacaaagacgagtggcatccgctgcagggaccttggcgttttattcaagtactcactctttgcatcatattcttgacagtggagctgaacacattctttctcaagtttagcctgtggatcccccctcgaaacccagtgattctctataggctgatcttgtggtggctcatagcgataccaacaacacgggagtacaattcatatcttcaagacaggtaaagctatagccactgcgatattggttggagttagtttggaaagagttttgtatataacttgtgtagttttggttgttcacagaaaacctgtgaaaaaggtgggagcattctgttggctgtcactggggatatgcatagtagaacttctcatctgcatcaagtttggaagtggtaggtggttccttacacatgctctgccttagttatttatggttacagttacatagtgtggagagtgtaaacttggttgtatggttatgatacgaacaggattgtacccaacagaaatgccattgtgggtagtgacactatggggaagtgtgggacttggacttgtggccttcttgctgtcttggacatggaagatccagaagatcctcgcgcaaaagagacgttaagcgcatcattattgttgcagcagagacgagagagaaatagaggtgagacagtgaaatgccattgtggtttttttttgtaaatagggagaagaaggaacgatgtaaatgcaattttctttagggatagtgtgtgatattcaacatttacgaagattccatcaattctttcatgcatcaaaagttctttcatctttgttctgccccctcaatctgacaaaacatgttggtttgaatgtcaattttttgttaccattcacacattcaagttttcaacagttcaaaaaaagaagaagaagttattgagccattgtttcttctggtttttgagatgattgttttgtgctgccaactcttacatgacattaacaacattattgtgcttttactgccattaactccattaccaccattcaatttttctgtctttaattattggttccagttttgttattctggtctattattttgtattatcatcattctatcaaacagattatttgttttgttgaaggaaatgaaaaaaagaagaagaaagaatcaaatatgataaattgaggataatattaagattgtgtgacctgccgtgccgcccaacaacatgtcacatggtatcttaggtttgcaaattcgtaatttgacatcttcgacgacaattttgactatctatctaatcttaacatcactcttccatcatcacttcctattttattccaactttcttaaagaagccaaaaaaaggatgatgtcagaagttaaggaatattctgacaaggataggatgcccttaagggaatctagagtcttgaatgggcttttagaattccaagaagctagggaatctcgagtctttaatgggcttttaaagtttcaagaatcaaaggcccaaattgcatatttgtagcccgtcggaaacgcaatgaaaatgatgaatctgaagactgactcaaacaacatctctgtagggttcttcttccttgcttcttcgagtctcgatctcctctctcaatctcaggtaacgccaaaatcctctttttattcatgggatcttttataccaaattcgatttcttcattttgagatctgtgaatatcatcgtcccacgaaccaatcgaatctgttgttgtctgacattaattttcatttctatctcttgcagtcttcagcttccaattgactttcaacatgtaagcttattccttaaactcgataccttcttaccaatctccaatctccaatcatgttgtgtagatggatctctaacatatgtagaccctttagtattcgtgtctgaatctctagactggaatcattttttttttttattgtggctctatagttgtgtaggggtcggtctatgattagatccgattctattcatttttctggcttatgttttcgcatcatataatcagagctttatcttgtaaggaagagtgataaaactagataattatgttctttctagttttgctcgtaaagacgattcttgtatgtcatcattcacacgggagtagtttatatatctagccattgatgttgcatcctcgatgcctgtggtttttctgaatatttcagggcagatgatgaagttgttgatccaaagaagtaccttgaggaatcttgcaaaccaaaatgtgtgaagccacttctcgaatatcaggtgaaactggttgatgttgtgactaattatgaattgtgttataagttttgacacagtgccatgttttgtgaagatcattgtttgactgatacaaggcttgtttgtggttctcaggcatgtgtcaagagaatccaaggtgatgattctggccacaagcattgcactggccagtattttgactactggcaatgcattgacaaatgtgtaagttacttgaattatgttattttgctgtttcatcatatgatatcttctaaagtttgatactgagatgaaattggattttggatcttcaggttgcaccaaagctgtttgcgaaactaaaatgaaaagaggtgaagctggagactctattgtcttgagtttgctacatgtggtttaaaattgatgtataaaatgcagtggatgttgaacttttttttactgcaaaccagattgccaaatggctctgcttcttggttttgtttccatcgcaagtttgcgcttactacatttttttgctacttgagtaattgcatggcctaataacaagatatgttgtgcctttctttggtccaattgtcgtagacaatgcgtcaaacaaatcattaggcttgaagtttcaataaagagagattttcaagcctctgctattaggtggcctggtactatggccattgattaggatttcttagagcttgccaaagtttatgatcggactaactctgaagcttattggtcttaaaaagataactatctaatgatggcggctacaagaagatattttcttttaaaaaattttgaaggtgaaagaaggttgaatagtcttatggtgaaatcacatgtgactggaatgaagtgaagaactgtttagtggagtgtgtgatgcatgcagcagccacttttgaaggacagcttggactttagagtgagagtgagatgtatggcccgcggcggctgcattagactgaatcttatccttgacactctacagcaattatgtagattctcccatttgaccctctatttaagggttagcaagtgtaataccagtccatacaataccattacatagccatgaacggtggagacggtgcttctagctatgctcgcaactcttcctatcaggttttaataatatacatcactcttccactaccttttttcctgagctagcttactaatatgttacttgggtgtacgcctgtagaggggagccattgaggctgcggaagcactcctcaggaacgagatcaacgcacggctcgacatcactaaccattccttttcatcttttacaatcgcagactttggttgctcctccggccccaacaccgtaattgctgtcgacatcatcatccaagccctctaccacaagttcacctcttctctgcctaatactacaactcctcagtttcaagtcttcttcaacgacgtctcccacactgatttcaatgcactctttgctttgctccctccacaacgcccctacttcgttgcaggttcctatttccctttgcatctccttcagttagtggttcctacttcgttgcaactctaatggttcattgcttgcaggtgtccccggttccttttatggaaacttgtttccaaaggcacatctcaacttggcctactcctcttgcgccctctgctggctctccgacttgccatccgagctaactgatacaagctctcctgcttacaacagaggcaggattcactacacgggagcatcagcagaggttgcacaagcttactcctctcagtacaagaaggatatcaagttgtttttgcatgctaggtcacaggagctcgcagaaaacgggttgatggcactgattgtgcccggtgtaccagatggttttctcgattgtcaggaggcttcaacgggatccgagttcgatctgttgggttcatgcctcatggacatggccaaagaggtacttgctttgttttccgtaagaaataagaatccatgacatattaaaaatttctaaaagacttgactgtgcagggaataatagaggaggaggaggtgaacagtttcaaccttcccatatattacacaactccaaaggaactggaagacatcatcagaagcaacggagagttgaaaattgataaaatggagacactggggagcatggacgcacaagacactatgcctgacctcgagtcaagggttctgtacctgagagctgtgctggaaggtctagttcgtacccactttggccaccaaatcctcgacgacctgtttgatcgctacgccctcaaacttgctcattcctctttcatccttcagcctcaaacccacaaatccatcatgatctttgcccttctcagtcgctgtcatgacatctgatatatgttctccattatgcaatatttaggttttttttttttttttttttttttttttttgcggtctccattatgcaatacataagcaaggatgtaccttttatctactatatatgaataacgtgctttacacaactctcatccatcacatcggctctactttgaataaagaatttgagtcactatcaaaccagatattcaatttcatgacagaaacatgtcaaagagatagacacacatcaagtactcacaggaaacacaacaatagatatataacaccagaattttattgctcccaaagtaactcattgcctgtagtatcctccaccttggtgaggaggttggtatgggctctggccgggataaggaggccgaggctgctgtccctgcggatcatagtaagagccttgttgccatgatggatgaggctgttgctgtgcctgaggagggtatggttgtggcgcctggccatgaggagtatggtatgggggaggtggaccgtagggtgggatagagtagccaggccttgacatctgctcaggcggtctatagtatggtgcatgtgggtgaggatgagatggattctgagtttctggtggaggaggcggacttgaagccgttggttgatgcacagatgggtatgggccggagcttctatgatcctgaaaactcaaaccagacatctgtcgttgcacatcttcaatcatatctcggcactggatactccttgtcatcacaaaatcactgcactgctgcttcacattcgtgattgcatcctattgagaccaacaaagacaatgtctcagattgcaggaaagttatttcgtatcttcaatggagtgtaaaatcagaatagaagaaccatcccggacaagtggcataatctagacaagctttgacagtgaagagcttactactatatagagaaaagaaactcacttggagagtgacatagaacttcaggccctcattgatgttctccttgatctctcgatacttcattattgcagcttgaatctgcttgtagcacttctccttggatgctgaacaacagagaaacacagaaaacgaatgtctgagagcaaaagaaccgaaatacgggagcataagaaattccactacttcaaagccgaatgtgtcagttctatcatggattatacttcaaccatcgtatagaatgcaatacagaaagtactttgatccatcatgcaagacagaagctgcttgctcacctttataatcttcaagattgaaaatagttgaaaactcttcattttgagcctataatcaaggaaagaaaccaatgagatagtagttggtttctactaggagtgaaacacgatctccggtagaagctagcacactcaatttgcttgaatattgattgattacaatcaccatacgccaaaggataaaaaccatgataaaatatgaaaaccactacaaggatggcaaaaagaggtagacctgaatttgcatcaataattgttcttgaacttcaatgttttgggaaatatcttcacaaatgtggtcatactttgatatctctttcctgaacatatcttcataggagcctgttatggtcatcagctttggcagtatgtcatcctaataccaagtatcaagtaaaagcctaatgagttttgactccaattcatacaataatcaagaacgaaaatgatgactaatcaatagaaaaaattcacctttctcttcatctctttgagcatgtcttcaagacctgcccgctgagcaccaagattttccagttgcctctgtgcaaaaagggaagaaaaaaagtgagaataatggttcgtgaaagcactttccaaacacacactcgcagcttccaaaagtgatagagattaccagactctgcttcaaagttcccacaatagcatcctctgttgcgtccagagacattattggcctagcaagagttgggacagcagactctatctgatgaagaaaaaccgaaaaccacaacatctatgaatcagtatacagatttaggtttgctatagctgactcaagtgtgtgatttgaataacctgtacccaaagatttcaggtacaagaataaccaaaatgaagttaagagacaacttccgatagcagtttatgcccaagaggagaaatatactagcatacacaaaatataggaagtacttaccggccgtcgatcaagaatagacatgagggcggagttatctctcactgatcgctcaatcttaacatcactttcgccagcttgtttcaaattggctgcaaaccgatttagcctatcctgcaagttctttgtcagtgtgctagattgaggcctagtccaccgagtcccaaattgacttctgaactgagaatcttcagttgcttctttctgcaaaagctcttcagtgtgcaccaacagttcctgattaaccctcttcaaatctctaagttgctgcagttcagcttccaagccagctggaccaccactgatctgaacagcttctacatcttctttaagatcaacaggaagagctgaattaccatccacagcgagaatagaatctggaagatccatctctttgagcctaactcgagttagttcgctagcttgctgtaatctctccgcctgagttctaattacatcatcgaccatctcagtgtatctagagagagcctttgcactgctgtctggaacaaggattgaaaacattttttccttgcttgcatccaaaatatcagtcatgttcattggcttaaccattgagaaggcgggaagtggagacaaagaagaaggagaaggaactctcatgaggtacactctgtcgttttccttgacagccctatccaaattgccattaatgctagactctagtgtgttcatcgcttctataagctgagcaggagctccccttgaagacttctttgcttctgccaaacggctggctccactcctcagccgtgcaatttcttctgcaatttcctctttctcgtgcaactcttttccatatctaaagcaagcttcaccatagaagagtgctgctttcagctgcacatgagaaatccagcctttgtcgaaatgatccttcaatggcgaaatgattagcgcagataaagcctcctcataaaatatgccaacctgattgcaagcagacacaaagcgcaaattcaatcgagatgcatcaccataaactaagcacgttaataacaaatatactcataatcaatcatggaagaatctattaaatctaattctaaaagagatgcaatcatgatttgacactaacctgcctagcaattttagcagagacaccaggagtacttcctttagcaatggtattttcaaagacacattcctgcgcctgcgccaccatcaaccgttccaacattccaacacactcaaccgacacatccacggtagtgctcggcccgatcgtcgccttaatggactcgttatccctcaagtgagcgaacgcccctgctgcagccatgaacgcatgtgaagcctgacgacgcccatcgacggtggtgcggtcatgaccgagtccaatctggctgtagctagcaccaagattgaatagaacagctgctttctccaaatgaatgttctgctgagtagctttatgcttttgcttgaaagcatcgtaccatacgaaagagacggcgttgacatgatccttgtcaggggaaattggaaatcgcgtctccacaagacaaagaactttgtaataggagatgagaaggtctcgccgagcagctggagaaggatcggaaacgcgttctatatcggatcggagctgcttcaaggtctcgagatcgtcgtctataagctgagcctcgcgctcagagtaggtgaaagtaacgtagttgcggagaggacggtagagatcaacggagctcgtcttcttctcatgaatggcgagcatcagattagagagcgaagaagaagccatggcggttcaaaatcctcttcgatcgctcttccgatttttctaattttcttcgatttttggtttccttgatggatccttattgactaagagaagatgatcgtgaaggatcgtgagaacgacaccaagtcctgtgatcttctatgaaaacggcgtgcagtctaatttagtggttaatacagtcgatcaatggcttttaagcttttttccgcgttaattaaatgtggcaacgatggtgatttattttgtggaacttttcctaattagaaacatgtctaattcacaatattttttggtataaatcttcttggtatatgtagaaattttctattgaaagtagaagaaatatgcaaagtatatagagcatggacattaacatgatcactaatcaaaaaagaatgttgtggtgacaatcaacacagtagtattaatttttaagggactacaaaattctgtgtgtttatgaattagagaggccttgaagaggactttcgtatcaaaagaataatgatgtgaagaaacagtaaaattatacgataatacaagaactatatctgtcaaaagtttttgagcagcttgtcatttgagactccatcagctacaagcattgaagttatctcctgcaacaatacaaatcgaaacaatgataaagatacacatcttctaaagcatttaggttctcataaacaaaaacagtgcatacctcagccatttgtttctgtccgcacagcaccgctcccgtggccttgggagctgatagctgtttagcccttgcaaaagcagcctatacaacacattatgtatatattagtttgatccacattgagttacagcagacttgactaaggagcacgtttctcaatctcacctgcacatatccagtttcccctttccacccatcatctggctgtgataataccggcacaactttgacacccgctgattcccactctttaaacttttcctacaaaatcaagagcgtttccaagatgattcttctgtagatcaaaatgagagcgagagataggctttacgcttatcatcaaaagatttttataattcaagcacacacatttatatctactgacatcatgaattgcaaaacaactgagagaaagaaccaaacctggtaagccatcctattcaggttcctagccccgtaatagagtcttacgtcagatcttctatcagcgccaaatcctgattcgattagtgagcggatggggctgcagagataagaacatgtgagattacattccaaattgaagacagttacttaattcacatcaccatcactaaacatttttgattgaccaggcctagaacaatagatgattgaaagaaacacctttacttggcataaacaacagatctgatcgatcaccaaagtcataaaaacattgacctttcatacatgaaactctatttcagtattacaacatcatcacagtaaaaaaatagccacaaaattggtccatggcacctttggatagattgaaatcatactggagttcacaaaaaaggtccacaaaaaagcaattgaacccggcatcacagaggattcaccgcaaaatgagtaactaaactagattcaagatacttgagtttgaaagctttgtatctagctaatgctctgcactgaaacctttaaactagaccacacttggatcattgaatacatgaagtaaaaaagacaacttcagcaatccaacaaggtaggagagaaaatggaaaaagctctcacctaattccagatccagtggcgaaaatcaaaacggtgggatattcctcaggaggatcaatcagatcgatattgaaaccattacccatcacagagctaagctcaacggtctctcctttcttcaacccgcagagaatctccgcggtagaaccagcgatgctcttgaccaagaattcgaaagcaccacgagaagacgccaaggaaggaggagaagcgattgccataaaagaaggcttctcaacatcaggaacacggatctggagatactgaccgggtctcgtgtacgaagctacgagatccggagcgtttgaaatgtcgattgagatgtggaaaagcgattctgcagctgattcgattagagagagaggagctggagtccagagggaagcgtcctggcgaacggcggcggcggatacaacggaagcgacgcggttatttcgggataaacggagatggcgtgtaagagggagatggcgcaggataaacatgggggagagggagtggctaaagtgcgcatgggtgacagaaggcgcgaaaggaagagtggacatggtggagagtttttggggctctatatgtgaccgtcaaatttagccggcggtagaaaagggcggcccgattggttcggtggcacgattgtgttatttttttttgctatgcacctaatttccttccgttacaatgttttgccacgtggatgatcaaaatatcattctatctactttccgaccacttgttgtgatacttcgaaaattgcattccctcttcatttaattttgctagctcgtctttcaaagaaaaaacaccaaatcatgtaattaaaagacagaattgtggaagaaaagtgacaagcaatatgcatattaaaaaacgtaagagtacattatcaatgaacactccctaccgttgagccaaatttaacgtatatatttcattcatggttttggaattttgccaagtggcactacactatagattcccttggtaaggaattacacataaccaagcaccaaaaagcagacagtagtacttcacgattatcactcaccactttccgtttcaactttcaaactctctctcacaagccatgcaagacgcggagagaaccaccaatgatccggtagacagaattgagaaagtgacatggagagatctgcaagacggatctttcaccgcagaactcaagaggcttatctgctttgcggctcctatggctgccgtggttatcattcagttcatgatacagataatctcaatggtgatggtgggtcacctcggtagactctccctcgctagcgcttccttcgcagtctccttctgtaacgtcactggcttcagcttcattgtttgttttccttttccttctttcctctaaattgacgcacttatctctgttactagctaccagaaccatggaaattgcatcctctcctcactttcttgttactttttgatgatagataggattgtcatgtgccttagatactttgagtggtcaagcttatggagctaagctatatcggaaactaggtgttcaggcttacacagctatgttctgtcttactttagtgtgtctccctctctctctcctatggttcaacatgggaaagcttattgtgatccttggccaagaccctgctattgctcacgaagctggtagatatgccgcttggctcatcccaggactgttcgcttacgccgttcttcagccgctcattcgctacttcaaaaaccagagcttgatcacacctctcctcgtcacctcttctgttgtgttttgtatccacgttcctctctgctggcttttggtttataagtcagggcttggtcatattggaggagccttggctctcagcttgtcatactggctctatgccattttccttggatctttcatgtactactcctctgcctgttctgagacacgcgcgccgcttaccatggagatattcgagggcgttagagagtttatcaaatatgctcttccttctgcggctatgctttggtacatcacttttctctgttcctttttcacttctcattgcctccacattttttgttagaaactcttttatatatgggttgcagcctggagtggtggtcatatgaactcataatattactttctggtctgttacccaacccacagctggagacttctgtgctctctatctggtactcatccttgcatctttccatttcctgtcacaatcttgaatttgcaaaatcataatgttattcatactacggacagtttcgaaacactttcaataacttattcaataccactagcgatcgcggctgcagcaaggttagagcttttgtcaccactatccagtacataaatgctgaagtatactttctgttatggtttcatgttcataagcaagtacattgtgcagcacaagaatctcaaatgagttaggagctggaaactctcgagcagcacatattgtggtctatgcggcaatgtctcttgcagtaatggatgcattgatggtgagtatgtctctattagccggcaggcatgttttcggccatgttttcagcagtgacaagaaaaccatcgaatatgttgcaaagatggctccgttggtctctatttctatcatactggacagtttacaaggggttctctcaggttcgagattttttcccatttcgtttctcaaacataagctagtgtcgaatatacagctccaagttgtcatgcctgttcatgttgtactcttttctgccattcttctaaccctcgtttgatggttggaaggtgttgcaagcggatgcgggtggcagcatataggggcttacataaacttcggagctttctatctctgggggatacccattgcagcatctttagccttctgggttcatctgaaaggtgttggcctttggattggaatactagccggtgcagttctgcagactcttctgctggctcttgtcacaggctgcacaaactggaaaacccaggtcctttcctttgctttttgtctttcatgacatgtttctattttggaataaacatatcgatgttcaattggatgcattttgaactctaggcccgtgaagcgagggagcgaatggctgtggcccatgaatcagaacttacagagtcagaacttcccatctaagattacagggacacagatgttcctcctattttaccatttttgtagcagccaaatcgttatatgttactgctggactagtggttgccgtgaataattggtcttttcttttgtaatattagcagccctcagcaatcgttatttcgatgaagcattattctggtagttcagaaataccttggacagaaaatgatgtagtgatccaattctgctgataccagctcgcttatacctgtaacacagtagttgcgagtcaggaaatagatgtgggagctgcttctgagtcttggagctagagttttcaatcactgaaaatgtttctcgacacagaccttcacaagtgtctccacaagtaataatgacaggatcacacatatattactatcactagaaaaatataaccaccaacaacgttgctttatgtattcaaactttcttacgatgatgacaatatagtttgcaaaatgcatattaaaaaaagaaaacgcagagagccaagagtcagcatcagtaatcacgccacaaaaataaaacgcagagagcatattaaaatgttgaattaataggtggaataaagtgacgattatgtgttacaaaaatgaaaaatatggttttgtataaaaacaccaatgtggcaatgtacatagtcttaaagaacaacacgtactaaagcacaaaaagcagacagtagttcttcactcacaccactttcagtttcaaatttcaactctctctctttagtgtctctctagccatggaagacgcagagagcaccaccaaagatcctgtagacagagttgagaaagtaacatggagagatctgcaagacggatctttcaccgcagaactcaagaagcttatatgctttgcggctcctatggctgccgtggttatcactcagtccatgttacagatcataacaatggtgattgtgggtcacctcggcagactctctctcgctagcgcttccttcgccatctccttctgtaacgtcactggcttcagcttcattgtttgtttccttttccttttttccactaaaattgacgcacttatctctcttactagctaccagaaccatggaaattgtatcctctcatcactttactgttactttttgatgctagatgggattgtcatgtgccttagatactctcagcggtcaagcctatggagctaagctatatcggaaactaggtgttcaggcttacacagctatgttctgtcttacattagtgtgtctccctctctctctcctatggttcaacatgggaaagcttctcgtgatccttggccaagacccttcaattgcacacgaagccggaagatttgctgcttggctcatcccaggactgtttgcttacgctgttctacagccgcttactcgctacttcaaaaaccagagcttgataacacctctccttatcacctcttgtgttgtgttctgtctccatgttcctctttgttggcttttggtttataagtcagggcttgatcatattggaggagccttggctctcagtttgtcatactggctctatgccatctttcttggatctttcatgtacttctcctctgcttgttctgagacacgtgcaccgcttaccatggagatattcgagggcgttagagagtttatcaaatatgctcttccttctgcggctatgctttggtacatcacttttctctgttcctttttcacttctcattgcctctacattttttgttagaaactcttttatgtgttgcagcctagagtggtggtcttatgaactcataatattactatctggtctcttacccaacccacaactggagacttctgtgctctctgtctggtactcctccttgcatcttactaactctcgtcacaatcatgaatttgccaaaacataatgttatttatactatgaatagtctccaaacactttcgatgacttattcgataccactagcgattgcagctgcagcaaggttagagccaccattatgctgttcataaatggtcaagcatacttgctgttcatggcaaggaatcatatggtttcatgttcataaggggatgtttcttgtgcagcacaagaatctcaaatgaattaggtgctggaaactctcgagcagcacatattgtggtctacgcggcaatgtctcttgcagtagtggatgcattgatggtgggtacgtctctattagctggtaagaatctgttgggccaagttttcagcagtgacaagaataccatcgactatgttgcaaagatggctccactggtctctatttctctcatactggacagtttacaaggggttctctcaggttcgagaactgttcctatttcttttctcaaacatatactagtgtcgaatattatgttatgcactttttagtcaaagataactaaaggtgaactcttttctgccattcctaaccctcatttgttggtttgcaggtgttgcaagcggatgcgggtggcagcatataggggcttacataaactttggagctttctatctctgggggatacccattgctgcatctttagccttctgggttcatctgaaaggtgttggcctttggattggaataatagccggtgccgttctgcaaactcttctgctggctcttgtcacaggctgcataaactgggaaaaccaggtctttttcccttttcttttgttctttcttcttcatgacatgtttctattgtgaaataaacatattgatgttcagttggatgcatatttgaactctaggctcgtgaagcgaggaagcgaatggctgtggcccatgaatcagaacttacagagtcagaacttcccttttaagataacgggggcacatatgttgttcctcaggttacaccattttggtagcagccaaatcgttgtatgttactgctagactagcgtttgccgtgaataatcggtcttttttgtaataataccatatgatacatccctcagcaatcgttgtttcgatgaagtttcatcctacttattcagaaatactttggacagaaaatgatgcagtgatcccattctgctgataccaactcgcaatcagacttgtaacacagtagttgcgagtcagggaaagatgtgggagctgcttctgagtattggggcaagagttttccatcacagaaccatttctcgacacagacccgttcataagtctgtccagaagcaacaatgacaggatcacgcataagctgcaaagatatctgttcttctggtggaatgaaaatctgtcctgatttcctactgttcataagcttatagttgatagaaccaaacttcgatagttggcgcccaaacgcatgaacacgatgttcattacaaccttaaccagagtcatttgtcatccacaatttcacttctgaatagcttggagtactttttcatgagatgcaagatgtaagccacaatggaatccttccccttgtcttcttccacactttcccagtcaatgagtttctttaaagcatgtcgcctccaccatagctgatctagaagaagttctactacgttccaccagagctgtcacaggagttgtcaaatagttcaattacccgatcaccaacactgaatctgaagaaatcacaaatcaaaattagaattcgcaactaggaactagcagataccaagttttaccaatccgaactctaatttcaagaaacaaataaacacgagggtatgcttgtgtaatcaaaaaaacaaaagacaagcaagtagctagcaagagatacataagccctaatgtgaaaaaggaaatgtgttgtgcactaaaacagacatcacctgaaacccacttgatctaggaacaatgtcctccatgcgtctaagacttttcatacatgcatattttggtttctcaatttctacggtatagcatccccagtgatggcctgtttacaaggaccaaaaaaaaaagggggaattcaacagaccacaacagaatggaggatacctatccaaagaaagtgagataaagagaaattcaccaagtaaagtttgctacactcaaaacagtgttgaagaatgttctttgcttcctcaagtgaattatgtaacgaacacaaggcttgaatcccgggtttactccgaggtcttgcaatttccaacgacaggaagatcgaccacaccttgtaataaagtgcagataatttcttgcacacacatctctatgtaactgcattttatcaatgcccataaccacaactttagcaaagcatagagaacaagaccatcaaattaaacgaatcacgcaaacaaagaataagaacaggaatccaaaaaaggaagaaaaaaagactagaaagcactaatattttcaactcaggattaactgtccccaagaagattaccaattactccctcaacagaagactttctacaatcaacagagaaatggatcaaaggtaaaagttccttaacatcaaaaaaaaaaagcaatccattcatgaataacgtcataacatactaagtaaaacccaatgttttaatttgattccaacaactactgacaggaatctttgtgaaagagtgatgaatgaaacatatcatttatgaggataccttgggcatcgctagcagcggacaaattctcctcgactcagaatttcacaactaaagattacagggaccatacgttcctccggttttaccatcttagtagcagccaaatcgttctctgctacttttggactagcggcacaccgctaataacgagtctttttgtaagaatactgcatgattttcgacagtaataagaagcagcctttatcaatcgttgtttctatcaagatttatttcttgttgttcagaaataccttggacagaaaataatgccaacaaagccttttatatgttcaccgaacaaattcagctgccagtgagcttgagaaccaaagtagagaccaagaagtggtgttaatggagttaatacagtcgctgcaacgcatatctccaaattgacagcattactggaacctgcaaaaaccaacagtgtcaagccaaattcaatccctaagtggtcaagtagagcgtaacatagatgagcaattcatatgttacctgaaaaacagctctgttctgaacacactcaaaaatagacgacagagattatacactcgtgcgtaatttaccaagagaatcaaagctggaggagaaggcattggcaatgccaccaaagaacagtatcgacgaacctaaaacaattttccagaactcagagctggagatactacggcggcggtggatacgacacggctattgcggcagaagcggacatggctaaacatggaacacgataaacatgggggagagggagtggctaaagtgcgcatgggacacggcggagagatttgggtctctatgtgaccgtcggcggtagaaaagggcggtccgattggttcggtattttttagctctatgcacctaatttgattccgttcatatgttttgacacgtggacgatcaggatatcattattttatcttctttcaaccacttgtgtaagtgtaaccaagtataaaagagaaaacaaaaacaaaaacagcctttggagaatggaccagcaatttagttatttttttagcaaaattccaagaaactttaccagcttcgcatccatatagtagtattttataacgaactacctttcgtccattcaatagaatgactaatagattgaaaaagagtgtggatgataaaaaggtcaaaatacagattcatagcagcaaaaaccgagatcccaaacaaatttgcatttttaaaataaaaatatttcattgaaatctaagccaaagtttaatattatttcatttacggggtttgggaagattcgtcgaaggaggacatgcaggcacaaatcacaaatatcactcaccgcctttgtttgaccctttcccccacaaatcatcaaaatttactgttttacattctctctctatcactctgcatttagccatgggagacgcagagagcactaaggatcgcttgctgctgccggtagagagagtcgagaacgtgacatggagcgatctgcgagatggttcattcaccgtagaactcaaaaggcttatcttcttcgccgctcctatggctgctgttgttatcgctcagttcatgttacaaatcgtttcaatgatgatggttggtcacctcggcaatctctccctcgctagcgcctctctcgcctcctccttctgcaacgtcactggcttcagcttcatcgtctgttttctcttccttctttcccctaaattgatacacttatctctgttattttgatgattgttactttttgcctgtggtgttagataggattgtcatgtgccttagatactttgagtggtcaagcttatggagctaagctataccggaaactaggagttcagacttacactgctatgttctgtcttgcattagtgtgtctccctctttctctcatttggttcaacatggaaaagcttcttttgatccttggccaagacccttctattgctcacgaagccggaaaatatgccacctggcttatcccaggactgtttgcttacgctgttctacagccgctcactcgctactttcaaaaccagagtttgatcacacctctcctcatcacctcctatgttgtgttctgtatccacgttcctctctgctggtttttggtttacaactcagggcttggtaatcttggaggagctttggctatcagtttgtcaaactggctctatgccattttccttggatctttcatgtactactcctctgcctgttctgagacacgtgcgccgctctccatggagatattcgatggcattggagagttcttcaaatatgctcttccttctgcggctatgatttggtacttcacttttctctgtgccttttcacttctcaaagcctccacactaaaaattatgttgtgtgttgcagcctagagtggtggtcttatgaacttataatattactctctggtctcttacccaacccacaactggagacttctgtgctctctgtctggtactcctccttgcatcgatcaatttcttcttgttacaattttgaatttgcaagaacataatgttattcacactgtggcagtcttcagacaatttcaacaatgtattcgataccactagcaatcgcggctgcagcaaggttagagctttagtcacactatgcagtacataaatactgaagcatattttctgctcatgacaaggaatcatatggtttcatattcataagcggatgtttatttcttgtgcagcacaagaatctcaaatgaattaggtgctggaaactctcgagcagcacatatcgtggtctatgcggcaatgtctcttgcagttattgatgcattgatagttagtatgtctctactaatcggcaggaatcttttcgggcacattttcagcagtgacaaggaaactatcgactatgttgcaaagatggctccattggtctctatttctctcatgcttgacgctttacaaggggtcctctcaggtctgagacttgttcttctttctttactcacacacaagttcttgtcggatattgtttactcttttcctccacatagtgcaaagacacttcatgttctgtgttttgtcctgtgtcaaaagctatcccaaaaatatactcttttctaccacgcctaattgtcttttgatggtttgcaggtattgcaaggggatgcggatggcaacatataggagcttacataaacttaggagctttctatctctgggggatacccattgctgcatctttagccttctggattcatctgaaaggtgttggcctttggattggaatccaagccggtgccgttctgcaaacgcttctgcttgctcttgtcacgggctgtacaaactgggaaagccaggtcctacttctttttcgttcttttcttcttcatgactagtttctcttgtgaaataaacatacagatcttgaattggatgcatgtttgaactgtaggccgataaagcgaggaatcgaatggctttggcctatggaacataaggcgctgcagaacagcacttacagaatcagatctccgcgtctgaagatatagggacctgatgatccttcggttttaccattttgttagtagtcaaattgctgtactgtatgttacttttggactagtggtagccgcaagtaatattgcatggttttccaaaaaggagccttttctctgttctcaacaacaaagaataatgaacagattcactggactgtgagcttgaccatacaagcagagaccaagaagtggtggtattgatggagctgctacaaccaccacatatctccaaattgacagcatctgatttcctgtcactagtcccacttctcacaagagtaactgaattactcgaacctgttaaagttatcaaaccaattttaatgatcaatcttggggcaaggctttaaaaggcaccctcagtgtcaattagaaacataacatagagtttctactgagtcttggggcaagagctgtccatcagtgatacattcctcaatacagacatgttcataagtctgtccagaagcaaaaaatgattacctactctccatgggcttatatagttaatagaactaaactttgatagttgacaccaaatgcatgaacacgatcttcattagaaccttgaccagtgagggaacatggtgttggacactaagagtcatatatcatccaaaattccacttcagaatagaatggagtattttctcatgaggtatgacaaataattgattccttccggttgtcttctcccacacgtgccttgtgaatgagttctttaaagcacgttgctgtcactgcaagttgtcaaatttcgtcaactgttgcaaccgtgcaatcatccgatcaccaacttccttctctgatatggatcaagcaacaatgtccaaatctgaacaaatcacatatcaaaattagaattgcaacaaggaactaccagagaccaatttataaattcagaagcaaatatacacgagggcataattaatcaaactggctgcaagagacttataaaccctgaacagttgctaatatcgcatggaggacattgttgctagctcaactgggtctcagatgatgtctgtttcagtaaaaagtaacacataactgcattttatcaatggccataacacacaactttaacaaagcatagagaacaagaccataaaaacataaattacatcaaagaacaagaacagaaatctaaaaacaaagcaagaaggagcgatcacacttcaaataaaccaatgaggtagtggacaaagccctcacctaattccagatcaaaccggcggagatgacgggtgaggggaagtcagcgcaggataaacatgggagggagagagatagtggctaaattccacatgggtgacagagggcgccaaagtatgacttacttggagtgatttggatagaaaatggtgacacgtggacactcaagatatcatttttatctttttcccaaccacttgtgagctgtgtaggagagaagtaatgaacatataagcaaaaacaaatgttgttacaaaaacaagtccccaccacatttactactactagtttgacaaacataaacacatttcccttattaacatttcttgttaaccacacaaagttaataagtaacccaagtttatacagttttaaaacattctctctatctccctccggctaggctgtagctgttcgccatgggagacgcagagagcacctccaaaactagcttgctgctcccggtggaaagagttgaaaacgtgacatggagagatctgcgagatggattattcaccgcagaactcaagaggcttatctgctttgccgctcctatggcggctgttgttatcgctcagttcatgttgcagatcatctcaatggtgatggttggtcacctcggaaatctctccctcgctagtgcctctctcgcctcctccttctgcaacgtcaccggcttcagcttcatcgtctgttttctcttccttctctcctctttatctctatctattactagttatcaaattgcatcccctcattacttgattagttgattgttactttttgatgctaggtaggattgtcatgtgccttagatactttgagtggtcaagcttatggagctaagctatatcggaaagtaggagttcagacttacacagcaatgttctgtcttgcattagtatgtctccctctcactctcatatggttaaacatggaaacgcttcttgtattccttggccaagatccttctattgctcacgaagccggcagatatgctgcttgcctcatcccaggactgtttgcttacgctgttctacagcctctcactcgctacttccaaaaccagagcatgattacacctctcctcatcacctcttgttttgtgttctgtctccatgttcctctctgctggcttttggtttataagtcagggcttggtaatcttggaggagccttagctctcagtttttcgaactgtctttataccattatccttggatctttaatgtgcttctcctctgcctgttctgagacacgcgcaccgctctccatggagatatttgacggcattggagagttcttcagatatgctcttccttctgcggctatgatttggtacttcatttttctcggtgccttttcacttctcaatgccttcacattttggttaaaaactctttcttgggttgcagcctggagtggtggtcatatgaactcataatattactctctggtctcttacccaacccacagctggagacttctgtgctctctgtctggtacttctccttgcatttttccatttcttgtcacaatcttaaattagccaaaacataatgttatgcatacgatggacagtctccaaacaactgcgacagtctattcgatacatcttgcaatcgcagctgcagcaaggttagagattcagtcacctactatgcatgcagtacataagagctgaagcatacactagttgtttcatgtccataagcaagtattttcttgtgcagcacaagaatctcaaatgagttaggtgctggaaactctcgagcagctaatattgtggtctacgcagcaatgtctcttgcagtagtggaaatattaatattgagtacttctctattagtcggcaggaatgttttcggccatgttttcagcagtgacaaggaaaccatcgactatgttgcaaagatggctccattggtctctatttctctcatactggacggtttacaaggggttctctcaggttcgagacttgttcctatatctgtactcaaacacaagctattatcagatattgtttaccctcttttcctccaaagtctcctgttgcgcactttagtcctgtgtcaaagttacaaagatatcccaaacttttactcttttctgacttctgtcactcttaatagtcgtttgatggtttgcaggtattgcaaggggatgcggatggcaacatataggagcttacataaacttaggagctttctatctctgggggatacccattgctgcatctttagccttctggattcatctgaaaggtgttggcctttggattggaatccaagccggtgccgttctgcaaacgcttctgcttactcttgtcacgggctgcacaaactgggaaagccaggtcctacttctttttcgttcttttcttcttcatgactagtttctcttgtgaaataaacatacagatcttgaattggatgcatatttgaactgtaggccgataaagcgagaaatcgaatggctttggcctatggaacgtaaggcgctgcagaacagctaaagatcatagtgagcataggttcctccggttttaccagttttgtagcagacgaattgctgtatgttactttgtggttattggaaggtttggttgtaataatactgcacaattttcatcagtattaataagcatccttcttctaaagaacattcaaatataccttgccacgggaaaagatgcaaaagagccttttatgtgttccacaagaaagaataatgatcaaattcaccatccaaggagaggcaaagaagtggtagttctagagctagtaaaccaatgcaaccaccacctatctccaaattgagagcatctcatctcctgtcactagtcctacttcttgcaagagtaaattgaaatactcgaacctgtaaaagctcctgaaccttggcaacatggcttttaaaggcacccatagactgtcgagtaaaggaataacatatatttcatacaactttgacactgcgatttaccttcgaatagaggaccctcataggcatgtgtgtgattcagcttataagcagatattgtttagacatatattagctcaacatataaaatctagcattataggaagcgcggaaaaaaactaaaacccaataaattcttggactgtaacagaatccagaagttcccaagattcgcttcccctataaaacccaatcataaccgcttttttctttcttcgtcttccattttactctcttcgacctcacaaatcacaacaatggcgaaaatctcgagcgcttcttgtttcagagccatctttctcggagctctcatcatcctctgtctccctcatccctccaccggcgttcctttggaagagttagaaagagccatcgccatcctccgcgtcagaggtcgtgctctcttcgccaatgccatcatcacctccgatcttctcttcgatctactctccgacgagtctctcactctcttcgcccccaccgattccatgctcttcgatctcgacatgactcattctcttccgttctacgtttctactctccgcctccactcggtacctctccgactctcactttctggtctccgatctctccccaactcctcctctctcccgacgcttctcccatctcatcgcctccttctcactaagcattcttcctccaacgattccatttttctcgacggcgttcaacttctcatccctggtttgttcgatggtcaacatattgccgtacacggtctcgccgatcttcttcccctcactgctccttcatcccccaatcgtctcgtggaagattcgacggcactggcaaagtcaccatggtttttaggttcaagattttcaccggcaccagagccttacttcgcctttatggatctttcaccagcagaatcgccgagtgttgaggaagtttcaccatcgccgtcgtggggagaaggagaagaagatttcatcgtaggcgatgaaggaggtccgttagatgggaggaataacggcttttgatgtacacgtgtcgaaatctctgtaaaacacctagcacgtgtctttgactctttgtaaagtcaaaagagtcctttcttcttctttttttggtcaaaagagtcctttgtttttctttttttgcaaaaagagtccttccttttgtagtgaaatttgaaatgtaacctccggaatttcttaatgcagattgattctgaaccgaatttaaccgacttataccaaatacaatctttcaatgaatatgccagtgaagagacatctgtcgagcaagcggcagtagccgatgcatgaaagctgaggctactacactagcagataaacaaaacaaattatatagcacaaaggcaaatctttcctagaaattaccataattcacgttacaacgctccaaaatagatttgaccagttttctaactcgcaaactccaccaaatttcaagaacaaacaaactatatgacttagagaacctcatgtttaatatcttcctccactgcttctgctttaactgtatcagttgccacttcctccttgatggttccatctcctccctcctccagtaaatcatccattatcatttcatcctctccaccattgatatcctctacttcatcttcttcatcttcatctcctactcctcctccaggtatctttctcttctttggcccatgctccatcctatgagtctctaattccttgtccatcgtttcctgcaaattcataccctcgttgtttgctttccttgccttccttgcgttttgccacctctccagctctttctcaacattacccagacactgctcttctatctccttttgatactcactcacttcttgtctccttgctgccttccattctaagaatgtctgcatcaacacaaaaccagtcacatcaaatatcccatagcatgcatgtcaaaactttcttcatttacaaactacaacaccttacccgctctttctgttgttctacctcacttgtatcttcttccaaaggcttcactggtgcatagtatatccgtggctctgctttagtcctgaaacacccgtccacatgcaaatcaaattaaataagttttgacagaaacctttatatcagctaccaatttctacctatagcaccaaacattgcctttgtatgcacgtgaatggaaacttatctttgcctctataaaattgtcaatatgcacactttttggaccgaaataaaaaataacctgcaaatgaaatacatagcagttagcaatctcatcactgagactcatcatgcagagtaagtaagggtacgctatagaactaaatcacacgcagtaacagcatgtcaacactaccttataaaattgctaagtttcttttggtgctcactccattgaaggaaaagcaattccaatttcttttgttctgctttagcagcaacacgagcccgaagagtctgattgaccagttaaattgagtatatcagatctttactacacaagactgccatttggaatggtatgcaaagagaaaaaaacttaagctggccacttacaagatctcttctcctcttttcagtcaaattttcacgctcctgcagcctcagtcgttcactttcttcacgagccttttcctccgcctataagagtaggagggatacaatgaacaaacactgctaatgcattgtagtactaaagatgatgctaaggaataaacgcactcctaactggacatataatgatacctatacctatacccaattccaatatagacacccatatctagagagatttaggcttccctacaacgctacttaagccaaaagaaactgaaggaaaatgctgtcttagtttaaagtacaaaaatgtacaaaagaaactgaaggaagatgaagattatcaattcaagtacaaaaatatggcgtttcccttaaaaaaacagtaacaagcttcataaaatatctccaagtgaatatggtgtgtgcttaccctttgtagagctgcagttcgtcgggcgtatgcatctgttccagaacgctgcttatcttcttttctgaacttctgcaaaaataaagagtgagaagtgagaatacaataaattgaataaagaatgaaaaatctaactgaacatgaatcaagctaatccatgagacaagaggttcatgtgaatctcagcaaatacctccaaagtccctagaagattccctagcattcttctgttcctattaaccagtttaggatcctcattcttaggtaaaacccttggtgcaggctccggcaatgcaaaagcttcgtaacgctgataagagcaaaataacaacaaccactgagtaaacagtcgcttcgttctcataaaaaggatttatgggaggaatttgatttaccttattggtccgtcgttgttctgcatctctctgggaccaacttccacgatgaagaccagattgcttcttgtcactttgatcagaagtcccattctcaccaactttaacctgggttccattaccatcaactggaaattctccatctttactaacatcttcaccgtcgacctaaagtatcccgttaaagttaagtaaccacttcgttcgatctatcaatgagaatgcaattactttccgaacacaaattaccttaacaacggcggaagacaatctccttttagcaggaggctcgtcttctacgtcattcctctccgccttcaaaaacacacaatatccaataatcaattaccgcaatctgtttcatctcaaaggagagatagagaagacttacaggtcgaggaaagcctctacggccttggttgcgaggagcgacgtttgagaagcctccacggcggagtccacgagggtcacgaagcctctccgtaatctgaacaggatagagaattaaacaatcgccgtcaacagagatttgtaaagtgagaatgagattgaggtggagatagtacctcacgctgttgacggtgaagctcatcgatctcatgccgtagctcttccgctgtcttctccaaggcggtgtctcccatcgtcgccgttgctcagaaattttgctcgaaacccttagaagaagaaaccaaatctttttgtttatgggctttaaaaggcttttacttcactatccgtccaacataacttcacaaaagccactatgagaagaaaccaaaaatcttagttattaattgatataaaatttaattttaatgcaaattttctgaaattctataaatgtttcttatatgaaattttttctttcaatatttgagtttaaatcaaaaaaatataagataagaaaatataatgtggaagaaaaacctaggttgcatgaaatcgaaatcacgtgtgtggaagcgatttttctaaaaaaagtttcattataacattcaaagtactacttcttctctgtttttgagttgcaacttttatttctaaataggttcttcttgatgaataatttttacattacaacaaaaataaactcacattaagagaagaaaagaaaaaaagaggaagcaaagctttattgcaagaaatgtttcacaagaaaacagagtgtatagtggttatctagactggaagttgagagtcttgatgcaaaatgcgaagatgaaggcaaaaaagacagtgaagccaactagtactccggccacaggtcccatgtagtctgattcaaaaccatattgatctttaatgtactgtttaacagtgaggccaggtgcaccaccaaggagagcgatgggagtctcaacgtcaccgtattgagaagtgatcaaaccgtatatggtccaagcaacagggcagatccagtaataccaaacccaccactttggaattttgggtctagggatgaaaaatccagagaagaggttaaagataccataaaaggctgatgcaaagatagaagctacttgttggttaggtgtgagggaaactgtcatcatgccgtagtaggtccagtagaggaaggagaagtaattgatgaagataaaccacaagaacttggaagctttccactcgaatccaaccatagagtagatgataagagaatagtacgtggtctgaatcaagacataaggtagttcacaagtcacctgggagatagcataaggtatagctgagtacatcccagcagctttttctctgtagaacactgttctttccactgccaccattggttgtactgttgagcagttgtttataccaacgaatacaactgctgcgtagattgctccgatcaccatcgttagatcttgtacgtttgatctcttacctccgatttgccagaagacagagccgatcatgagagatgttgccaatgtgaagatgaacctgacaaggttgtagtcaggagatctccaataagtccaccactgcttccatagacatgatttgaattgtccccatgtgttctgtgaaaactgtgtggcaaagtagagatcagtcgctccttggggaggcacgcttagttcttgcaccagcgccttgttccgcctgagacagaaccattcatatgttaattagttagatcaagtatcatcatcacatcattagcaaatatatttttgttgtgttcacttactggcataaggctgaagccttatatagctcagcaaagtcaactccaagctttaactcggccgcaagggagctagcttccagcatccaagtggccgggttgtatttttccggaatctttggcactccagggaaggattcaaagtactcaacaaccttgtgagagtttcggcctaagggaccagagtagatcacatgtcctcctctcttcattagtagtagttcgtcaaaggcctcaaagatatcaatgctcggttggtggatggtgcacacaacagttctccctgtgtccactgtgtttctcacagctctcataacaatagcagctgctctagcatccaaccctgaagttggctcgtccatgaagatgattgaagggttagctacaagctcaacagcgattgttaatctctttctctgttccgtggaaagccctgtgacccccggtaaaccaacaattgcatctctcagatccaccaactccactaactccataacttgatccacaaacatcaatttatcctctttgcttacttccttagcaaggcgaaggaaagcagagaagataagtgattctcttactgtgacttgtggagagtgaatgtctgtttgttcacagtaaccagagattctagcaaaagtctcttgtttctttgggaatccagatactcttacgtctccttctatgtatccacctgttttccttccggccaaaacgtccatcaaagttgtcttacccgcaccgctcacccccatcaacgcagttaaaactcctggcctaaatgcgcttgtcactccttttagaagttgcagcctcgtttcttgaactccttgttccctcatttcctgcaccatccaattctatatgagtttctttttttgtttctattaataataacaataagtttaactagttttcaaagtattaccgcaggcatgtcaacaaagtatttaacatcgtcaaatgacatagctagaggagtgaaaggaagaaccattcctttcttggcgctcacactctccatctcagtctcctctgttttccataaaagagtaaattcttaatattattgttttttggtttatataatgaattcttaagatgtaaacaatggaatatacttactattggatccagctttgcctttagcctcttcgtcttcttcttttggaagtatagcttgtgccttcccaagggctgttgtcatgatacacatataagtaacttacggtgacaacgaaaacagaatcaaaaagaaaagaaacttacggtctagataagtaagtgccaatgtaaaaaagccgttgaaaatgacagtaaaaccaagcaagcctccaactcctatccagtaccagttcttatcatcaaatacatcccaaatattaagcacacttgttcccaacctcgttgtgctgttgccagactgcattttttcaccagaagtaataattaattagctacaagctacaggctggtgatgaggacttacggagaaaagaaaatatgaaggattaccattttattcatccatctaggagcaaacaattcattgacggtgatggcattgaaagcgtaagaaagaggggatatccaataagcccatctccaccaaaccggaatctcacttcgaggaagaaggaaacctccagtcaagaacaccactagtagaacaaggacaccgccggtattagctatggtcatggttctacatgtagatgcaatgaacctgaatatcccagcagccatttgttggatcaagaatataatcaagaactgtttaaagaaccgttccgcatcgggtgcatatcctatggagtaatatgtcaccaccatccatgctgtagactcgaagatggagattggaatccctagcaagaaagtgggaagcgtgtatgtccatggtgggtgaaacaaaagatccctttgcttgtagaacacgggaagtctctgtatcgtcatggccatctctgcaagaccgttaaacatgttgacaatcattgcgaatagcagtgatccgacgtagatgttggcgtcaatctcattccttgtgtgcatttcagttctaaggtaaagtgttgaggtgattgcggcaatgatgatgatttggacggttttgaagacatagaagaaggagtttcgcttcatgagcatccactctttgtcccaacagcttttcagaagctctgttttcttgattgagtatttgtcaaacattagagctgctttgtggcttttagacttgtcgtacggtactgatagctcgttagatagtttagatccaacatggaatttcttaaagctgctggcaaactccgacactggaatgtatctatagggtctgtttggatcaacccaatactgttcttgatctttctttgaggtaacctgttccacacgtaaatgtaatttgtaagtcactttcgggtcaaatattaataccaagttaggtctaacggtctaatatatatatttacctcttgcaagaaatcagctgttccttttctttcagggcacttgaacccaaagctctcaaagaactctagaatatggtctctaggtccctggtacacaatctgtccctccgacaataagattatatcatcgaatagatcaaacgtctcaggagcaggctggagaagagatataagaactgtggcttctgtgaggtgaacaatctgttgcaagcatttcacgatttggaaagtcgtggagctgtcaagtccggtggatatctcatccatgaacagagtcttagtaggtccaacgatcatctcaccagttgtcacacgcttcttctgacctcctgaaatacctctcatcatgtcatctccaactatagtgtccttgcaaatgtcaagccctagaatctgtttcatagaacaataacatctatctcaacatatgaacactatataatcgtttaatcaagacaattatgtatttaaggttgagagggactcactttgagagtataatcagtgataagactactcttgacgccttgagcagcagaggccttcatgaacaaatcaacatcagcttctggaaaaatcccagcgtccttttctcttcttgccaactcatttaaaagatctgcatcaataacaagtaagattactcaatcgaccaacaaaaacaaaatcgatagttagtttgacaaaaagtctaagattataccgtaacgggtaccaactccttgacacctagcagagaaatcaagagtctccttaacagtcatgataccaacatgaagatcgttctgactaatgtaagcagatgttttaatgggaacaaactcattgaggcgataaccattataggttacctccccagagacgtcaagagacttgtcgagtttaccggcaagagccaacaaaagcgtggtcttcccggaagacggaggacccaacaaaagtgtcatccttgaaggtttgacgataccagaaacatctttgagaatagtaagttgtgctttcttggcaagcctaattccgatcatgcctagagcagcttctcccatgtttctcaccgcgttaagaagcgaaggaagagatctatcaccggtgtaacagtcagctttcacagtcaagtggtcgtacctcacttctactgtcggaagttggatcccaactctgtcgattctgtttcttagctttgtcaagatccgttcgttgtcctgctctgcgactttgaagaccatgtcgatgaacttctgacgttcttcgccgtcaagcttcgtgacgtcaactgctttgttgaggatttggttaccgtagacgtcgtcttcgcctaattcaggcatgagacttgtgcggagacggttgtaggtagggagtttctcgatggaagcccatttgagagcttcttcgtcttcgttgacagatttggttcgtctagagcttgtattgaatatgtcttccatgtttctgcttgctttgcttacactacgacttatggtttgccgcatactcccacctctgctcatagcatgagctggatcgtaatccatctttagatcttatgaatcttgatcctgtttctattaagttaagtgcttcttcttctttcttttagactattagactgataggatccatatgtgagtagaagaaacggatgatatgtaaatttcgttgaagaaaacagagaaagagataagcaaagatggtgtgtttgtcagtgcctctgcagcattgagagagaaaagagtaagggacaatgacgagtgcaagctccccctctggtgctctctgttattttatcacaatctccaatgaaaactataaagaaaagcaccacttgattgtgccttttaaattcttgtgattattatagtaatccatgcaataatgaaacatcttttaacaggatggcccatgtggaaaatgaaggatgcctagtcaatcatacacgagttaaaaattcgatttatacgtttgtataaggttggtgcttaatgatgtagacaggttgtctttttttggcttgattggttttgtttttcctcaccttctattgtcaacaatagagcaggtggcctttttaaattaataaaagattgacggattcaagagatggcaatggaccaatggtgataagaatgagaggagtgattagtgcagaacaggtatagaaaatttgggacttatgtaagaaattgaattagtctactacgattagttatatttggttatgacttactagtagacctcgtaccaactacacacaatctacaaatgtcaaagtaactcgttatgagttcaaacatcttgaccccaatttatggatgctattagctttgttaatcaagtaaagttatagtatatctactgcgtgcgtgattagttaaataccgtaattaatacgtaacacagaatgacagctatgtaaccgagtacaaatccctgattaaattttctatgtttgcgtgtttgtgtctcggtcaaaatcaatcagggcctttgccatcattttcaaatttgtgcgtttaaaatgctttaaagcacgtgtaattaactaactaattacaataatgtatatttgatatgtttagtaacgaatcttgtattggagaaataagggcctgggttgtcgccaacaaaagaaggtagagccttagtgaggattagctgtgattaaattatatacttatacatgctatgatagtatttgattaataatgtcagtaatcatgaatattaataaacactccaccacgcaccaccagctcatatgacttggaagattccccgcggacgggttccctcatcctgtctcgattgtttcaaagtcatttataaatattaaataatagtacagttatatgagtgtggttaaaataaaataatagacggtccaaaaaacaagcatatgggtaataaattagtgagtttaagcccatttatattattattatccattttaggcccattaacccactaaagctcactgaactctgaaggcatcagtgtagtagcaaattagctcaagatccttttcacttcttcttcttcttccttgtgcgctcgataatggctgcttccgatgattcctctcactatttcaccgagtttaccttgtctgaggttatctatgctttctatcattcgttttcttagattagagattcatgctttgtgatcttattgctcttcttattcgaagattgtagacatggagaatctgtataaggagctcggtgaccaatctctccacaaagatttctgtcaaactgttgcctctacttttaggtactttattctgaattttacgagaatttgatcatgtgaatgtgtttgttagagaatcgagacacaagcattttgtggatttataggaatagtaggattattgattttcatgcacagtatctaaaaaatctttatgtcttcttccattttctcttatagttgttctgtgaatcggaatggcaaatcctctataacctggaaacaggtgcgtctcttttttcttcatagagctaactggtaaaaaatgcaaatagagtagaaataacttttttttttgaatcaaaatgttttcaggtacagatttggttccaggagaagctgaagcatcaaagccaaccaaaatccaaaactttgccatctccccctttgcagattcatgacttatctaatcccagttcttatgcttcaaatgcctcaaatgctacctttgttgggaattctacctttgttcaaacacgaaaaggttttccttttcttgtgtgccatatttgattcttttagttaacgccttataacgcctatgaacattttcatacacaggcaaggcctctgatttagctgatctggcttttgaggctaaatcagcgcgggactacgcgtggtaagaacgtttccttgcattgaatatcatgtttctatttttgctttaactcttggactactgctagcatatgactttgttaagtggcctaagtaagaacctgaaatgtgaactctctgttgattgttaactcaacgaggaatgcccttacctattcagtgtgaacttaagaaagaacgttattcatataaagcctaatttttggacttgtaatatacgtttgtgttttatatctgtgcttatttgctggaattctggtctttcaggtatgacgtgtcttcgttccttacttatagagttcttcgcactggtgaactggtaagctttttctcttttgtttaatggatgatttgtttgcaactaagagtgtctgcaacaggaagtgcgtgtacggttttctgggttcgacaaccgacacgatgagtgggtaaacgtcaaaacatcagtgcgtgagcggtctattcctgtagaaccatcagagtgtgggagagtgaacgttggagacctgcttctatgtttccaagtaaggctgactttgatctaattatgaaggatggaacatttaacaaaagaaatttgaacttaaaaatgaaagttggggtggttaatgagcaggaaagagaggatcaagcactctactgtgatggtcatgttttgaatatcaagagagggattcatgatcacgcgagatgtaactgcgtgtttcttgttcgctacgagcttgacaatacagaggtaagaagattgatctcagcctttttgttgggtgtgggaactattgacgaagttttgtgttaagtgtatgttcaggaatcgctgggactagaaagaatttgccgccgccctgaagagtaattttttttggttttgaagtcatatttggaagatgcagtaaactatgactatatagtatatgactgacccaaaaatggaataacatgctcatgtatagacttccactactaagtacctaccggccctaggattctatgttagtttttttctgtcaactatgtggaataaagtgcaaaagcttagaattgtaaagggaatggtgatggtacaatgtaataatacccaaatgcttaaccagttaacaccctatgtaatgttcaacatacagtctcattcttgtgagcaagactatttctttctgtttactcattgcttcttgtatatacaatacgcaggtcaatacattttgtgagcttcggcttattaagataaagatgtggaaaaaagctcatttagcacaaaaactatttggaaagaaataaatctttgtgccgaaagtaatataactatcgacccgctctctgtattcaatcacacagcaaaggtacaacaagtatcacactttcaataatgctttctcgatacatatctcatcccaagatcttctacagaagaatccatttgcttgtaatggatgcaaagcagtccctatctgtttctccaagacaatcaatgtgtactcactcttttcaacacattgtttacttgttaacacaacaagattcgagccaagaacaagagagctaaggagacacgggaactaccggttgagccatctcctcaatcgggaaacaactccctgaggaggaggggaaggtggaataagaacatcaagaatggtaactctctcttttggagtcaatggtacacctctaataaggttcaacgccatgatgtctacatttttccttagcctgtgcttctggtaaactattcctgcagcggtacctccagcaattataacctgtcacacaccaaaaacaagagtccattaaacctccgtccccatggaggtttcagttgttattgacagcttaaactgaccggtgtgagccacaaggctgcggtctgcaaatcaaattttggggcataaagcactgtctccccaaattcatcctccagcttactgtagatctctttgtcagtttttccagctcctatctcattacggatcagctacaaaactcaggtgtattagaagagtagacagcaaaactatcttcaacttaatctttggaagaaaaaacggagtaaaggacacacctgtctaaggagaatagcgatatctgcctgcgagtcttcaatggactgacttccacactcagtgcagcgaacattgtggctaatgtttctggcccgagcgtccagcatctgagccttcttcctctcttcgtctgttttctccattgcgctgacaatttcatgatatgagtattgtgagttttcacacaggcatttcgtcgaacactttgtgggcaacagaggctcagagacccaaaacgtaaggaacgtaaattaagttatgaagggagaacctgggtggagaggaagcaagagaactccgagaaaccgcttagttcgttcaacgtggagctcaaaaatgaaacctttcgcttgggaaattactccgtttactagtaaaaagtaaacacccaatcgtcctccagcaataatagcgccgatccttctcgacagagccgtttagagaagatgccggtggatcttcggcgggtgaacaaatcggatccgaatgtgaaatcgaaaaggcgcgtgaaagagcgtgcgactgagagtgtgtccgaagacgtttcgcgcgtatacagtgctcgtgggcataataaacatgggcccttcaaatatataatttgtttgaaattgtaataaacatgggccttgtaactgatagaactatattctatcagtaactgcataaaactcactaagagaagaccaacactctttggagtccaaatgaccaaaacaaattgagaagagaaatatgagatgaaccaaaacaatgaaacatagaatagcgtcaggaaggaacaatgttacagaaacaattaaaagaaaaaaacacattctacaataggagaaagtgagggtgaaacaaaagcaccacactgaatactcatactattagctgaattagtgttggtgatgggtctgctcttcttcttcatcacccgtttattttacttggggtctggagtcatgggtgaataaaggctagagggggcagagccccatggtgccgatcattgatgactcactgtctttctaaatcattttgctatgaaggcagcctcaattctgatattatggaactaggcaagtgggcattatctgtgatgaccaataaagcatgacataataaagcatgacatgttagacaagaagaattgcagtgtaatatttagttatttacattcatccagacatatcataacttctaaattgcacaatctttgcctttctgctaaagagcaaactcaacaacagagagaagccaatctttctcttttcagtgttctgtatatgaattacacaaaagctactaacaccaaatgtttaatctgtatatgaattcgtttgacagaaggagagctgagcagtcactaacaagtaacaacaaactatacaattcaatttgggatttgattctgcaagacctaatagagacatggctactacttgccaacgatagcatttcgccctgctttcttcttgcatttgaaactgaatagcaaaaagagaatcaacggttcgtgaaataggcgcagaaaaagcaaatcgcaagagagaagctactttattggcccaaatcctatttcatccagttttgtgtcttacaggcgatacataagctttgccaccattgccaatggagacaaagttcagacatttaagcaccgcacaatcaacagaagcaacgcaaacggatttgtaagctgtaaaagtctaatactttttatttatatacacgagggaagaacacttctgacaatgtgaggactctcagacaaatccttcaaccaagatcggtttcatctcctcttcttcatcttcatcactctgatccttcttctcactgcttctctcaataccttcaacatctagatccttcaaaccatcaacgcagctcttcccttcttctccttcgccagccaccaccaaatctccggcctgtttcgattcagccaacttctcaatgccttttccagctaaacacggcccagtatccctttcattgtctcctccaacgataatcttgtctgcagtttccggaataggatccgctaaacaaccgtcttcctcctcgtggtcgaatatcgacgctgcgcgagacttcacggcgttagcggctttgcgaaatgcttcctgaatagattccggcggcagagcacaatcctcgagaccggcgtctgcaagtgccggcgggaggatcgtatcgagcaagccaactctttctttcgtagcctccatagatgcagagagattcagagctctcttccctgaaatgtgaatgaaccctaaattggataattaaatcctttttccgaggaaaaggcggtgataagggtattccagtcattatacttcattgttggatctaaattacaaaatagcccagtgttttagtgagcccaaggttcgacacctagcgagatcatatggacttgattgattgcccagtgttttgttaataaaaataaaccattaatgaaatgctaacaacaacgaagagagagaattaaaagatcctcctaccgtattcccgggaacattcgccggagaaacgtacggaatcaacaaccttccccgggaaagaatccattaccgccgattctatcaattcgtataccgtatttgactacccagccattgattctctctccctctcttcccttttcattgtttctaaaccagctcatctttcctgatccggacgtttttcgaagatcgggtcctaattccccgggaatgggtccttaagttctggaagaaatccgtccgctctgtctggtaatttcattgaaggacggattaagcaagcgtgtgtgagatcagaaaagacggattcaactatgagcacccagaagcaagtggtgactattcgggacctggtagatgaagccaagaaacgaattgtaatcgtggtcatatgcgtcgtcggactttcctacctcatgtcccgtaagtttggtgttgttcttatttgatcgatactatgaactcttcagttttagtttatattgaagtattggttcagtagctacttatatgaatttatctcagcaatctctaatgagtatttacgtttgtttaaacttctgcagtgacaagttcatcggttttggttaaccttactcctgctgtgttattgatcatcctttttcgttattacactctcgatagtgaaatgaaaagaaaagctgcagcttacaccaacaagccatcgtcgtctctgaatgcaccaactctaaacaaaacacctgaactccctaaagcagctccacggtctgactggagaagcaaagtgaactctcaagtcgttgaggatgcaattgatcactttactcgtcacctcatttctgaatgggttctggatctttggtactctcgaattacaccggataagcaaggtcctgaagaactggtgtttattattaacgatgttcttggggaactttcacggcggtttagaaatgtaaatcttattgatctattgacaaggtctgttcttcttagtgtcttcatctcattttgagttactgataaggtagcttcttcaagaatctaaactgttgtatttgatttagggatttgattgatattatatgtcgccgtgtggagcttttccgcgagtgtcaagcaaagattgagagacaacaaaggagaagcctcagttttgaagacagagactcagaactaagacgtgtgatggccagtgaagataaattgcaccctgctttgttctctcctgaatccgagcataaggttttctgtagtctaagttgcgatgagctgttatttagatttgtttgatgttttaccacttattactatcaggtggtgatactatggtctctatttggcaggttctgcaacatatagtgaacagtctcattttagtaacatttaggccagaggatctgcactgtgcttttttccactataccgtgagggagctttttgcttgctgtgtgatccgaccagtcctaaacctagccaatcctcggtaaactattgcttctttacatcacattttgttcctcttattctcacctcaacggtactcattttgtcttccaggttcataaatgagaggattgaagctgctgtaatgtcaaggataaagactactatcagatctagtgctgcagaagaggcttctcagtctgaagatctctcaaatgtttctcctgatcatttttctagatatatggacccctctgtcacaggtgttgagcttgtgcagttgaaaaatgaacagcaaaaaaattctaaaaagaaaagcgctacagataaacagcatgtaaaagagctctctaaagatccattgctttctatggacactcgatcttcccgatcgtggaactctttcccctcaacatccaaaataggtgatggtagtaaagatcctcaaggacatcgaggaggagagggttggggtgacgtgttagacatgatgtcacaaaggaaaactgagacccttgctcctgagcatcttgaaagcgtgtgggcaaaaggaagaaactataaaaagaaggaaggtgggaaagttgatgagcgcgtgcccccgagatggtctagcaaggctggtgactgcaatgaaaacactgtgaatgcaagagagtccagtcagcgtaaagttgtaaatacagacagtcatttatcaagttattcctctgctgaagaggatgaggagcaaacaaagagtagtcattcttatacatccgaggatgaggaaacggtaacaggtctaaacagtcctgggactcgtgtctgggatggtcgaacgaagaaaaatcttggtgtttcacggatacaccatccacttgaaaattcaggccgttctttaaaaaagaccagtaaagggcatgaacgttatcagcaagtacccggtcatcaatctggcaggaagagatccagaatttctggtcatattatagacgatgatgatagtgatgattctgaagatggttctttgactagatcatacagtggaatgtctgcaacgtcatctacatcatacgtttcagcggcagaaagtgaccttcccaatgcccctaaaagttctttgttggttgattcctttgcgaagttgagatgtgaggtacagttaaatgtcggttccaaacactcataaagctgcagacaattatgtccttatgctgtatcatacgatagataaatttaggttcttcttacaggttctgggtgccaatattgtgaagggtagttctaagatgtttgctgtgtattcagttgcagtcacagatgaaagtaatcatagctggtctatcaaaagaaggtgatcgaataatattgctacggatctgatgttggtgctttgtcttttacaatttttaattatgtgaactttcagatttcgacattttgaggagcttcaccgacggctaaaagtgtttcctgagtacaaacttcatttaccgccaaagcatttcctatcaacaggcgtggacatacctgttatccaagagcgatgtgtactacttgacgagtatatcaaggtcaaacgccatgtctcttgtttttaactatctgttcatgctttacatggtgtattgtatatggagtatgttttatttttctactggatttgtttttttgatgagtagtttaccgtgaattagtttttggttttcatactctggtagctactttggatttctgagaagctaatactgaatgttcttatgtatgaaacttcaccatctactgctctgtaattttactctgaagtctgaagtttagtcaggcttgctttgatctactgaagttatgtacctttgtagtttgatctgctcaagtagctaaggctgatagttctaatgcttgaacttttgtacacagttgcttttcaacgccttctattcttccatgttaactaaatgtgaatgtttgctttgcattgaagtgattctgctgttttccttattctgcgtattatcctttctctactttgctcagaagcttttgcagctacaacgaatttcaggatcaattgaagtttgggacttcctcagtgtggattctcaggtagattctcttctgctgattcaaagatcactagtgctgacaaattttgatatgtaacttggtgctgctgtgcagacttatgcgttctcaagttccttctcaatcattgagacgctaacaggtgagtaatccacaacgcaattagatttttgattttagttagttcgatataatttattgtcactagtaaatcgtttcagttaaacctgtcaataagacatctactgtcgctacaaatatagcaagtatgactcaggcagcaccaggtccgcttcctcggagggaaaatctgagttctgagaatgggatatcgggtcaaaatatgaggaataacgttatggtggatgatgtaaagtcaaaagtgaaaaatcttggaaatgatcatgtgaagacacctgatgtagatgtgagaaaccgcaaagagaatggcgggctaaaagtgggtactcaacatgccgatgatgtggcctgcgctggcctgcccaccgaggtatatccacacctagcatcagccaatcgaatttttctgatattttatcttttgcatcgtgggaaagcatgaggcaagtgcttgtatttcttgcagtgggttcctccaaagctaacattacccttgctagacttagtagatgttgtctttcaactccaggagggtgggtggatcaggtacgtaattttataaccagggtccaggggacatactaattttctctatctcagtcaagaaagtggagtaattctgattatttatttttgcacgttacaaggcggaaagctttttgggttgccaaacagatacttcaacttgggatgggggacgcattggacgattgggtacttgaaaaaatttgtcttttgcggcggggaactgtagttgcttctggaattcaacgggttgaacaggtgagaacctccactagaactccttccttttgcacagtgagaggtagtggcgaaagtcacagtgaataatggaaaaagtatgcctaacagggatatatctctgtgatgtctttggtcttgttatatttcaatccgtggtgagatttgaaagagctctttggtatgacctctcagatactatggccggatggtgtattcatgacaaagcatccaaaaaggcagcaacaatccagcatttctgaagaggagcagaaacaagaagcagagagacgagcaaagtttgttcatgagctgatgatcggtaatgagcgtcctgttatctgattttttttttttgcatcaatgattgcgaagcttaattgaactaacataaatgtttgaaataaaccctcaactcacagaaaaagccccagctactatagtgagtcttataggacaaaaggagtatgaacaatgtgcagaagatctttactttttccttcaggtaaacattccacttgatttcaggtttgtgcgatgcttacatgcatttgatgatttcattgttaaaattattcttgtttcagtcatcagtgtgtttgaagcaattggcgtttgacattttggagttgttgctactatcagcgtttccggaaatggagcaagctttcaaaaaattgcactacgaaaaacacctctttggtcaatatacaccaccgaactgatacttggattttcattgtaatcatcttccatattacgtggagttttgctagaattctttaaacagtaatagcacggatgcatttcattgatgagtgatcacactatcagaaataggattgcacagtaaaggaagtacaagagcaaaaaagataaacaaacgaattaaaaaaaaaagctacatagcaagaaagagatggcaaaacgcaaactgaacaatgcctaggaagacgaagctgcagctttgtttcttggggtggcttgcgtacctgattcacagaattccatcgatcagattgagcaagtcttagattatatcaaatatttaagtgaagcaaagggtgcaatgtagctttaccttctctaaagcaagtcttgaaccttcgagggacattacggagatacctcatcctaccagttcctgttgtctttcttcttattgccttcacactccagttatctgcacacaaaatcataaattccaggactctttcatatatctccaattctccatgatcagacccaaaattccaagacagagacagaaatagagagagagtacatacatgtcctctttctggcagctggataagcacatgccgagcaacgactcttctggatgtgaaagctccggcgaccacatctcacacagagcgtgtgtgacttgttcctcctcttaccaaagctccctgttcctttaccctgtcatttccaaagcaccggttacacataagtcacacatgagcttacatggaaaaaaaatgccaatagattaccattgccgcagatgcaggggatgatcaaagtttgctctacagaaatctttgcggctccgagaagacgactgtgtagcgtcctttagggtttttcctacccaaaatggatcttcattggttaccgccaaaaatatgggcttcttaatgggcttcatgggcctggttctgatattacctcgagtcaactggcatacagtatatataatatgagtagtgagtggtggtggcaatgataagtaggggaccaattttgaacactgcttatcaatgtgatgacgattgcttacctataaaagtggacaacacaatcaacaagatgacaccttcttaaagtctgacactatcagcttgcttcttcaactactacatgccactaaatcaatgttaggtttccttttgagatccctagtgacataaatatggttatcttctcaaaaaaatgagcagcaagaaagatgatgaaacctacatcaaaatcaattcagagagttggtcgtttcttaaagaagactcttgggagcatcaagtccactatctgctctagtgattacaaaaacttacctaacgacactcctctcttgagcccttactcctgcagccgccgctgtccagaagattcccaaacccaaaccaaagaaagctacaccgttatctgttgtgacacggctgtggcagatacaacacaccagaagagtctcaacaaccaacataaaaagaaaccgaagaaagtcgctgagccattcgaggatgcaaagaaaagaggtgacgcgttggcgcaaaagatgaaagatctcaatatggtggatctgagagacgtggatcacgcattggatgtaagggaagcgcttcgatgctattcaagcatcagaagtcctgtgtatcttgacattgttgacaatttcttcacagacatgtattacgagttctctgatcctcgtacctctgctaagatcaacggttcaaggagaaaggcaggctccttcaggctttaaagttcctctggatcagctttgctttcacgggctatctgtagttctttcatctatagagtatgcacttcttaagaacagtgttaaccattacacacaccgctttggtaaaatcacctgtcaccaccctcagtttctacctcatcttgtagagtcaagttacgctcctattctcaactactatcaatgcaacatattttccacttcaagttatgacaacttacagtttataatactatatctgaagatagagatgtgacaccctactactcgattcttgacaaaatgattttagggtagataccacttttctttttcatgaaaaaatggagaaagcaaacatatgtatggagaagcgaagttactcttctcgaattatgataaaaagttacatcaacacaggattatctgtttttttcacttgataaatttgcattttaaaacacacttcatggataaaacggatcatttcttgccactcttcttaagtccagaacctccaaaggatcccttctgcgatgccttggctctaagctctttaagggcctgttttatcattttcattcaaaacaaaacaggtcaggctttcggtaacaaatgatcactgtacttctcatgcgaaagaaaggctaatgagtctttcacacaattgggtggaaaaaaagtagactaaacatcctaacatgggcaaatggtcactatttcatcaaagtaagaagaaactagtccatatcatctcaaaagaatctgtaatgaatacccctaaactaacaaataattaatagaaatgacccatctagttgtagtcaccagctataaagtcataattagagtcagcttgattagtagaccaaactgacaaagtggaacatattaatgcacaacctttacaaaacctttacaaacctatgtatctaaacagaagctctcttgtgaagatacaatctttgattcgtattttatagctttccattgaaagaggagcccaaacatataagtttaactagatgcatttttccaatcacaaaacttcatatgaacaaaaagagaaaacaagtcagagcatcaaagtgggaactcaccttttcctcatctttcttcttctgaatgttagctaagtcagtctgcattgataccaaatcaacatttcagcaattagagaatgtctaagagtcattaatacacaaatagtatgcaaacaaaatcaagtgaagaagtcaagactgtgcccttaaaaacactggatcaaaattcgaacttgcgtataaatcattgaatccgagcaaaattaatgatttatgagtcactgaatgttaacaaattttaagaattcaagttagttggacaatcaaaaccagatccagagcaaaagcatcgtttgattcgaggtctaaagctaacaatataagccgatttagctgaaggcaaatcaacagaaaatccaactcttaaaagaaaaaagaaacagtagagtcacctcgtcgtattccttcttatcagctttaggctgcttcaaaggtttcgcctttcctcctgtttaaaaccaaaataagatgagcagatcgtaaacgatgtctctaatcactttattcggtgaacgaatcaccaactcaaatctctgtataacagcaacgtaccttgcttggaagacatgattggttcgttgagctagggttcgatgttgagctcaaaattggggaaaaagtagctgagagttgcagacggtatcgaatctctctgattggggctacggttcatatttataatgagttcgtagtaacaacgcaacctattaaatgggctctgaaagtgtatggcccattaaaaggcctacaaatttctttttgggcccgttaaatacctttatttgggtcaacctaggtcacagtcgttatatttaatgcgcgaaataacaaaataaaatcgattaattaacagttaacaaaaggtctggctccattcgatttcattggaaacccccaaaatcgctgaagaacgcctctcgagctcagatagggtttataggtatgcgcgagctttcttctacatagtcgattagtacggagcgcttgagcgactctttcgatttctcaattgaatttcttcttcatctaggttttggatttacgagtaccactctcctttttttcaggtttctagagagaatttcatggcgacatctgaagcggaatatgagagtgatcccgaggagctgaaccgctccttggcgacgaggaggagagaagcgagtgatgacgatagtgatgatgatgatgctgttagagatgtgaaaaatcagagggctgtggttgattctgacctatctgatgaagaagttggtactgtgaagtatgataatgacgaagatggggaggatagttatgaggatgatgaggaggaaagtggtggaggaatcgataatgataagagtggtgtggtgaaggaggctggtgatatgaatggagaggaagaaaatgaaaaggagaagttacaagctgctgttcccactggtggagctttttatatgcatgatgataggtttcaggaaatgtctgctggcggaaacaggtttactctctttactgtgtttgtttttcacagctttctcaatcaattctgcttcaaaatctgtcactataagctatcaagtatcaactcaaccttattatgcaagggttggatttttcaaagtaggtattaacttaggatgaaattgtatttagaggagagataattgactctaaggtggagttattgacctcttattatcttgcaattttatcaagcatgaggggtttgagtagctgcattggggattgcttagttcatactattgggaaatatgattttttctgaatatagctcttcctctctaccttctatctgtcgattgatatagttctttatcttgctttcgtaggcgaatgcgtggtgggagaagacagtggggctctggagaggaaagaaaatggggacatgacaaatttgaagagatgaatactggggaaaaacattctgatgtaaagcttctgtctatggtttttagaataattttagattcctcttatctcttaattgctataacatgtacatgtgacatatgttagctttgttgtatttatgcactttccgtctcttatctttttcctttctttcttaaactgcatttgatacacagcagaggatgtctagaggccgattcagaggtcatggtcggggtaggggacaagggcgtggatacgctagagggagcagttctaacacattaaccagtagtggacagcaaatttatgttcctaaagctgtctcacgagggagaggacccaggaaatccgacactcccctgaggaatgaaaatcaagcacattctgagcaaagcaaacagtgagttcttaaaaaaaaaatcccctagttgagtgaagggttttctctattataatgtacttgtgtactgaatttgtaggttacgaaattctaatgggtctcaaaactctcgtgagaaaatgccacacctcgattcacggcgttcaccaactgcccctgctaaaactgagaatcaaggtgcccatgccaaaaagaatgtagctgtgtcaagtttgagttccgcttctcctccattttatccttcagcgccgtccagtaatgtggtacatggtatacaagttagtatggaaagactccacacaaatgaaagtgtcacgccttctgggaagaagtataggaatacaaaatccggttattcaccagtttggactgccaagactcttcagtccactagtcaaggtagaggtgcacctgctgctgggaacacgttttacccgcaatctcatagtcaaggtgacagattttcatcaccaatgcaactcaatggagattcaaaaggcactggccaaagaccttccggccagggttttgatcagcactctgctgttgttagatcattgtcttcctctccccagaaaactagcttatcaagaaatcggtatcctcctgatgaaatagaatcttcatcggaaacagctgcattgattgctaaaggaaaagggactctcaggcctggtggaagcagctcttttatgtatagtggatcccaaatgatggggcggccagaaagtttgacatctgctgacaattctaatttccctacttttctgcctggtaagttttttggatgacgcttttctttgtaaaatggatgagttgaaagaattttcagtttcaaatcatgcatggtggtgaaattgaaagctattgacgccgagccacctaggcctggttgttcatatatactattttcggagtcctgttgtaccagcttggggagattattgcattactttctaattaaattcaaattgaaatgcagttatgcaatttggtggtcagcatggtggggttccgacttttggaatggcttatccaggatatgtccagtctgaagatggtgttagaaatccggagatgacatggtaagctagctccttccccttctcgatgaactttgtggatgctagttttcagaagttcttggttgtaagcatttcaaagaattaagaattagatatcgtgcgtattggttgctgaatttccgtcttatttgtgtttttatatgttgtccctttaatcacctttgtgcgggtctacctactggaaaaacaaaacctgtgatggtgttgtatcattagaatgtttactttcattctggatactgtgttggttgaatgctatgagctcttcatctatatgactatatctagttcctgattttattctttcccctgcttgctgctgtgatctctttatatgattggcaggatgccagttttagctggtccaggagctttaggggcttcatacagtccaccaccatatgcggctcaccaagcacacaacccagggttaccttcctctgcgggattctccaggtttagagattaattgccttcgttctcttaaatgtttttaatgcaaaaacaatgttaactgacgcaaatttgcattgtgtttttctcttatttaaacctactacatatgcttggcatatatttatatttgcaaagcatggatttttagtttgcttaatccagttactatttttgcagcaaagacagtagcacaaatacccttaatgacctggtcaaacccatggaaagtcctggttagtcgtattgcaaaacttgctctttctgttataattctaatggttacacatcaggtgtttgtgtatagtattacgcttattagggaatgaatttgcattaaaagaaagaaatcataatgaaagactatgtggttggatgtgatagataattagtacataagcatctggaaatgagatatgggagatgatgtttagggaatgctgtttcaataagcactttttcaaaatttgtctttcctattaaaatcacgaaatgagatttgattgtgggatcattatatctgaagttaagctactttccatctgtgtagaggttgcagagaatggggtttcagaacggcaaagcaacaatccaagcaagcagcctcgtaggtgagcttttgaagttaactcgaacctactctgtcaaattgatcattggttgatatggaagtaatggaaccatttaggattagggaatcaaattgatcatgggttgatatggaagtaatggaaccatttaggattagggaatcatgatgcattatgtctacgaatttaacttggaaataactacattcatagacttaaggttgaatatcatataggattcatgtagagtaagttttgtgcaatttgatccgaatagccgctggagttgtcattgctgtatatacaggtactcggagatgacctttagcaagtgaaaacatttgtgagaatttaagaagggactttagggacaccttggcgcagggctatgttgcttctccaagctttgttacagaacacttttaaggccgcaattgttcctgaaaatcttaggtaagtgattcaaattttagttaccggggatagtaacagggtaatagaaagtggatgtttgattgtgcttgttgttcttgttgcagttttataagggaagggaaaaaaaaacaaaagataatagtaacgactactagtagcaaatagaatggagaagggacgtagtggctcatataaagctatgggagatgtaatgtatttgtgtttcgtgttttccgtcatctgcttgtttggtattttaccattttaagctattttcaggagactagttgtcctaaactttggtcagcatcctgttttgtgtgtctttttttttccgagaatctaatctaaagtctctcttttgagcatgtaaatatttgtcgcaatgttatttcatttgttttcttcctatggaatcacatgaataggagcttgctataacaataattgcttcagaaactcggaaattcttagctttcagaccaaattgaatgctgctttttttttctttgctcaatgggaatgctttcgagccttcgatgatgatcttttgatctcacagttccgatgctgctgaacatctgaaccactcaaatttcagtggttctagatagctgaggtgcagtaggaatgtaggattaagcgccagtaagctgtcttcgctttgggcaagttataattttgaaccgaccacacaatcaataggcgcagtggccttcccaattggttttgaaaaaactggtatcagattcagattgtccacctaaaattgctgtagatttctggactataatagaccagaaaaaacttccaaaatctcagaaacaagacaactagcgacgaaaaatttacaacacaacggggtcaagctgcacctagagtgcaacataagaatagaagcaaccaactacctatcccaataaaaaaaagccaataaaccaaatgagatgagaatattctctgcttcacaagaagctttattttgttaacctgatgaaacccacttatcagatcatgcacaaactgacgacggttgatggtacagcccagccgcaacatttgtaagtcgcaccttgttcttccttctccttttctttgccacaatcacaaacccttcacctccatttgtctcatttgcattcgctccattctcctcttctctactataaactatctcggttactgcactatccttttcggaggtacctcctgactcagcttcggggctcgttttgctaagagcagccggaacctctttctgtgatgactttactatgaagctggcaagctctcgcttcttcaaatcaactgcatctttctcagcctttaggcaactgctggagtcgacggatacacttgcatcttcacctgcatgttgagagctattctgcaaggatcttctcggaacaaactctggtgcatctggattcatgcttcttggcgtcccaactccatttgagtgaatagcactataatatggtggtgagtgaatcccacatgaaactacagcccaggaaatagggtctgcaaccataattgggtagctgcctattgttgctgctgagctttgcagatcaataaccaagaaacctccagggttgtaaggctctgcggaggctgatagctttgtccggcttatatcagaagtttttttcccacgataggaccccagatccccttcagactctgacgttaagttttccactgactcagcactttcttgtgattcttgtttctcacagtgaagctctgtgccttcgattggcaaatccaacattacagtgtcggacttgctttcttctccagatgacgcacttgaagtcctgtatatctgagtttcagttctctccaaattcagttctaatttttctaacattggcttcagaactgtacctggtggtgccaaagcaacctctttgtatgagagagactttgaggccaaagtagtactggtcacagcagcagcaccagaagcctttaactgtggtttagttgtatttgtactgacatctatctctgcattctttagagccctacggggtgatgacttagagagggagggtcctttgcttgttttctgcaagggagaatatatattctgttgctgaacatcctgattcctgttgtgatgtttattaagcaacattctctttttcataagatcaggctgcctttgtctggatttccttccagcaccatttccggatctcccctttgagtatgcctcttgccagccctcgtctaaagttgactcttccacagtttgcctgtctacatttagcctgtgtactacaatatcacctgtctcaatattggtcttatcaacaactgtatcaggatcatttacttcgctcctactcttagtgacatccgcttctgccacattgttccatgtaacaatgtcaatctgtgaagcaactctatgggcgtcatcatcagctgatgcaaccttatcattgacctgtaatatctgtcgaaacagaagtaatgtcacaaacctttgacaggaaatcctggagtgatatatctatctcattcttttcgtttcaacatctcacatgttttttctttggacttctagtgcatggaatgcctttaaaatttagatcaatattccaatttagacatacatctagaataccaatcagcatagttcaaacttttcaagaagagttctacacaattgacaggttttttattcaggttattatttgatcaacaaaatccaaaatgagtgacctgaggaaaacaaggatattagagtttaggaattaccctggcacgccgatgtttcctgtgagcaacatttcccttagtgtctggatcagaacttatatagtccaggagatctgatacactgcaagagaaggtcggactttggtgccaatgaaataattaccatatcctttatgtgttctaggagtttccattttagtacctaaggtggcctttgctcgcgatggaagcatcaggctttgggattccatttcggcctgcttcctgctgctctatggctcttgattcaaaatattcgagccatgcagcagcatcctgtgagagacaaatggagaaaacaaacatgtatgtctcagagttcaaaacgttcactttgttactttgctagtaagaaattaatattcgtctgagatttgtatgcgaatgaaccagaagcaaatcaatcacctgtgtacgaaggtcatctgctccaagttttgcagtaagtatctgaagtgtagtttgttcatgttgcacactcaatgaatgtgcttccatgaaagagagagccactgctattgcatgatagcttgccgcagtctggcaaagtaaaacacagaaagcatgattagtttaagaatgcgcgcaaattgaggcaagatagataagggaggaacctgaatatggtcagctcctagcaatcttttattgctctttagagcttcatgcaggtaccttagagctagatgatcattccctacttctttttccatcatagccacattgatatatgtggcagcagtatttgggtgagatagcccacaagtgaagtgaagaagaaacaacgcccggttcacatatctataacagataacaaataaaaatggttagaaagaaggcagatatatttaaaaggagccaatcagaggaaaaggttggaccataagccattccaaggcaacaagacaaaggtaatggaaaagcaaagtagtaaggttccatctttaatgactatataactataagagatcatcatgtataacttactttagtgccaattcaaaatgttgaagacgatagtaaaatacagaaagatccccatagcttttcatagtgtcgggatggtcgagaccaagttctctctcatttatatctagagccttctgctgatatattgttgcctgatcaagagaggataaaaaatcagagatgacggtacctctcatcaatttatttatatacagtgcctagaacgagaacatcaaactctctatttgttacttgaaatcaaagtttccatttgggaagaagataaaagatgatgatacctggttaaaatcgccagtgtggtatagtacaactgcgagaagactgtacgcacatgcagtatttctatgataaggcccacagacagcaatcatcttgactaatgcctaggaaatgcaagaagtcagcatctcttagataacaattcagttggttagaatgatgatcatgtagctatcaaaagaaatgacacctttgttccatagctcacagcatcatctagttttcctttgtcaagagcaagttttgatgactccaagagtgtccttccgtcagatgaaatacacagcacatgctgttcaaacgaacatatatcttaaagattactctctagaatttgaaccataaaatcgaagcagccgtagataaataacagattgtgaccgaatctctattagtcaaactaaaattggatcatggagaggcgaaccttgcacacaggtaccaatccaataatgtcagagctcatgaaaggatttggagaatcgaagtcaaaatctcttgaaactagttctaaaccaacctgtaaaagcatgaaatcaatagagaactctaattttgatacaagcagcagtaacacagagctactttaccttctggcagagtcctcggaggatagaaaacttttttaaatgatggaactcatctttctgtatccaaccaaattttctggagagaaatttctgtagccactgtaatctgagacagtactcttcaccggggattctatcgcacccttccaattcacggcggccaagcataaaatttaatgaagcagctaccgccacaggtagctctgccatattattaacagatgcaataaccgccctaagaagatgcttgaaagctcttgtaatcatctcatgaatacagagggactgtatatgaggaagtttctcagcaagtttagcctgattcataggtatagtggaccgaaatactcattaacatctatttaccataaactacgtccgacctcaacaaagtcccttgagatcaacaaactggctttattctttcaaaatcaaaataacttgaaaacagggaaaggcgctattaacaaggtaaagcattcttaccacatgtcctagagaacgcatttggagtcctcttatatgcatgaaatcagtcaaagtgcgaccatcaactggagaaagctccagtgacccgaaatctgctacctaataaaccattacaatgattacttgatatgtatggttatatatattttcagaaattaatatccgtaatctaactaaagacataccagccttggcaaagcaatttcatcatagtaaccatatgccatattggtaagctcttcttttgactgtatcacaaaaaatattcgagtaagcaccacggtgtccgtcagagaattaaaaagaaatcataaataaataaaaccggaaactcatggcactcgtggttgatggtgcaaattagaagaaaaactaacctttaaatggagaccagttccagtttcttttaggcgagagaaagcttcttcagaaagcagttccttcagttcagtaaagagtccatcaatgcttttctgccctagatcatcctcctcatttaactcgtgcagtctggtatctttttcattcacggcacttatattttctgatttcttacttttgctctttagatctttaaattgttttcccaagcctttaactgaaagttcagtttcatcattagttgcaggctttccacagacgtctgtttctttcttctgtagatgctgaacccaggtagaaccgagttcccatctgatgggtcttacagaagatacccttgtttcttctaactttgttaagttaatttttactaactcctgtataatacatctataagattctaaatcatcccaatcaagctgtgtgggctggttctctacagatgttccaacactatggggcctgtgaaactctacccgtaagctgcaataaagttaacaaccaagatggaaaacaacaagttagatgctgaaatatgtcttttctcaagggatgagaacaaattgtgagaaagtttgttacttttgtaaacaccgcaatgttatagatacagtcggaaaaaacctttgataaattcatttaagaattaatactcaaaaagtaatgaatgcaagagaggcccttaacaaaatagaaactttaataagaacatgtacggtgtgcaaaatacgcatattattaaaaatcttagggacacatacctgttaaggttaagagcattagctcctccatccggcaggtcatcgattaaaatatcacggaaatcagacattgccttctgagtttgacccttgacatttaccaccgcagtatatccacactgtcttacaataactttgcctaaagccggagtatcctggatatttttttcttcactggttatagtctttagaagaaaacatacatgcatgactactaaatgcactgtggatgattacagctccactctaattcagtcatctaagaaaactactacttgatgagagagtggagctaaaagtatagctagttcaaggcctacaccatttgcatgtagataactgaggaaagatgagaaaatacttacatgaacaatcacactctcatcagctgtaatcccttttagcaaattcctttcagcaagttcctcggatgatagaacaaatgcatcattttgaaatgtagcttcaggctttgagtcaaggctggctatatcacgttttacaacaatagacaaatctccaacatgatcctcaagaaggatcgagccagcaggtaagtcagtagtcccacttgtttgttgattagtatccatcacgttgcaaatggctctaacagctctttgcactgaggtatcaataaactggctatgaagcaaaaaagctttcttatctcgaataactctctcctcctcagtcttgcaaggaagcgtagctaatacagaaaactcagccgcccaaggtcgatgatcatattcaccatttctcccctgacctccaccattcccgccccaatgttcatcctctgttggtaaaggagaagcagactcagaaacaggagaaggtacaagccatgtgtttgagcgtaatccaaacgggaggttgccaaactgaaaagccaatgaaaccaaacttcaaattgttgagctcaaaaagacttgtagaaataaaatcattaacaaagaaaacatcagccaccttattccgatcagtgaaagctttcattaaagattcatatgcctgcatcaatccccagtacaatataaagttagttcctttgtggcaaaagtagaaatatttgtaatatgcaaagcattaaggtaataataaccttggcaaaagcattgctgacattctggagcaaatcaacaatggaatgacaatgtgagagctgttttccaacggcgaagaacccttttacagaagcaatcacatgtataaccttgccattgcaaatcttaaccttaagtccaaaatagtcaccatcacgcttctctccagcttcttcaccatcaactttcttcaaatctgtcgaagacggagaaagatgaaatcaactcacttgtgaaaatgagtatcaaccatagagaactagtgagtgttaaacttacgaagaatcggaggagataggtggtgaatggagaagaactcgtagaactgagaaagtttgggtgtggtgtggatagcgaccatgtcgaggccgtccggcgccggtgtcggattggcattgccggcaacgatggatttgttgggagatttggagaagaacctggtggtgcatgctacaatgtcgatgactctccgtacctgagtcaacgcctgactttcctctagatactcctctgtggcataaacgtaaatattacaaactctaagggcatcgatcagttagtaaagtacagagtctctttaacaattaaacaatgatttagtagtgatatatctcactgtgtcactgacactttctgtgccacttctagaaatgcgaatgttgtgtttatagttaattcgaatgttgtgttggtctcgatactactcttgaagaagaagaattttgaattacctggaatcatgcggagaaaacaaggcttgagggaaagtacttggatgttgtcattcaatttatgccccttcacctacacattaagccaaccaatataattatcagtcatgtcttttttgatgaacaaaactgatgtttgattgatataaacttgagaataccttatgggagagagaatagttggtgaaatggcaagtctcaacgtgagatgctaaaagccttctcacgtcaatgattttgtcagtagaaactcccttgagtatcacttgagtttcgtacggagtggtgactgtgatttcaaccagactcggagccaacagtttatcgtctctcttcttcttatctcctcctttccctttgttgtttgatttccctttgcttgacctcggtgccattgatcccccttcatccaattacacacacatatacaataagagatcactatctaaagagtaataaaaagtgagtcaatccagacagaggtaggtaggtaccttggagcagcagagcaatcaagaatcttgagccttgagaaagaaaggtgaagagaagatatataacaaaaagaaaaaaaggataagggttttggatggggttaacactttggttttgagatttataaccaatcctggcctctccttgtcgctaacgccaaatctcttttttctatctctatctcttattagaacgttacatgtgattttgatgttcacattaaagttttaataacaatactccaatcacagtctcatgcaattcgaccgagacgaggtgatggttcagattcgcccacgtggcaactatgagagtggtggtggggacactgacctctttgtccgactccgttttgtttgtttacgcttcttttaataacaatcaacggttcgaatcgtctgctcactgcagtgtgcttttagtggtcacccactcgaagtcaattgtcttttttttaacaaaccacacctacttaatgtctctatacacatgatgagcacgagttataacactccctttctccttcttacgatacttacaacgttaaacctttaaaaagttgtacaccaaatttttgaaattgatcaattgtaaaatgatgtcaacaccacagatattatacccacctgttcacctattattgattcagaatccatctaaatgagtgtaggaacaatgatattataattagatccccaagctttcattttacactttaattcctccctcaagtattccctttgtagagagtaccaagcgtgcgtgggacaaaattgagatttgagagattaggagacacaaacaagccttcttagtaatgtgaaagttttttattaactaatttcaatactgtttaatgatgattacactaagctaaaaaaaaaccagaaagaattggaaccttttcaatttttcataaagttccattttttaaccagtccttggtgcacaagagagcctccaaggtttcaccaggaagagatgtcctgtaattgtccatctgcttcacctctgtgtcgaatacggaatcaggagagacggtgctgaaggggaccgagagaagatccacagccatctttgagagagttgggtagttggtgttgttgaccctccaccagctcagaacgttaaagtcttctgacctcggaatcaaattttcttccaagtattgatccagctccgtattcatatctgtcatgtacatctcgaagtctgacaatgactctcctattgtgatgagggtagacccttcctcgagaagcacgtctaccggaaatgttgtgtggtcttcctctaccattgcgtgtgcttgagaatcatcaccacgttgttggtcctcttctgttagctgactctcttcactcactccctcccaaatccctaccacattctgcttctctgccttaagctgtctctcatgttgatgtgactctgtggtttcctctacttgtggacttgtctcatcacctgattgtccattccctgtattggtagcttcagccatgtctgtggttttctctacttgtggacttgtctcatcacctgattgtccattccctgtattggcagcttcagccatgtatgtggtttcctctacttgtggacttgtctcatcatatgattgtccattccctgtattggcagcttcaaccatgtttgtggtttcctctacttgtggacttgtctcatcatatgattgtccattccctgtattggcagcttcagccatgtcttgatggaagtgagattcctgagccacctctatttccgaaaagccatgatccacataagcatccaacaggttctgttcactgtagttaaggtacagatcatggactgcatcttcgacagacttggtccatttctctgcatcttcaccatacgacttattgaacgtaaacttaatgagctgcattttgaaccgaggatccatgaccactgcaactgccaacacaaggaagcatcctctccagtactggtcgaatttttccctcaatgattttgctaggtttctgacatccgggtcttcacccggggcagcgtggctcagatctagctgaagctttgtcatctcatggtacaaatcgtttgctgtcaacaggtttggcccagtcaatgcattacccgcttcgacaagtaccttcaagcatgagcaaagactctcaatctttttccattcctcaggagataatgatattttgtagtcaggatggcaggtttccaaactagaaaacacttgtctgtgttcacaggcagccaacaacatattgtaacttgtgtcccatctcgtttggttgtcaataagaagatctttgtaaagcgaaggggatggaaaccgtctcttcagttcatcaaatctgtctccgcaagcctcgttggtttggatatacttgatgctatctcggactttctttatgggttcttgaagccgctcagctgtgagtgcatcttgcgccatactgcttaagatgcgagcatagcatctccccatcaacaactgaccattcaacacatgctggttcctgaaagacaagaaacctctgagattgtcgatggaggttttatttactaatgattggctgacagcgatgctcgaaatctttccctccaagttccagtcggataagcaagctgttataggctggtttaacgcaaaatcagaatcaggagaagccacaacaacaacatttagaaggcggtgagtcaaattccagtctttatcaacaaagtgtcctgccacaaaagcgtaagccactgattgctttgatgaccacaagtctactgtaagattaactcccccaggaatctctccaataatgtccaaaattttctgcttttgggatagaaacatagcgagacaatcagcatgaatggtgtcgaagctagagacactgaagcggggacgaagagcctgcagaaaaccaacaaaaccaggatgctcgaccatatcaagagggtaatcatgcataatgatcatctttgccatctcaaggttacagcgatcttgatctagagggacatcagcagaagacatttgacgtttcttgggaaggcaagaagtgggtttttcatccttggtttgcaatatctgacatttcttaggaaggaatgaggtggtttcctccttgatttgcgagagcttattgtaatctgggatcttcgcacaaatacccaagtaaatgtgacgcttaaggtggctagttcctgaacacttattttcagacatgtaggcaaaggatttgttgcagtgcatggggggtcgtgtatcacaaacaacgtcggtatcaaccagctctgaaggattagtgtccatagtcctgaaaacagagaaagcaacgtcgaatcaattatacatcaaacgtttgctttgacacaatatcgataatactcatgagagcaaacgaagaaacgaaggaagaagagaccagggaacaaagagatccgacaaaagagaagacacatcgcagaacacaaaatctccagagaataaacacgaaaacaaagaagagagaaagttgaaactcacacacacaaaggaagaagactctgaaacgcgtgtgtaatgggctctgatttcaccgaaacgctaagcaaatcgaattggactttcagttttagggttttgagcttttccttttcgccgtcggcccttttctgtttctctctcacttatataatcaggacaagtaatagactcgctcacgtacaacaaacaatataaaagaaaaaaggaaccctaccaaaaacaaaaaaaatggaaatacaaaagaaaatgggaaagacaaattttgttaaccaattaccaaacaaacagattattatttttattattcccaagtaaaagacataaacaatatctaactattaaatcttatcccattaacatttattattaagtttatatatatatatatatatatgtattattatttatgtttattattctaaatacgaacattgattccataattcatttttttttttaatttgtttcaatactctactctatcgaattttgaaaattttggaccattataattgggtttcgtgattttattgacaaaataattaattgattatatgttttttgaatcaaaaataactaaaaattaaaattattttttaaaacaattttaaaatctgatagtaattaagcattttagtcgttaggatgtgttaaaattataaggtactaatacagtatgtaacaaaagttttaccactgccctccgtgcactgtgtgcaagaaagatagaaactacttgcctccgccaccaaacattcccatcatgtccttagccgaacccatctgcttcatgagactctgcagaccgctcatgccgcccatctgttttagcatctgaggcggtatgaccttgctcatgtctccgttctttgggatcttgatccctttcattgtctttgctatcctcttgtactcttccaacatctccatcacttctcttactaacctccctgaccctctcgctatcctcattatccttgactcgttaaaaatctttgggtttgggctgtcaagttctgcacaaacacccatcacattttgctcaattaattctactgcgaaaacttttctccaaataacaaattgttctcacctttatttgtcatagaatccatcattgtcatgtatcgcttcatcttcactcggctttcttcaccatgtcctttcggcatcatttcagcactaattccaggcagcatcgagaaaagctacacaaccaacacattattttgtttaatcatcaccacatggtacagactactattgaactagagattctgacctgattaagtggaatccgcagagagcactggaactggtcgtacatacttctcaacgtaaagttaccctgagagagattttctacaagttcattctgtagatctttaggtaccacctcttgtagtttatccacgagtccagaccaatcaccctttcctgatgtacatagacattaattatcaagattatgagtgaataacccggcccattgggtagcctctgattactcctaacaatgctgctaatcttcaataaactccataaaagttacctaagagacggctgacaaatggtttaacgtcaaacacttcaaactcatccatatgctctcctgttccaatgaatatcacaggactttttgtagctgcaacactaacaacatgaaaatggttcaggttcacttgttcaactaccaaagcctgcaatattttcatattaaccatttcgagtacacatgaagactcagtagctacaagatacttacgcgctaagagcaccacctcccttggcatggccgtccatcttagtaataattacagctccaacagatacagtttccttaaaagcttcagcttgttcaaatgcagcttgaccaatactgctatccataacaaatataacaagatctggttcctgaacagtgaaaattaccatgatcagagcctgcaacatcaaccatgaacaaaaaacagacttcaagacaacagagcataccgttgcttcagcaacttgacgcatttcttcaaagagagaagctgcttgtttatggcgaccactggtgtcaacaataataagatcacacttttctttcttgaacctatcaactccctcaacagcaattttcacaggatcggattctgtgtagctgcaacgaatcacaaattagcatttttcctgtcagcattagcacattatgctatcacactacgctcgagaggatagttctaatccagtatatcttcttttttttttcatttccctctgttactgtcattgaagtaaatccaaaactacaaatagcgtagtcgcagtaattgcaaatagaaacagaagataacacaagacctcaaaaaatcgatatatgcaaactgttgagatctttgacgaacaagtgagaccctttgatagagttttccaaggtccaaaacaaaaaacgcaagaaaaaaacaggcaaaagggcttaaagaaactctaaagggtaagtggcacacagagaactggataagtatgatgaaacctactggatgatcgataaagaaacatagtaggtaaccatattccttttcattgcagatttttgcaggctactgacctaaaataaacgtcgagtctaaaccaaacaatttcataaactttgtacattgacctctaccaaccacaaaataccatagtttttacacagatactgctgtatgtaagctaatatccattggaaatgaaaaacaccaaaggtcttacgagaaagcaagaagaaagatgaatactaagatataaatcctcatacaaagtggatagacaagaataagatctcacagcatgcaaaggggttgatttgagtaccttccataaaaggggatcttagccttggtggcattctgtttcagctgatcaaaagcaccggccctgaaagtatccgcacacactagagctgctttgtaccctttcttctgatgatagtaagcatacttggtacatgttgtggtttttccagcacctaaacatagtcaaaaactcaaatgtgatctatctactcaccaaactcaatcaaacactgtgcaaaaaacagtatagcatcttacagaaacctgaccttgtaaaccgacgaacatcactacactaggtttggcctttttgggggcaaaggcaggctttcctggatccagcatcctacagagttccttgaagatagcctgaaagagaatcatgatcaattatacagaattaacccctctgttttggaaattgattaggaatgaatctgcggtaaaactaaacctgctcgatgatcaggcgtttgttgtggccagctgctagatcgtcgaggttaacgatcttcttaatattggtctgcatcttttccacaaggccaaaagaaacatcggactggagcaaagcgcgagtaatctcgtttaagaaatcattcaaaaccttttcatcgattattgtcacattgttcatctgctgtatggcgcgggttatccggccgccgagctccgccaacaccatttttttttatctgctgtgcgattcaacaaacatcaaggaattagggctcaattctttttatcaaagatcttttgtgggagattgacatgattcaggcgggagagaacatgtggcattaatcggaggttacgagttggagcacgtcaacttaaatggacctaaaggtgtaaaacaggcccaatgggtcacatgttaatagttctctaacgtttttggaaatatatgaaactctacatattctttcatatacaactgatgatgacccaaatttgcatgttaagtgttaagaagagcctgaaaaacttgtatacaagaattggttttatcattgtcaatatctttgttatgacttacaacgtacgtacaatagcaatgaatccagaggacggtgatagctaaacatgtacatcctaaacatgtatgggttgatgaagaggcattagttccaagcaggcagatcccacatcacagcatttagttttactatgaaactgggacttgctttgcttctacaaagctctcaactagatgatcctgatcccttcagaggtgaaggaactgctgggtaaatctttcttagcttcttctgctctccaaactggtgtatggcgtcttgaatccctgcaaatgcgaccacaaactcggctgtatccgtttgattcagcagcttcttcatcaccagctccaacactttatacctgccaatcataacaactttctctcataatgctgatcaaagctttcacttcactcaacaaaactaagacatcattaaccacacacactatctggtgtcagctatttgtttctgttcattctcaacaattctcttttatttatgatggggaggaaagcaaacctgagtcgttgtgcctttgagatgactttatgtatgttcccaaacagctcctgcacagaacgcagagcttcttcatgcaaccgagtattgcagagcggggaaaaagggaggtacaagacaccggtggcctgaatttctgcatattcctcatcaataacggcctcttcgatgcgtatctcacgtaaaagctgagagagcacgcgtaaactcgactcagacagagagaaggaggggttttgagctgccagaatgcggacaaggtcaagaatggaggtgggacgccagtctccaagccaggccacagcagctagctcatgaggtggtatccacgtgggtaagacgaggttagagacatcctttaagaaagttgaaaccatggaattgtcgtaatgggactggtatctgctcagctgttcttcaatcagttcatcgagttcccacctggattttagctctttgtctagccttgccgcaatgctgttctgttcttgcctccacagttcgtacaagtctccagaaagttcgtcacctgatcaatcacagatattatgctttgtaacatcactcacatcatcaagatgacaaaacagataacattgccatagattaagcaaaagtttcaccatctacaataactcgaaaacattactttaagaaataatctttttgcagataccttttgtaaaagattcgtgttggtgagatctctcagcatgagatcttttagatgatatattactagcagcttctctctccagatcatcccaggaaagttcttccccattgtttggttcttcaaatccattctcttcactacgttgcaggaagacaaacccaattaaccataagaaaactaagctgattttcacaagaaccaactcttgtaatctcattgcacactcaaatcctaaaatgcatccctatccattatgaaaatcatcaaaaagaggtaatgttttgcatcaattcacatccgcaatctcagaaagaaaccgaactactaatcaagcgtaactgaggaaggattaatccgaagttctccttataataaatggaaaagaaaactctaaatccaagatatcgaatcatagaacacacagaatctccaaacagaagtcgaccaaatctcgaacgatcaagctcattgaggcagagtaatgcagcgaagaaaatgaaagacgaaagaaagatactcacagtcgcgcaacttccattctcgtcatcttcgtgtttcttcttcagcactgatttctttcctacgttcttggattctcaggtcgtttcatttgcggacgcgagggagatactgattttaagaaataaaaacaaagcagagacgaagggttatttgggtcattaaacatactactgggccgttagctaaggcccaatgaaaaatgccacgtgttgcatgtcattagcaagtatcgattgccacgtgcttctagatcatcatcacacggcgtcctgatccattcacatcaaatttcgagccaagatcgacacttaaaaaggttctcaaagcaacaagttcaagctacgacaacagtagtagaacactatgcaagaagagaagagcaaagaagatcacagccgtctgatcaatgtcacggccaaagatctaacggtcagaaaccgacggctcgtcgaggtaccatacacggctacactttcccacgcaatgaacacattggtggctaactccatctcagccctcccagtggctgcacctccaggccactggatcggagccggtggttccatgatcatggaatcagacaaacaaactggagttgtaagaaaacactatatcgggattctcacgatgcttgacatacttgctcatatcgccggtgaagattccaatctctctgatcttgatcgcaagatgagttcacaggtgtcatccatcatcggtcattgcctcgaaggactcagtctctggacactgaatcctaataccagcgtgttagagtgcatggaagtgtttagcaaagggatccatcgagctttagtgccagtggagagcagcatagagagcaataacactattgcaggagttgagttgattgagtctgcctctgcttacaagatgcttactcagatggatctcttgcgtttccttaaagaccatcactttgatgacctcaaaactgttctctcacgctccatctctgatctcggagctgttaatgattccgtttacgccatcacagagagaaccactgtttccaatgccatcaacgttatgaagggtgctctgctcaacgctgtccccatcgttcatgcacctgatatagcacaagaggatcatctgcagctagtcaatgtaggcttcattttacatatatactttggttaatatataatgtttactcattttgtgttttttgagattgcaggggagacatagaaaagtgataggtacgttttcagcaactgatttgaaaggatgtcgcctaccggagttgcaaacgtggctgccactcacagctctggagttcaccgagaaaacttcggggaaggagagggaggtggtgagttgcggtgtggagtcgactatggaggaagctatagagaaagtggtgaccagaggagtgcacagagtatgggtgatggatcaacagggtctgcttcaaggagtcgtctccctcactgatatcatacgctccctaagatctactctttcgtaatcaacgagctctctgtgtttttacctcttttatcttattatgtaatgttctactttgtaagatctactcttttgtaatcaaaaagctcactttgtttttaactttttaatctttaccatgcaatcttctgctttgggacttgggtgttaggattcattcactttgcatcactcgtctaagtatgagacaaaggacagtctaaatgcctaatattaataatacaacaaagtacaaaggtacaaagatacaaacgtcaaatgataatggactgaactacaacatagagagacattagttctaccaacacatacaacaaccactcataatgttaatgctacacctgaaatcacaacaaactcttcacgctctgtgctctgtacagaacgatataggttttaacagctcacggaagctgcagctccctgctgctgttgaacttgattcgcctccaagcttctgtttgtgtcttctgccttcatgtcgttactcttctcctctgctactgcagcttcggtcttcttgacatcagactcttgggtttcgttctccttatttgctgcagcttctgtcttcttctcatcagattcttgagtgtcattttccttattcgcctcagcttctgtcgtcttctcatcatattctttggattcttttcccttatctgcttcagcatctgcatcaaggttaggctcacccagggttacattctgttctccgttagcttcggttgtcacgctgcccttgttctcagtcttttcctctgcaggcttcttctctacatcagcctcagtaacaacttcctgcgcctctttcatttcagtgtccttgaggccttcaactttggaaggttcttcagctccttctccactcccagccttcttctccaactcagaggtatccacttccatggactctttcttgtctctcacaacttctgcctctttgttctcagcctcagccttttcaccctccttctccttctcagcctctgcaatttccgtttgaccctccttcccagcctcagttttctcaccctctttgttcaccttctcagcctcagtcttctcaccctcgttgttctccttctccgcctctgcaatttctgtcactccctccttctctttctccttctcagcctctgcgttttccgtcttcccatccttatcaacatccatgttctccttcacagcagcctcttcatttttctcagcagcctccttattgtccttcttcgtgagagaagatcgtctcttcttcaggaggggctctttgtcaggagtaggcgttgtagccttaaccttttggctgatccttgaagacctccttggagtttccccagttgtccactcaaactcagagatgacaggattgccaggatgggccttcaggtactgctccaactgcttccgcgagctaatctcttcacccgttggagccacaaacacaatctccgtctttctcggagtaccggctcttttcggataaaactgaaaccaaaacaagcttctactaatcaaacaccaaagatacatgaactagcagcaacacaaggcacaatctaagagaaacccccaaatttaatcaaccaaatctagggtttcaagagtatttaatccaaaaccctaatttgacctccaagaaagccctaaccgttaaattcccatctaattggataattcaaaatgaattgaacacaaagagccccaaattcgactagaaacgaacatttcttgaaatcccccaaattgaacataaaccctaaaccatgagaaacaaaagaaactaacttcaagataaagcagaacagacaaacaatctcttacacagacaacatcaattaaaggaaaaaaggaataataattacagcagaaatttcaagaaacagtagaagggacaaagaaggaagaaataccagtttcttccatgaagctggagctggtagctcaatggagacaagctcgtctgtgttttccatcttcttcttctctattcacctgacactgtacgaccaagaaacaagctccaacttaaattactttatcttgaaacaaatttcggctttctttcctttctggtaatagaagctgtaagaaccgttgtgaccctaatggatatgtttgcgtgtctcttctgttctgtcctaattttttttattctttttttatttcaaacaagaaatgatatttcttcctccacgtaatccacgagagcgtggatgataaatttacactgggtcgacgtgatagtttagtgacagacctctttgagaacgacacgtatccagtgtggtcgacgtttcatcgatggataaggaagtatctgtttcccgcttaataaagtagaatggagagtggtgttgaggtccggtacgtgaccgctgctgttttcacgccgaatattctttttctgttttattcccactctcctactactactctccatgctaaaagcccaaatcaacagcccaattactattcggaacattttttttgctttgatacttttaggttcagattctcttgttggcacaagtctaatccctaataattagtgaagagcactaatttaaggaatgtcctctaatcattttattaaaataaaatgtacatatatgtggaaatcaaacactggacagatcacctggaaggtaggatcaatgtgcaagtgggacatgagacacaagaacatgtccttaacaaaacaaaacaaaaatacacaagaacatgtcccatattaagatactgattagtcaaaccgagatattgctcttaattcttttggactgaaagatggtaaacaaaggatatttctcatttacggtgaaaacgtataagccacatttcccagtattctcgatcaactccaaatggaagatgataagtggtaacaacaagggctttgagaaaagaaaagaaaaccgaaaagaaaaaataaatcagaaatgcccgaaccagtatgtgtgtgtgtcttccaagtcttgttcagtcatatagaccttcttgttcccaaatgtccactagaaaatccaccatttcctgttttcaatcagtaacacagttagttgactgggtttttttcctgcactcggaggagtttgattacttacggtgagaggaatgggttggggaaataacttgttgctccccagcaagctatcatacgttgctgtgttccaactgcaaatgatagacatataaaatgtaacattgccagactttagcccttagctttcagcaaacaatagtgtgtaacagagccactcactttaacttggctccttgattgtgatccaccgggttgttgggtttatcctttcccacccaacgctcccgtgtctgattccaaagaagaagacctgcaaacacacaaacccacttcatatataaccatcacaaaacactagaccacaacgctccccttccgtgaaatccaaaaaagaaagtaccttgatttacatattcaggaggagcattagagtttctagcagcagattgagaatcaaaagtctgattggatgatgataagctcccctgtgaagggaaggtgatgttgtccatatcaactgtgcttgttgaccagaaatcttcagagacactcggtttcttacacggtcgagcaatggaattggaaggtggatccttcagactggcggcagttgatctgtgttctctgtagcaacccacgcagccactgctctgttacaaaaccataacttttgatcattgcccaaaaaacatccttatttccttagcaaaacatttttctataaaactttcagagatagctatctcatctgcataaaacaaccttataaacaccattccccagcaataaaattagggtttatctatcatgaacatgaatcccaagcagcacataacgcaggaacaaagcccatcaaacagaatctcaaatccaaatcaatcaaataccaaaacattctgcataaagtcaaaaacagaaatcggaagaagaaacgcaccccatcgatatgtgaaggaagcgatttataaacccaggagctcagatagatctgggaaagctcgagatgttctcaagagggtgatcaatgatccttgtcaaataacaaaccaattaaccaaccctattatagataaaagccaaagaagaaaccaatcaacagcgaacaaaaacatattcaatatatacaaaagaatcaacgaatcaaacagctttgcttacctgatgataaaatctcgttggttaaaataaagtcgcttcctttatcaactgggcatcaaaagaatccttatctgaggctgcagctccttctcgaacaagaagaagaagggctttgccctctttacgtttctccttttcctttcgctttgaaatgatttgcctttgtttcgatgaccagagaagttattattcatcccccagccgttatacggatctcttggcattgagggtattattgtaattttaatcaaccaaatcaaagaacttgtaataattcgaacaacttgataattgacgaatgtgtataatgtatatagatagtgtgtttggtatgagcttattattaaaagtcaaaataattgtgcatcttccatgcctctccaatccattgtcttataatcaaccccactcatcatatttttcccatacagcttgtattcgtaatacattatcattttctataatgaaataaataatagtctggaatcaaagcatagaagaaaactgttaaccattagcgtaagaatacattaagcattaaggatgcaaataaagatagttgtttaaatgtcaatacataactctcatgattacaaaaacattgtttgcttgcagcagcagccacactttctccatttgtagagcaacgcaagtcacacactcactttgaaaatactgagcacaaccaagtccacatgcaagtgcaacacttcttcttcttcttctcctttttattcttcttcttcttgttctttcttctcttctttctcttcatactctttttctcacccacaggaagggaaaaagacacaggttttgtccgcggcgcgtataagcaatagaagttgttggggatactactcaatgggacatctggaaatgacgggtatttctctcgatgattgtgactctgaagtcttgtttcttcattattctttacctcttccacttcagatgttttctcttttgcatcctcaggtttgactaccagagaaggggaatatctcaagaactcacccgacatcaaaacttcatcaggttttaaattactgtgacgagacccttgagcgtttgactttctatagccatcaattttcagactaaacaaagactcatttgatatttcgctccaatccacatccccattcttactaaacaccgatgcagggattctcccgggatcgtaattcgctataccattattcatcaagtgaactggtcgtaacctagaaggcggagatggagctggttgcatcctgagatgagtcaaaccagatatttcagagccttgagaagaagaagaaggctgcatcctgacatgagtcacacctgatatgtcagagcctttagaagaagaagcatttgaaagttcccaattctgctgactcgtatcctcagaagatgctttggactcttttgtacttctctctacggcatcatcccatgaaacagaggaagacattgaagaaaaagacagagatgatgatgttaggaagatttccctcgcaggtcttgtaatcattctgttaccactcatactcacatataaagctcttatcagttcacttttccggttgttaatctttcaaaacatttcgcagtgattcacggattcgattccatggctgataaactatgaaagcaattaatttttcttacatgaacagatgatgttctagtcccaccgatactacaacttcggtgaaagctggatccttgaagccattagcacaagcaatatccactcttttgcatccaagcacagtgccaagataatttggacaagactaatcaaagatgaatccaatattgcataattcttggtgtcttgtgaattcgacctattggagacggaaacatgtcattttcattcggttcttaaggaactagaaaatgaaaaacaaaacaatttatggagaagttttgaaagtgaacacaaaacaaacatctttgaatttagtaaatttgaacgaatggccgttgatcagagttgaatacagaagaaggaaacggtttcttgtggagaaatttaaggtggcatttgctggcatttgatcacttctatttcggggttgactgttcttcgcgccgttgctgtaaaacctaacttctttacattcattgtggacatcagtatggcccaataaaggcccattttgaaataatcgggctatttggtccacacatgaggacacgtgcatacgtaagagagtaccagaaaaggagattcataaacccgttaaattcgcggttaggaaacttttgccttttggttgaaacatcgttggcctcttgcaagttaattttcttattctatcgactatttcggacattcaatcacgtgattttcgtgtttgaaaagatcaacaattttttttttcgttaaaatatctggcatttaaataaacactatacgtaaattttagcagtatgaaattaactaggctgatggattcgaaaaataatacaataaaaccaaaaagaaaagaaaaacatgtattccaaattacaggagtactatcatcaatcattcaatctttaagtagctacaaaagtctacaacaaaaataaagagaaacaaaataataatttaaaggctagataattgaaaggaatagtgatatgcaagttccaaacacaagtatgaacaagagttaatggaagagactataattatgaaatatcggtcatggactcagggaagtggggaccctatgataacaagccaccaccaaattagcacctcaaaaacaaaaatgtataaaccatattatattgtatattaaatataagcatacattaggttaaagatgtttgctcaaaaattaaaagcaaatagatatgagattgacacctaaacagccttaatctggacccaatctgacagttagggcttaggctatgggtacgacaatcaactagatatgtggacaaaacattctactaattacacaatatacatgtacatggaccaccttttaatttttattttttttgtccttttactttttaacttgtacatgcatgttgtcaatgtctaattatataatcacttttcccctctatgtatgttgttttatacattgcatgtgttatatttgatcgcgagtgaacaaccacttttctcagcgcttattacgtgttttctttttgcggcaaatcattttacgattgattaatcctattcaaattcactacttaaacttactcccactgaacaaagtcccaactaaagcttataaattgtataatgtttacattaagtcttggggattggattgacaatgatgattttggccgatggttagtgctggttgttaaccaacatgatagtataatataaaatgaaacattaatatggactgatgttcggtcttaattaccactccactcttagatataaaattttgcagttaatggtgaacgcaaatttgcttatacgtacgtacgaagctgtatacaaatataagtaagcatcaaattaaacagagagagagaggcgtagtacttacgtagctatatgatgtggacgattgattaggatgtacgtatgctaaaaacaatatacacggccatgtgatacttgtaccacttgcgcatctctacatatatacgatccaacctttggaatttatattgtttacctttataataaccatccttcacattagcaatcaatctacaccaacaactacaactaaattctatctctctctctataataaactagcgagcgaggacgtcaaatgtaataagagtaagaacaagtacaccttttcatccaccaaaatttaacctatgtatataaatatacaacattaccatttaccaaacatccatcttacatatattactcatcatcaagttcctactttctctctgacaaacatcacagagtaagtaagaatggtacagacgaagaagttcagaggtgtcaggcaacgccattggggttcttgggtcgctgagattcgtcatcctctcttgtacctttcttctttctttcctttttctctgcgttgttcatttatttcctctctctgatccattaaagtacacaaccacacatacatatatatacatgatcgtagctaactcatttctggtttatcttcctttgttgttttcctcttcttagctaacacataaaatcattttaacatctagatacgtaaatatcaataagttattgcttaaaaattctactatatatatatatatatatatattcaccatgcttaattattaattttgacatgcgtgatgatctttcaaaataaaaaggaaacggaggatttggctagggacgttcgagaccgcagaggaggcagcaagagcatacgacgaggccgccgttttaatgagcggccgcaacgccaaaaccaactttcccctcaacaacaacaacaccggagaaacttccgagggcaaaaccgatatttcagcttcgtccacaatgtcatcctcaacatcatcttcatcgctctcttccatcctcagcgccaaactgaggaaatgctgcaagtctccttccccatccctcacctgcctccgtcttgacacagccagctcccatatcggcgtctggcagaaacgggccggttcaaagtctgactccagctgggtcatgacggtggagctaggtcccgcaagctcctcccaagagactactagtaaagcttcacaagacgctattcttgctccgaccactgaagttgaaattggtggcagcagagaagaagtattggatgaggaagaaaaggttgctttgcaaatgatagaggagcttctcaatacaaactaaatcttatttgcttatatatatgtacctattttcattgctgatttacagccaaaataatcaattataccgtgtattttatagatgttttatattaaaaggttgttagctatatattgtttctctttttccacatttgtatctaataaagtattggtgtttgtaactaaaatccagaagtgacctttttctttctgtattatctgtttagtcttataattgcattaatctaataattaaaagtatataatgttacatagtacacgaggacgtgaattgatagcaaagcttctaatgaaggtgcttttgtctcctgctcaaatgatcaaagaagacacactgtttaatgtagcgggatcgtcgacaatactagtttctgttcaaatatccagaaaactaacattaaaagacattgaatcgaacaaataataaaaatataataataaaataaaaacatttaaatgataaatttgcaataatcttatgcttaaatgccttatctaaataaactctagattaatatatgaatattatctaaataattaataatatatttgaaagtcacccaaatttttattgcatcactttctaattaaatgtgtatgtgaaatatacttacatctaagaccatgtacatgggtgatatttttagagtatcacaaatccaaaaattatttttatattagtaaagcaattagaatattcttgatcagtatcagcccactgatatttgtgatatcagtatcatctgacgtggcttcttctgattggtcacatttgataaaaacaaaaaatattatttagatttattaaacaaacattataaataatactaaaaaaactcttaatgatactttgtgagtatcacctatgaacatgctctaatagtgttgatttttgatgagtagttagcttcttcttcaatgttttaaatcatctaataaagcagggaaattaaatagttggtgaaattaggtttgtaatatatcatgtatccccacaaaacacatgcattcggattttttttgttctttttagaggaaatgttaaattttattgttttgcacgcatgagtctagactactagatctacaacaacattaatgaaatacaattcacataacaggaatccctttaacataatcttgtaatttgccgttaagcgcctcaaggaagatgatttttagtaatgcaacctcaaattaatgaccactattaagattgtctagtgatcacatgatcaccactatatattgaaccttcattatgaggtatagccggaataatgcgtacgtaggatttaggatcactagaccatcaaatgaattctgttattttctgtacgtagaagatggatatattcaatagttgaaaagaagatgcttaaacaaacgaaaatagactactactatagtctctacatcacgtactttgtctaaccgagagaggaaggtgcattaattttgaacgaaatgatttttatcgatcctgaacgtatctttcatttctgtttttgtatttgtatataaatcatcaatctcacgccagcatatgttttatataaaatatatatatcaacgtctaattgtgacgttttgcatcaagagacgatgattgaatccttaaaacctcccaaatcaaccattcgagttttgtccaccaaaatttgtacgattaatcacatgcgaaataaaatttccaaaagtgttgtaacacaaacgtgacaaaagctatcttattatataaactaatacatcaattaacttcaaaataaaaagatggaaggtgttttataatgcagaaatgataaacttataggattttttagcttaaagaaaaaaggtacaaatgaaggcaaaacgaattaggttaaagaagaggttcaactttaacttccacagtaggttgtttgtacttgtttgtgctcatctttatgacttgtcctctttaactgtaacttgcacttaaaccattcacactatgtaatagtataacatttgtttttattcttttccccaagctcacgagtttatagttaaatatatttttacagagaaattgggtataacatgcaagtagtgtaaaagagggcgaaaatgagataatgaatataacaagaatgaaaaaggtggtctctactttctctcgttagatttggaacaatgacacatttcctttaactctccattgatgttgacctttcattttttctaactatcaacatctcttctcttccccacctcacttaactatcaagagtgatggatttttactatatttactttacacttataccatcttacaaaaactgacaaattaacaagaaagatacgcgtatattcatttcacagagtggctggctatttcagttcacaagatttaaccgcaataatgaaaggctggagaggacttttgtcaaatattcgaacttaggtaattacgaaaaggccctttgtcgaatttttaactttgaagggtaatgttgagtaaattagtaattacgaacagtaaaaaattgacacaagaaaaaggaaaaagttgttgagaatgttttgaggtagagaggagaagtagaaatcgataaaggcgaagaaggaatcgcaaggaaggaagaaacttgagaggaagatcatgatcctagctgtgttgttcgccaattccgttgggaatgttttaatcgaaaggttcgtactttagatcccaattttctctgttccttcaatctggtcatcgatttccgcaacttgtatcagttcagcttgtttttggttgattctctaagaacccagatcgatcattacctgtagcgattgttcttctttgtggatctggtgtcaatcagggttctgagattgttgaattgtcagattaaggttgcgatagcttcatgtttccttgtaattcgtacacagtgtctctgattactctatggttgatattagattttaattcccctctatacatacttgaattggagatatctcaaacatttgattctggagaagttaaagtttcatgtttgtgatgcatctacattctttttgtcccaactctgtatcagatttcgagccacttgccttgttaaattgtattggcttttgctccatggatattcttaataccatatgtatatcattgttcccttagcacattgtggaatttggcttgcaaggcaagtgggtcgaaattaccactgtgggatcaccaagtagagctgaaattaagggtgtctgatcaccaatacatgtggcttgtctagtctttattaccaaatcatcagaagcatttatcttgcaggttcaatggagtaccagctgaggaacggctccactggcgatctttcttggttaagttgggagcagataatctcaaaggcgttaaaaatgaggagcttctcgttgcttgccacaagtacatcaatctacctattgtgtcattttcgagaaaactatgaaaccaaactaacagcatttttggggtatataagtaacagagaggttgttgtgcaggtcggtttatatcgtgtacacaatgctaggggatgttagcatcttccttgttggcaaagacgagtatgatgaacttgcttgtaagcctaacctactatttctaaaataactgatctctgtttcattcagagtttgattctttgttgtgttttttctcgtggtgcagtggcagaaaccatctatatcataacagcggctgtgaaagacgtatgtggaaagccgcctacagagcgagtgtttttggataaatatggaaggatttgcttgtgccttgatgaaatcgtttggaacggacttctggagaacaccgacaaagacaggatcaagcgactcatcagattgaaacctccttctgaagtttgatatgctccaaccaaccacacattcttcttctactcattttaagagctttctcattctccaccgattgttgtttgttgaatcacttctctatatcacatattcaactatcaactactgctgttgttcgatcagtccatcttgtagtgttgttttttaaatcttcagtttttagtgttacataacaaagaacaaatttctatccaaaggcttttccctgcggtctaactttggtgagttgttcaaagacctcaaaaattgattcgtgttcttatggcagtatgccagtatatcaactcaatatccagagactttccttttaccgtggaaaagaagaccaggtaatcccgccatggttgcttgctggtagagattaagatgaagatgaaggttgaactctctcgaacaaatagttatacaatagaagatagaatgtgtcttgaaattttgaagtggaacctcctgcatagcttgtgtgtctacaaaataagcactttccatttgtttgttaaacgcactggagctgtctgcgtctggactatgttaatgttagttgaaacaaaactatttaaatcaaatttgcaaatgagggaaagaaggttaaaaagctttatcaaatcttgagtttgatcatcggcccttcgacaggagaaaaggctagctatagatacaaaagtaatactaagcataaactaaagagtaaatttaaaacgtgctggtgggtgtatagtcgaagtaagtgaccaatctacactcactgaaaattttaatatcaaaatttaaagctaattcagcatattataaaattatggagtgcgaaactataaaatgaaatcataaaagatcatgcgagattaggtggaacttagcaatcatcctaaattacaaaaactcgatcaatgtgagttgatgtatactgtcatacgactaatagattataaaaagaaaaaagacctaaagcatttttattggaagtctcgtaacaatgtaaaaaaataatcatacaactaatttattagaattccataaaagagtttttagtttgagatatccataaaaaaaattatcttcttaattaaaacactgatatatatatgtactctttttaagtgttttctatttattatttttacaaattataaagtaaaatgatatgaatatcagttaaagagtttatatgtttttttttttggtttcattttaaatcataatataaattatctatttattaacctccattatgcataactctaaagatatattagaattattttaattagtattaattaaggtaactacaaaatatttgatatgtttagaacaaattaatacaatgaatatttttaagatgtaatttgatgaaaattaataaaatattaatataatattaatgaaaattttaagattaaataatattaaaatagtagtatcttaattaaggagatactatggatatcacaccaataggcatgctctaacatatttttttccttttcggaggattctttttatatatatatataaacaaataattaaatagcatcccaatatatacataaacaaagtttaaatcgttttagctatgcctgatttttttataactttttaagaattagataaataataaagcaacatgtctaaatactattctaaaaatatatcaattgttaattgggacagcccaatttgcactggacacggcaacaaatgaccaaattctatacacaaaaacaacaaacgagtaacgtttaaaaatgctgacgtgtcccaatatgatcttacctttgatatcgtttttaaggaaaagttgtgattgtctgagtcagcttgtatgagttcctacgtgttgaactaatcctgacactacctgagggaggtaatcacaacatttttcatatataaccgccccaatttcactgatttcaccttttccttttaccaatcacatcatcccaattatttacgtacttagcttgactagttgtcgttcattacaaccatcttaggtttcttataatcattcctgttacgtagtaaagaactattttacgtaatagataagattagatatcagttgaaattattgactatatagacatcctaattttatttccattgttaaatttgttaatatatctaactatcaaaacctaaatcgacgtgtcacactcaaacttataaagactaaacctattacaagaaataagatcttataggccgaatttgtttggtacgttgatgatccaaatataaataatagtttttctttttctttttaattatgaaaggttaaaaattcataaaaaaaattacccatatttgcttaagacgctagcttttctataaatacagcatagccatgtgtaattgatcatcagataagttccgtggttatcccattaaccttctttctacacaacacaaaactatatataaagatcatacatgtaataacgtcctgcaactattacaatcattctcgcttgaattaacgtggacgtcattgtttttggattgttaatcaaaggcggcgttacttttttttaatataattgtttctttaggatctttgtctctggaaaatgaaggaagacgcaggaaaccctttgcatctcacgtcactgaaccatgtctctgtcttgtgccgatccgtcgacgaatctatgaatttttaccaaaaggtgttagggttcatcccgatacgaagacctgaatccttaaattttgaaggcgcttggtaatttatcatcattttatttaaaatatatctgaattttgagggacaaaaaaagtaccaatgagtttagtttttttacatgttcttttttttgggggggtctaggttgtttggtcacgggattggaatacacctcctgtgtgccccagaaccagagaaacttcccaagaaaactgcgattaatcccaaggataatcacatctctttccaggtaatttttcgtgtgtgttaattctcagttttgccctgttttttgtttttttcaataaaacttttgtgctttttaaagccataaaccataatctacgttcatacaagctctgtatttagatgttgtcttaggatatttttctatatttatgaaccttttgtgcaaaacacaatctcagaattatttattattaaggaagaaaatccaaaatttgttagtttcctaagtaaatgacccttaggatagaatttgttagtatagtttgaattggcttatgataactattgaatgaaagaaactgaatttatgagagaacaaaaatatcctagagaaaatgacaagagataagttaagaagggagagaaaaaaaggacaatagaaggtggggttttcagaggtcaagttttgtgagtcagaagtattcattgttccattattgacaacaaacaattttgttttatgaatcaaaacatcctcaacttttatagttgtgtaatagaaatgttagttaggattatacaacaaaccacttggttttaagcatcaaaacatcttgtgtttggtatgtgtgtgaagaatttgtgagacaattaacaagaggagatcccaagtatatagttgttactctgttttttgagcatacataagattatagtagaaattttggtctgaataataagagttgtgaattatggaaatgcagtgtgagagtatgggagtagtggagaagaagctggaggaaatggggatagattatgtaagggcattagtagaagaaggagggatccaagtggaccagctcttcttccatgaccctgatggcttcatgatcgagatttgcaactgcgatagcctccccgtagtccccctcgtaggagaaatggctcggtcctgctcaagagtcaaactccaccagatggtgcagccacaaccgcagactcagatccaccaagtggtctacccttaattataaacagctcacttcttctttatattgtgtgtgtttgtgtattggtgtgcttggttttgggtgtaatatacaataagagaccgatgtgaatcagcgaatgtgattcccttcgaggaaatgaccattctctttgctccacaagcttatataatataatcaagggaaatcatgttttacatatatgtatattggttaatgtatttggttcgatttaactcttttgtgcaatgcaactaaagagactagactattcactctctcaagaaatgcattctagaccctcgaagttaacgtatatgttacgaatctcatatctacattgaacggtctaacaacaaaaaggcttgtaaagagattccaagctagttcgtagaggcatccaatacatgtttggctctcgcattccccttttgtttagaagtcacaatttcaattgagaaagtctattgcaaaaatttgatccaaatagaaaaagttgatacagattgtattgctaaggcacaccttacatttcttatattgtaatataaataccaagaaatagagttccacatctaaaagaaagaagatctaaagtaatatatgaaagccataaatcattcttccatacgttggaatcccatgagatataacagtactatatatacaagaaagaaataatacatgtgtatattgataagtagtgttaagggcctttggagagcatgttttcaatggattcaagacgctggagaagaagctgatttctgaactttgtgatgaaagcttctgcgctcttgtccacgtccatcgatgccttcctttccaccttcttattcatcgtctctttaataacaatattagtggtaccattaccactttcttttgcggaactcatcatcatcttcatgttcttgttgttgttcatggtagagatgtgtgtgtaacagtgcttgtgtttccttaattgattttggagagagggtgaattgttatattttggagatgctcgagacctatgtatttataggggattttcatttttttttttatttttttttaataaaaaactgtagttagacatataggaaaggagaagacttatttctctttacgtaaaccatagttgaatgttgaaggaataaaaagaaatggaatcttgaatctcaagttatacacgcgacttattaacaataacaaaaaacgttatatacgagacccatccatagtcagagaggaatgatctacaaagcaccgtctctactctctactttataatttatatatttcttttttaagaaaaaataaaatatacgttaatcctctattaactattggaataacatagcatcaaatctaagattctgcttgaaagaaatgtaaaagaggttgcctaactacatattaaatttgaatttgttaatttggagaaacaaggatgcaagattctagaaagttatatataatttgaccattcgtcactaaccaaaacaattggctttgttgtttttatataccacacgaattacggcttaagcattggagattgaactcgttaactcaccgcccactattcccattgtcgccgctccggtaaccggtaccgcttcttctttaccaagaagaacaataaaataaaagagattatgtggcttaagttagcttataacctaagtacctaactctaaaccgaactaattagttttcggcagattcgttgaatcatgtatgatatattgatacacatactttttttattaaaatgtatagagaatattggttcaaaattcatttgccgtgatcgaagaataatgcgattatcaaaataaaataaaataagaagcttcaaagcaaacgtacatggtagagttacaatttgattaattatgaaccgttattggccataaccaaacataaaaattaatgattttgaacccactagtttaggatgttatttggtaattcaaatttgatttatctattacagtttttaaatttatttttgttattacgtagttggcctgtggtggtggattgctccggataacatcactaacgcatatttataatcacacgattaaagagtgttttggtagttaatgcatgtaatagattatcttttctttttgtgcaacggtaatagattacctaaggaatatcacaatcgtattggacagatattggaaactaatcaaactcaaaattattatgttttatgacaacattatctctatagagaatccctgtgttgtcaaaaagaaaaacaattatgtattaggcccaaggaagagcagaactatctcatttctattgggctattaagataataggctgaaagagcgattttaggcccaaggagtcgtatttcaagaaatgacgaccgatgggactccaccgagacgaagcgacggccatggaaacccttttcagagtctcacttcgtctacttccggtttccgccgccgtgacatgtcgctcgatccgattccccgtttcaagacccggttcctcacacttactgaaccgtaagctgtataatttgcctacttcttcttcctcctctttgtcgacaaaagccggttggttattgggtcttggtgagaagaaaaagaaagtggatttaccggagatagtggcatctggtgacccggttctgcacgagaaggcccgagaagttgacccgggagaaatcgggtcggagcgtattcagaagataattgatgatatgattaaagttatgagattggctcctggagttggcctcgctgctcctcaaattggtgttcccttaagggtaagtctataaatgcttttcctagtttcacccatttcgaagcaaatgattgaattagtgtttcatggtgaatgatgcagattattgtattggaagatacaaaagagtatataagttacgcaccaaaggaagagattcttgctcaagaaagacgtcattttgatctcatggtaaataatagaatcagagtgcttaagagttgttacaattttcgattagaacaaaaatgttgaagtttgggggttttggttaggtgatggtgaatccggttctcaaggagagaagcaacaagaaagctcttttctttgaaggatgcttgagtgttgatggattcagagctgcggtggagagataccttgaggtggtagtgacgggctacgatcgtcaaggaaagaggattgaagtgaatgcttcaggttggcaagctaggattttgcaacatgagtgtgatcatttggatggtaatctttacgttgataagatggtaccacgcacttttaggacagtcgacaacttggacttgcctttagctgagggctgccctaagctcggacctcaatgacagattcttcaacaaaagttgtaatcttctgttttgattctttactaaaactcttctagattgagcttgactcaaataatttcaaagatgaaactttgtcggaaagagggttcttttttcgggtttggtaatggattgaaagattttcatttaataaaatattataacttgaagacagaagatattagtacaattaaagacagctattctacaaatggtaatgtgatgttatgcttactccggacaagacacggtgtcgtagccgtttaatgcggcggtgaaacggccctccccctcggcgggtccagtaagtatataatttgagatacgaatattaatattaaatcaaaacatcacatcagagccgtctaattccaatcaaagcagattgatttatcttttcttggtcacgatccgccgccttctctgccagattcgaaaccctagaggattagtcagtgagccatcggaagggacttgaacgttgtttgatttttctcaaaatgttttatactgaaatcacttaatcagataattcgccaagaaggaagaagaatcaccaaatcggaaagtttgattttgtacagaaatgggaaattgtccgaaaacaaagaaagacagataatttacaaataaccagagtctgttgatcaaatcgaaaaatcaaatttaaagttttttataacaaagaacacacacatacaaaaaagaagaagaagaaagatgaaagacagtgtatactattttttcctcatgaatattattaatcctgacgcctacctcgatctacgtttcggcggccttttcctcggattaactttcttccccggcggattctttccaaacgcagagcaacaaccgcatgacgaaattctcggagacggcgggtccactgccggagaaactcttccggttgttctatgatgtcgttgagctcctccaccgttagatcgactcctctctattcctcctggtgctcctccaccggttttaatcggtctaagcttgtctttctcatcgattggtttgacctgttcagagctttccgacataggcttaggttgttcgtcgcgttgactttcgtctttctgctcgttgtttcccgatttgttgagttcggcgatgagacgatcgtcaaacactataccggaagatccctgacggcggaaagagattgttgatctttgaagaccctccatggatctatctctctctctgttgatgagctaaaagaagggcaaaactaggaaaagtgagtttaggccttataagtgattaatcaatcattgtgtttcagacttggtttccttttatttctgtcctcattattttttcatggggtcggtccactatttattgtttatttttatgatgatgcttccagtttctatttatttctttgtaacaacaatcatcggaaattaatgtaagcggattaacgatatcattcaaccggattattcaaacattaattgtaataaaaaaaaaaaagtaaaaaccattactgttattgatgattaaggcagagaattacatgttaattttttgtttgttttcacatctttaatcggattctcaacaccacataggcacataagtcctcttatatccatatttgttattttattccaaacttttggtttctttaaactcaaaaggggtaagactttttgtaattactattgttttatcagcaaattgcaaggattagataatagattagaaatgaacaggagaattgacttataggacacactaatttaatatttccttcttccccatttcggtaaaccaaatagactatttccttcttccccatttcggtaaaccaaatctattaggtgaggatgttattaaaatgccaaatctctctttataaaaacttgaaaggaaaaacaatacaaagtggtgaaagtgagtcaaagtaattcggttaccaatttgtattcaaagtcaacatcattgtactataatatggtataacttttgttcaataattcaccttcttatatcgtctgtttcttctcaggatcaccactaactaaaacatacgcatgtggtgggtttagcaaaactgtattctttggattaaagtaatgtgcataacacaaattaataaccccgtctgagttggcacaactcaccaatgttgaagattgagataaagaatttgggcccaatcgccgaatagaagtctatattcattactctcaggcccatccataaatacaattgtcaaaaagaaaataaaaaattggtggtccagctgggaacgagccagcaggccatggtgaatctgagtggcgtcgagctgtgatccgtccactgctgagagcgggaggtgatcgctgctctgtgaaaccagcctcacgcattgccctccactgcaagaaccgcctgagccaagccttcgcttaacacacacggatcactctcagcttggactgggcagcccggaacaatgccacaacagatccgacccgtgggccgagccagtgttccaccaacttattgtccccacacgggtcacaagcccacgttactgagctcgacgtacaagtattgatttaatttcatatataaagtaaaacattttgaggtatgtaaccgatgtgggacaaaatacaagtttgggcttcccagatcccacatttggtggaacacatatataaagagtctcttcgttgattagcttcccagatcccacatttcaggtaaaaacatcgtctgggctctttgccattttagcgaatgtggaaaggtgtggtttttttttgctctgctatggattttttttttcaaatcagggtttctctgttgaagtcatatcaggagcttgacatttgtttgtttgggaattagaagctagatacgtatattatatagcatcgtacatatcaaattttggtgtgtgttctaattgaatctgtacttgtttgtgtgttagtgggaggagctcttctcagaccttaagactattgctttagtggaatgcttctcgtaaatgtataagtgaggaaagaaactccattcgtatctatctactaccctaagccgtttatgcattttctgtccatcagaagatcaacacctgtttctggaggattccattgatttaagggattagatggatgatggaccatgtgggattcagtagatgacaagaacacaaaggaatccacctaacagagacaacccacatgttgcaggaaatacatataataatatcacaagaaacggaaaaagaagcagacagagacacctcttcttgaatttaacgccttacattgtggtatcttccatcttctttactgcctcatggtgaaatccagtgcatatatgattatttatctgaggcgaagattccttacttcatcttgatgcgactactactggtccaactttcattggatcggttgatttgaggccgttgttcttacattttggtgtcccacctgttcttttagtactgttttcctttttgtttctggcaatcagaaaacataaaggcaatcagtcatccttctcaataacatacaaagatttggttttcaagagaatcttctatagaaagctagacgtttacttctgtcttattaaggagaagtactggttctttcatttatatcttggctggtttgggaattgcatccaaatttcttgcagtgggtgtcagcctggagctgcagaaaagtgagttgatgttagagattgtaggatcttactccaaaaagccagaaaaggtccttgcgactctctaacttgaaagttgtttcctttttttgaatctgagctggttttggaattttggtgtcaagatttggaatttgaatctgtagtaagattcaggtttagtgggggagggaacaagttggaagcttttgctagttttgtcaaaggtgtcactaaagtactaactatcagaaaacattttcagccagaagcttggtgatgtatcttcagattttcaacaacccatctcatggcttagctcatttatgctactctagtcgggtttcgtgtagggtaagactgagtcgtgtccttgccatgccaccgtcttcagtcctcttgcatatggacgaaagcaatgatcttcccaagcccaagaagggtttttgtctgagtgaagattcgagaaacagtttaaacagtcttcctgcagattctttgcttaggcaggccaacacagtggggattatcggaggcgtttcaactgattccactctgaaatttgtgaagaaactcgtggattggagctcaaatgatggtaaaagctcgttaccttttgtgctttgctcggatcctgctctcaacaaggagcttctcttatacgaggaaaactcgtatccttctctttaccatagagaagagagtactccggttgatccaaagctaattgtggaaaatctaaggaataagaggagatatcttgagaggtgtggagctaaattaatcttaatgccctgtcatattgcacatatatggtatgaagaggtatgtgaagggagtttagttcctctgcttcacatgggtgaatgcattgctaaagaactgcaagaggcaaaaatgaagccccttgaagctgggaatcctctgcgtgtaggtgtgatggccactagcgccacgttatcagcagggttctaccaggagaaactccaaagcaatgtcagtgttctattgtgtccattggaacaacatatctatcatttgtctaagttcgtataaagctagtattatccatcgtatgaagtgactctgtgattatggaaatgaacagggatttgaggctgtgcttccagacaaggcaacaatggagcacacggtgatcccatccatagaagcaatgaagagaaaagacatggaaggagcacggaaccttctgaggatagcgttgcaggtactgctagtgcaggcggtaaacgtggtgatgctcgggtcagatgagatgcgggacctcttgcctggggatgatcctctgctaaagaagtgtgttgatccaatggatgcactagcaaggtctgccatcaaatgggcagagaatagatgctcttaagggagtttgtgtgtgtgtatatttgtgaatagaaatatagctcggctgggatgaaattatcaagtgtaaaccagtgtttgatagaaaactcaaaaccaaagtctcaacatgtattggtcaaaacaagtgtgaacatctccaaagccaaaaaagtctgaacatgtgttggcttggatgcaatgtgtaatatcccttattattaatacagacaattattagtggaataaaaagatgaatcttgagaaatgtttagatatctgaaggaggatgaccaggcatgcttggactggttgtgttgttagggttcttcttgtccaaagggtttttgttcttatattcttcattgttgtcattgttgatccccaatttgttcttcactgcctctgatgcatcatgtgccatactcttcactttctcccctttctgataaaccatcaaatcttatttcttaaaaaagaatgaaaaacctaaaactacaaacatgtagagttgatgggttaagttaacctgctggagaaaacctgaagcttgagaagagttgttgcaatcattctccttcacctgataccaaacatcatttttcaaacaaaactctgtgtactaatattttaaagttaatacggtcgcaaaaggcacaagtaaaagagaaattgaacagaaagactgacatgagcttggcccacgatttggccggccctcacactgaattcctcatcctgtccgctcgccatttcttacttgcttccttcttctctcaaacaatttcttcctttataatcatatatctatgtgaatgcatcacatttttctcctctattcaatggtgttccatttttcaaggagagcttttctagctgttatgatccatcattttctaaatcatttttgacctttccaacttcattctttccatttttagatacaccttattcttgtctatttttttttaatcttaaaaattaactcttccttagcacaaagtctcgttcatatcgatataaccattacgtattacagacttcttgacgaaagattgaaccttttagccatattcttaacatctaacatcagcctcacacaaatcaaaacttttgccattttcaggagctttatcaatcactcatgtcgtcaaatccttcaaaatcattcacaccatcagcagcttcatctgctgagtcgtctgcctcttcatctgtctccattgcttcctctattccttcttcttcgtcttcatcactgtccttgtcctcatagatcacgggaccttcatcttcttcttcatccaagtcgtccacaatctaccattcacacaatcaatggcgattcagtaacatactatcaagtcaaaaactctgatttcttttgtaattccctaactgattcatgaaatcaaacgtcaaacctaatgccacccctaggttacacattgaaaccaaattcatcctggttttaaggtaagacaatacataccaagtccaagccacttgaaacctctacggcagtatgaatagttgaaacccgtgattcgatgagctgcacacacaaccaaaaaatacatatcaatgattcatctatagtgttttctgatctgtatctctaacagagcctccatggcaagcacagccgtacaataaaaacaagcactgcctaacctgatacatggtgtttaaagcgagtaatgatgactcttgggacataattccatagaatgagtaagtaacagactctttatccatggaattgtacaagccaaaatagcacccctgcaaagcaaaaaagtattaaactcccgatttgataaatcagcttcagcaaacacaacatatatatcatcaactctaaccttgattgtagtattggtagaagggcatttagaagcttgagtacttcggctgaattcaacttagcaaccgaattagcaatcacctgtaacgcatagagaaccagaaaaattaagaaaacaaacaagcaacaatgtaaagaaacagacagaaactatctgaaacctgctcatctcggttgtacaagcagtcgagtagaagagaacgatcatcggcatgcaatgcttgtctcagaagaacgttaacagaagcagcagtaggaggcttatcatcgccaggagcagaatctctattactctcctcactgttaaccttttcgccatttaataagtcaagactctcaagtttatcacctatcgttggctcatttagagtatcatctaccaatactccatctctatcttcatcaagacctatatatcaccaaatacgaaccctactataagaccggtaatgaaatctctatctgaaccaatccagagtattatactcaacagtctataaaccttcaatttcttaatttgataaatcttaccggaatctcgtgtagagggtatatcaggttcaggttcagctcgcttcttgctcttcttcttatgcttcttctctcggagaggagtatcagcgatatcacctgttgaattcataaaaacacaagagaagagctatgagctcacaacaaaactgagtaataggaaaaggaaaagggagatagaatgaaggaaacctgcagcatcagaggagagaagaggcttgagtttgtccttggccatggtcagcgatcgacgagagaagcggggagagagagaaagagaggccggcgttgggtttagttagggttcttcttcttctacttctagccgcaacaacttgacagttcacacaacaactaaaagctacgacgggtcgggtctaaattgggtgaaccgaaacgcttttttttatttgttgggccgacttaacccaatagttgggctcgtgtaatctgttccaatatcttcttcatattttatttcctcaataattatacttgttttactaagaaaaagattgaaatattatagttggaaggctgtcgttgatattgacacggcctctaataccttggacttgactgcataatagtggcaactggcaagatttgggattaggattgtggtatgtgtttttacctcttttatttgctagaaaagtaattgcacgtaaatggaatagataatatgtatatacatgcatcaaaaagaagaaaaatacaatatgtatatacatagatatgacagctaaaaaaaaaatacatattttctttctttcagtccacttattaaggaagataaacttttattttcttagaatacagagattagagaagcatatctttgggcataagaaaattgaaaattttgttaaaaatttagaaagaatataaacctgaaaaagccaaaagttaacattacaatttatttggtttttacagagaaacaaaatatgagtaatcatctctattgaaggaaaaaaaaagaatgatatccagttatttgtatttttctgccaaggacacgtataagtgttggcaaaaaaaactttggaagccgtttaaaaggaaaaacaaataaaggaaagagcaaaagaaagtcaaaaagacaaatgtggtttaaattgggaaaggaaagtagagagaggggtggacttattacaaaaaagatgtaagaaggggtataatggtcatgtttgaaaagacatatcttgtgctctcgacgcctataaaaacccaaccatgaccacccggacaatctcacattcacgcacgcgcatccatcttcaccgtttcatacgaaactctttacgaggagtctctctttacttttctctctctctcaaagaaagaaagaaaagcctcttttaattttctccggccagaggtatttaatagcttccgttttctttttctcttcttatggctgtgatttgatttactccttgggtctctctcgatccctccgatgatgttctgtcgttttgcggtttttgtggtcgtgatcagaaatttctggtcgcgtttgaatttgtttttcttttctttggcgataattatcgaattgcaatcgaattgatctgtttcgtcgtttgaaatctcctgatgaatcgaatgtttatgcgttgatccgatgattgagaacccctagaactgtttccgataagttaatagtttcaatttattttatcaataaattaaaaaaaaattgtctctttcttgtttgattatcatctgctgagaatgtagttttcagtgggattatgttcatgctcgaataccgtacaatatagactgatttgagctcgtccttgttctgtttccttgatctttgtttaacatttgggttgtatctattcggatgtaatggattatggattctttggctttcatattcatctgtgttattttgttgtgtgaattaacactcgtttctattgatttcagtgtgtgggatgcacaaggaaagagggaaaatgccggtttctagcaacagaaatagagtatcgccatacccgcttcgctcttgcaggaacaagaaacaaaaagaagtcgaggcgtcgtcgtcacctgttgagttagagagtgttagtgaatgggaggatgtgaggtgtgtgatttgtatggagcctcctcacaatgctgtcctcttgcaatgctcttctttctccaaaggatgtcgtgcttacatgtgtgatacaagcgctcgtcactccaattgtttcaagcagtaccgcagaagcaacagctcaagccgttgtagtggcaagactctacattgtccctactgcagaggagaggttcaggggactatgaagtcgacttgtgctcggagattcatgaatgctagaccgaggtgttgtactgttgacaagtgcgatttctcagggacctatgcgcagctgaaaaatcacttgaaaactgagcatcctggttttacaccgccaaagttagacccttgggagcaacacatgtgggagcagttggagagagaggcggagtacattgaaatgctcaacgctcgtcagagatgggatgcagaacagagattgttggcgacttctctccatcagcttccatatcgtcatcccatgattgatctcaactttgatgcgttggtgcataatctgtttcttggtgcgtccatggagagccgtgcaagcaccgacaattacccggctcacataccccgtctggagttccatgcccccatgtatcccagatggacgccatgaagattctgagtgccagagtctatgaggaattcttccaaaagttttgatgtctcttgatttttatcataatgtaatgttcttgtagcgacatcagttcttgttctaggcataaatttaatattgtttgtatgttagcttctgttagtgaagtcttcatagctaggatcatcttttgcctattcaaaaatctctgcttaaatcaaattattcacattcttcgtactttttatggttgcctgcaaactgtttaatttctttgctccattttgtattcagatgttagaaactcatatatcaaaatctcaaaatttgtttaaccgaaaaaggaagatgaaaatttccggtgatacataatgcagaaaacataatcaatgattgtttggaacagaacacaagtagcgaagcgtgtactcattggaagaacacatatctgccagatcctgatgggctctggtgatcgccttctgcaacgatctcagtgcaggcaatagagttctgtagttccgctgaatggagcttccgtgagccttgcagatttcctgcacataaaaagacaacacaaagtttgattaagttgagagcatttgagcagagatttatcaaaaaagagaagaaaacgagacattacctgacaccagtgaagtatgaactccagatgaggacagttctcaagcagatccaccaaagcttccataagcctttctaagtatttctggcggacagagatggcaacagcttttatgtctgcaggggctacagcgaagatgcattttttgataaggctatcttcgttcaaacgcatacttagagcaagtgctctgctaacttcatcctcttctatggcagcctcaacagcctacacaaacaacaccttagctttacatttcaaaaccaataatcagaactataaccaccatcagcgatttacaaaaggctcacctctggagtaacatctatatctagatcggtcggatcaaagatgaaggtatcgtcaattgaaaagatgaggactccttctgttgttgcagcagcaaagctccttccagttggggcaatgctgaggctttttgtccggataatgggcctgccacggttaggcctggatccaggcagatcgtaacccagattccctctcgactgtttatcaatgccaccttcttcatcgctgttgtcatcatcgatcagatcaattggtcctgcttctgtcatcttcttagagtgcaagaagtccagaaccccatctaacgaaagattatgggatatctgaaaccggcgcagaagaacctgaaaaggtgatattccagacactttgactaagtttctttatcagaagaacacaagctttaagaaaacctgaactccaagaggagctagttagctaacctgatctgcgatatcatacatgcaaatatatctgctagttcctgcggctagaatataccctccatcagcggaatagcacaatgttgtaaaacactttccagaacttgaattagctgcagaccgacggtcagtcatgacccgacctccagcgatatctctccgcccctctatggtgtacattaacacaccttcaatggtgtcccagaaattgatctgcccatctagcgtactcgaggctaattgcttcccatcaggacggaaagcaactgttagaacatcgtggttgtgtcgaaacgtttccacggtgcctttgctagcaaacacatcccacaaccgaactgtatagtcccatgaggatgaagctaaaagttgctgcagagaaagaaatatatgaactagataaggcatggaagttataacaccataaggcagaagttcacataattgttcagaggcacgaagcaaattgtattttgactaaaagaagtatgagactatgacagtttctttaccgttaagggagaaaacatcaacccatgaacaggagcctcatgcccactcagaatatcctttatttgcccagtcttcttggaccatacaaaaatctgcacataggcaagcataaagtgattcacctcaccaaagtatttgtgagtaggtgactgaaatccttcagggcctaagttgaattacctcgaatgaatctagggtcccagcacagacgacgtcaccactcgggtctgctgttaaggaaacaaattgtcggggtgtaggggttgtgtatgtcttatagttcttgtatcttttaaaatcccaagcacgaacagtgccgtccagagatgcacttaagagggagtggttgtcagccataaaatgaagagcagtcacggcattggtatgctcggtgaatgtaatgaaacatgttcctgacataacgttccacaccttaaaaatgtaacataataaaaaacgggctggttaaattcagaaatagatgagaagcatggtatagaacataacagttaagtctatgaaatttcattaccttgactttgttatcatcagcaccagttgccaagagctgcgaatccggtgagtaagtgacacagttgacgtcaaaatagtgtccttgttgcttcagtatataggtttcggttcgccaatcccagactaacagttgcccaagtttcgcgcaaccaaaggtcagccaattaccacgctcattgaagacagctgttgttagcttctgcctagaaatagagagcagatggatacagatgaaatctggcatctgataaagcccaaaaacaccatttgagaaccccaccacaaccatgtcaagtccctgatgatagtcgcaagcggtcacctttgctgatgcctgattacacccatccttcctcaacaaaacccattttcctctgtgcatatactcttcatcatcatcatctccttcttcatctgattcaagacctttaccgtcatactcttttcgtttcttaagctcagtaccaacaccaccaccattttccaccatcacctcatcagccctatctggagtaacaggtgacggtggctcagagtggccatcttctgattcatccattttgacatccttttcagtatagccccaactaaaaatgtaaccatcccttgcaatcgtgaaagccctgttgaccttgttagtcattttatcaacaccaaagaagcaacccacaacagaatctctatgacccagaaacaaaaatggcttatttaaaacacccttcaactttctaacacaaaacaacctagcagctaaatcccttgagccaacaagcaaataatcagagtccaagctccactccaaggagacaactttatcatcagaattagcaaaagtcctaacccgctcaaagggcaaaacagctcgcctgaaaccaggtgatcgccatatttccaccaacttaccaattccaacagcgataaacttaccattagggctgaacttcaaggcaccgactttatccttgaaggtaattctgtgaagaactacccgccgaggcaagttgatgaaaaggcatcggttttgttcatcgacggcgagtaggaaagtaccgtcgggtgaggaagcgaggcgacatatgttggtagaggtttcgagcggaagagtgaccgaatggttcttacttaggtcggtgacggagacacgattaccaaccggtgaaattagctgagtattcttagtgatgactgcgttcccgcctctgtaaggagcgccaagaagattctcgaaacggaactccatggcgtctggagaagaatgagaaggcggaggattgatatgccggaggcgataattacggcgttaggtttaacgagggtttctgttatgaactggattttagttgttgggcatatatgggcttcctccttatgtagtcgtagtaagcccaagaggaaaaaaaaattaaggatcaagattcgggatatttgaacccgacgtgaatcgaacacgcaaccttctgatctggagtcagacgcgctaccattgcgccacggatcctttgtactataaagttcatctattatatttctaaacgtttaattaattttatacatgcgaattttgcagagaacatcaaacaaactacagattcgcatctttaccatagaagagaagctatcctttgcttttcttctacacaaaaagttaacaaaatgaattttagtctatggtaaagtgattattgactcatagattgaaattatgaggaacacattgacttttttgaaatttagtaccttttcttggaaggttacgttacatatccgtaacattctcgctgtgttaattctttatcgattttcattgctaagaagactatattgacaaacacacacatcatcttaggtttaagaaccaaaaaaaaaaagaaagccacatacaatctgtgttctacaatactatatagttttgcgtatgatcatgatcatgatcatcacttgaaagaataatctctgattctttttgttgattcactcactcccttgtcgtgctcatgtccccgtctcctgcttttactttctccttgggataaatctgcaggtttttaacagcgatcttgagtctataattcttttcacaaagttaagattcatatcaaggatgcataacaaaacaaaacctggttgcctttgtcttcgttaagattcaatgtacggactttaagctcgcctctgcttgtcgttaactcgtctaaaatctcagcatcgccttcttggacgcctctcttcgagtcattcgactgtaaaacaagtttattttggcattaaattcaacaaattcaaatattttaggtcactgtagatgccttagatgacaagaaaacctccatggtttagtccaaagtccgggatcctcaaaaatgtagatattgctaagatatggactaacccggaaagacagttccagcgggtttctcggagtaccggggatttcctcgtactcagcggcatcgagttctcggagatgggccgggttaaagagcttcgggagaatgtactgtctgatagctattaagaggaagaaaggaaccggaaacatgattccagccaccggaatccacgtcaccccatagcacagcccaaagtagaatatctgcaacagtgtgaacgcagccattgacttgtaaggaactttctccacgaacgacgcgtgtgctccctccaagaccctgaaaacaacaatgcatgatcagtctttgaagagaaatctgaataataataacttgaagaaaaaaaaaacagatcattttcagaacatatacttgaatctccggcttgttggaacgaagagaagcgttaagcgttcgaagaattgatttcccgggaggctgtcgatggccatgtaagcaaagtatccccatagaatggaagtcggtatgagcttaatggccggcatagccaacactgcacctgccacaagcagtgactgcaacaagttgctaactctctgctcgttgactcgaacaggcaagtaagcgtcaaggtgcttctctggatcaaaaccactctcctcgtctccctctctttcttcatcattgctcttcattactgcttctttcagatcttgaagctcaattatcactgatggatctgtctgagcctggtttttaaaagcaagagcttatgattattctaaattaaatcttgatttttctttcaccggaacattgaattatgagtctactacttacaagtggacttttatccatttctatgaagacttcttgcatattctcgtacacttgtgaggatgtttctctcttcctgatgctttctttggctgtctttaccatcttcctccggatcaactgaaaatcaaacaggttcattaagaccagcttaacctgaatagtgagtggatcaacaactgagaagtaattaaacctgtcgtttaagaacagcaaggcttttggtatgcataggagactgagggaggactccatttgaaggaggcagacctagcaatccacatatcaacgtctgaaacaaagacaaagttttagagattttaacatatattttcaatgttgtaaaggtagtttgattgattataccatgaaacccaacaagagaatgtcatagtgatacgctgaaggcttcttgaggttgaactccttctgctgagcgagctgcgaggcaacgctgtggtcaaagaagtaaagccctgcgatcatcaatgcgggtataaatgccgcaaatatgtaacccggagagacttttcccatgtcctgtacagaccaaatccatgtattaaaactttaagtttggctcggatgatgaatcaattatctttagtgtactgtgtttttgtaaccttgatgacagtccaatgtgataaagaaggagagtcccatggtaaaggactaaagagtcttctcgggacaccagaggggagttttgatggtgtactaaaagacaatgctgtccaaaccacaaccatcaaaggaactccatagtctgcgatgaagcttctgtaccatccttttcaagaaaccagaaacttttagaccgatcatacacagaaatgaccaccaaagcatgagaaggttcatctatcttacctgttccgtatcgccaagaccttgcttttcgactcttcaaagcggtgtagagaaggccaaaggtgaaaatgaggccgagaagtccgtttgtatagagccactcaaacttatacttttctagttttgagtcctcatcttttggcatcccaaactcactcaccatacccttaatggcttgttgaatgaacagaacggagatcaacataccaaacagctcaccagcaaccctcgtaaaccggttaatgatatcagccgtattgaggattgccattacgaacagtaacagagccgtccacacacaaacccttccaatttaacaaccaaacaaaaccataaagaaaaaccacaactttacataaaaaagaagaagaggagaagagtcttgtggagtaattaccaagcagcccaagctaagtagagttgtttgcctaattctggtcttcctatagcgaagttgtacaagtaaacgtacattaagacagttggttctgcaactccaagtatcaacagtggttgtcctcccaatattgagtgtattactccacataacgctgttgatgctaacgtttctactgtgctcaacgctccctctataatctcctcaaaatttaattcaaaacaaattcaaatttgtttttttctcttcaaatcagagaatgcaaaactaaaacccctcccaaaaaaaaaaccagaccaaacgtggataacttgaatacttttgttccactaaataaacgtgaacacaaaaccgtaaagaaagcaaagaaagatgacaactttgagagagataagctcaaagaaaaagacctgtgtcgcggctgagttgctccccaaaggcgataaccggaagagcggaagcgaaaaaaatatatgttgtgggtgctaaaatcctgcaaaacctctcaaaatatcaaaactttgttctatgtttgtgtcagatagtgattatgtaagagtgaaaccagtatttaagtacccgaaaccagaacggagaccagcgacccagtcttccttgtaacacaaggctcttcctctaagatctgctactatacctctgaatagcctcttcgagctatccactctttcttcctccatatccagaatccctcaaagactccagaactcgtcgcctctggtctactctttatatgacctaaaccacaaaaacaggaagctatatattatgtatgacatctagcaatgactttaaatctagcattttgctgactacatttaatacaaaataatcttcatattatatttttctaaatttgtgacgattccagtctttttccacctctcaatagaaaaagaagcttatagctgttttatcttttgttacttactagtaatgtcaattttctatgcttttatatgaataagaaaacgcaatgtgcccaactcaaatagagaaacatcacaaagcacataaaacaaagcaaaacgtaatgcaaaatttcttcttatgacaaagatctaagtctcctcgtctcctctctcataaagtgaaatttgaaattgcatatgcacccaaaaaaaaaaaaaaaaaaaaagaatccaactttttcaataaaatccattaattaatatccgtcgtatattgaatctacacctttttcatagttttgacaacgaaattagcagtaacaaatcctttcacatctcacaaaaacataatcagacaaaagaaaggattaaacaaaatcagacaaaggagttaacatgcaataactcggaaatttgaggcgtaaggaggagcaaactaccggcgacgaaagagaaaaggagaatagccggagccgagaagtaactgtgtagcgatttatagggtttaggaagatttataggccaaagacgaggcaacgttagcaaatggagagacagggcccatttatacacgtattatgttgggcctacatccacatgtcagtaatcgagtgggtgattctgacatctgtgatcttgacgctttaacactctgtctgttcttttcgtataagaaagtgacatatatatagagaggaacaattcatctaaattaaataatttattattgaaaattttaacttaatatagtttttttgtataatgttgtttcctttagtcttcattttttcttaagttatttccattttaaaaaacataccaatatgttatattctttgcttaaattgctttaacctgtatctagaaaatgtaatcttccatattgttaatttcataaataaaataaatttttttgcaagttattggaaaacgaagttaaaaattaatgctgcaccaagtttgtgaaattttaaaattacttgtagttggagtgggtgtagatgtttatgtgtagaaataggcatgcacacacaatttaatatagtcctagttacttatacaaaaaattcactgctgacgtgatcagtaatgcactcatatatgcatatatcactccacgtcaatggcacttgcccgtgcaaatgcctttattgtgccagaatcttcgaccggtcaaattgcgtgtgtgtgtatatatcgaaatatatgttatcaaaagagtttgaactttgaacccatatctaatacctgagtaaagttttagcattctattcaaagataacatgtagtacatactaaacaaactatatgtatcggttgttatcaggaataataagaattgtataatgcaatatataattaagtggtacttatgattaatacatacacatggatggtagatcgggatttgaaaaaccaattaaaatctagctttgaaaaggactcgagattctaaacgccgtaccaagaaagttcagattattatttcatgatgaatcattgagtcaaacacttaagcatcatatttttaatttcatagtttatacgttatccacatatataatattaattccgtcgacgacagtatttatatcagaattaggacaaactacatgtatatatttagtcaatcttgaaatttaaaaaaatgcctttgctaagaataaaaattatggttaggtgaagttctcacgtaaaactattcaatcctcacgcgattgaggagtgactgaccaaagtttatttctataggggcaatttaataactattgtaaactttcaacgtaaaaattaattactttgaagttatggggcaatatcatcaatagtaataaatataagcccttactcgtaaaatacaaaaggtttatttgttttctgaattgagagcgtgtaactactaccatcgtcgtctccgcgagttcttctctgcgtttaagccatagataacaaaccaaactaaaaaaaaaaagtttctccttttatcattccttctcttcccttgtataggtgtgatcctcttcaaggggatttctctggcgggtcatacattcgcaccgatcaaagtcggattggtctttcttaacgcaatcttgacccgattcaaaaaatttctggtatcctttttaagaaatgaaattaattgattccttgtcttccaaacgagtaaatcgactaattgattagattttgttcattagggtttgttagtgaatagataagaagataaatgggagctccgttagtgtgccacgggcattctcgtcccgtcgtcgatgtggcttatagtccggtgactccagatgggttctttctcattagcgccagcaaaggtatgatcttcgatcgatttgtatttgactatctatgatctttacttggaactgtgcctattttggattatgatttgcatagcgaatgtgctttgacgaatttgattttgctgccttttattatatatcgtctgaagtttgatttgtggctgatctaatggagaaattaggatgataagttgcatacattgttgaactctagctgaggtttctttgacttttgatatttcagattcgaatccgatgttgaggaatggagagactggtgactggattgggacttttgaaggacataagggagcagtttggagttgcagccttgataaaaatgctattcgtgctgcctcagcttctgctgatttcactgcgtatgttcttcttctttcttgttgcgttttcaagtcttttactttaccatttagtcttgcaatttcagtatcctccggtgatgggttgtttgcttaaagttataagttatggggaaactatgttcctagagaaaaatggttaagtgagaatagattaatgggatttaacactatttctttgttttcatgacacatttcaggaaaatatggaatgcattgacaggagatgaattgcactcctttgaacacaagcacattgttcgtgcatgtgccttttctgaggtaaactgtagtttcttcccaagcaaagagtgatttgatcctgttgccaagttttctggtttaaggatataatggtgggattcactaagattacttgtagcatttgagggtctataatcgttggtgtcatttgtgttactattgtggtcttaatgcataactatttatattctaggacactcaccgtttactcactggtggaatggagaaaatacttcggatattcgatttgaatcggccagacgcacctccaaaagaagtcgggaattcccctggttcaattagaactgtcgaatggcttcatagtgataatacaatcttaagctcttgcacagataccggtgacattaggtatgccaccacgtcgttccttgggtttagactcagtcctttagtattcctggtttcattgttcttttgtgtatgtcctctgtaggttatgggacataagaagtgacaagattgttcatacattagaaacaaagtccccagttactagtgctgaagtaagtcaggatgggcgatacatcactactgctgatggatctagtgttaagttttgggacgctaaaaagtaagttaaaaatatagaaatgcatcctcagttacagttttatcgtttttctttgatggttgagctttttctcctgctctcctagttttggattgctgaagagctatgacatgccttgcaatgttgaatcggcatcgttggaaccgaaacacggtaacactttcattgctggaggagaagatatgtgggtgcacaggtttgatttccagactggagaagagattggtaagtttcttttaaaaaagaatgaagttttcattttaggaacctgtgtgtatcctttaaagccaatgtggtgaatgtagggtgtaacaagggtcatcacgggccagtgcactgcgtgaggtatgcgccaggaggggagtcatacacctcaggctcagaagacggaacggtcagaatatgggtggtgggttcggtaaaccatcctgaggagagcaatctaagcggccacgtgaagcttgtggcagaggaggttgtgcgtaaagctgaaagtctccgtatcagtgagaaagccgcagaagctaaatgaaacaccatcgttagcttatgatatcacatagattcatagttgtttttgcatcattataagatgtgacaaaggggttttgccttttaaaagtctctcagaccgaataaaacgaaataatcttcaactatacttgagtgaatagtgaatctaatccaaattttgacaagaaactttacaacggtatcaaaaatatctttaaacaactgtatgtcataaatagttgcaagttttgaaagcccagttgaaactagaggggcccagaaattaagcaaacatcaaatagtcaaatacaaagaaagtgtgaaagttaaaaccctaaacccttaatttgagctctctgctctcctggttttagttttcctctatttcgtgctcaattcgcttgttctccagttccactctgtaaggatctgttacttttctgtaatcctctcaaaattcaatgcttttgcttactgggtctgatctttgcaagtgaaatgcatgacatttcgtccaaaatcagaccttgcaaaaatggtttcttttttacctaatctgtttcgtctgtgtgttttgatctttacaaaagcagatcagtgccggcggcgatattgtccgaggataaaacatgtttgctctttccaaggttttgcggaggttggtttcctcgattatacacttgttataccatttgattctttatttacttttttcatttgtcttctctatcccaaaattggatataattaacagttctctagcatcatgcgagattgaaatgcttcagtctcacagctttctattattaataattttttcagaagtcagagtctccgcctaggagcttgcaatgctgtctactctaagctagatataccattgggagaaagaaacattgctattgaatcaaacgctttgattcatgataaacacgaagctttgcctagattttatgagctctcttggtcttcctctaccggaagacgttcactttcctcggacgctggagctaaaactaccggagatgacgatgacctcgaagacaagaatgtagaccttgcaactccagacgagactagtagtgatagtgaagatggtgaggagttttccggtgatgaaggggatattgaaggagcagagctggaactacatgtcccggaaagcaagagaccatcggagatgtttaaggccattgtttctgtctcaggtctgtctgtagggagtgctcttgataagtgggttgaacaaggaaaggataccaaccgtaaagagtttgaaagtgcgatgctacaactccgtaaacgtcggatgtttgggagagcattgcaggtactgagtactctttgtttcaacttgagctgaatattaatgtccatcaattagttcagtatcaaagaatgttgcttggttctcagtaatgctttctgttttgtctccagactttctgttctctaagtgttttctctcgtttctgcgatgtcttgttgttggtatagatgacagaatggttagacgaaaataagcagtttgaaatggaggagagagattatgcttgtcggcttgatctgatttccaaggtacgtggctggtacaagggagaagcttatatcaaaacaatcccggaatctttcagaggggaattggtctaccgaaccctcctggcgaatcatgtggcaactagcaatgtgagaacagctgaagcagttttcaacaaaatgaaggacttgggattccctctgtcaacattcacctgtaatcagatgcttattctttacaaaagggtcgacaagaagaaaatagccgatgtgttattgctgttggagaaggaaaatctgaagccgaatcttaacacatacaaaatcctgattgataccaaaggatcatcaaatgacataactgggatggaacaaattgtggagacaatgaaaagtgaaggtgttgagcttgaccttcgtgcacgagctctcattgcaagacactatgcatcagctgggcttaaagagaaggctgagaaagtgctgaaagagatggaaggtgaaagcttggaggaaaatcggcatatgtgcaaggatttgctttccgtctatggctatctccagagggaggatgaagtgcgcagagtttggaagatctgtgaagaaaacccccgttataacgaggtccttgctgcaatcttggcttttggaaagatcgataaagtcaaagatgcagaggcggtttttgagaaggtgttgaagatgtcccatagagtttcttctaatgtttactccgttctcttgagggtttacgtggatcacaagatggtctcagagggtaaggatcttgttaagcagatgtcagacagcgggtgcaatattggggccttaacatgggatgcagtgatcaagctctatgtggaagccggggaagtagaaaaggctgagtcttcactgagcaaggcaatacagtcgaaacagattaaaccgttgatgagctccttcatgtacttaatgcacgagtatgtgagaaggggtgatgttcataacacagagaaaatcttccagaggatgaagcaagctggctatcaatctcgcttctgggcgtaccaaacccttatccaagcttatgtcaatgccaaagctccagcttatggaatgaaggaaagaatgaaagctgataacatcttcccaaataaaagattagctgctcaactcgctaaagccgatcccttcaagaagacccctctctcggatctccttgattgagttgcgttacagctacaacatcatccgccttgtgaatctttggtttgattgatcaaccttttatccatgttggtagaaacttcagtagcttagtttaaaaaagacctcctgatatataaattctgtttggttgctgctatctggtttttatttagtcccgttcttccggcttaatataatgacaatggtggtgagcaaacgaaagcaatttacttcgtattccaaaccggataaatttacagagacttgcacgattctgtgccacactcatcttcaagtgtttaataaataaaatcaccctcgaatcatacaaaacacaagagaagggaaaggttacaacactcattagatgaatttacctagcagggcctcaaatttttgggcgacactaatcgattgtaagctaagaagacgacaagaaaaacaagtgatctggctattgactctggagatctggcctaattacaagtctagtgatgaacggggacatggctgcaagaagcgccttgggacactcctcatgtggtaaatgcccacatcctgagattgctactagtctctgttgatgacacgaatgaatgtcagttgctatcttgacatgaaaacaaaccgtagctgggataagagagcttgagtttgaaagagggacttacagagttaaggagtttagaagccattccttgggaggacttcaatggcacaagggcgtcttcggccccagcaatgactagcactggcaggttttcaacagccttcagaagcgaagctgcattttgaggtgcaagcaccatctcagatgaaagtctacctatctcatgaagtgcctcatcccagccttctacgtgtaatggggcctgacaaggaggaaaacacattatttgatacatgtctaccaaattgcaaatctttgtttgatgtagggtaccttgtatagccgtaggacgtctgtagtcatcttggcaggatcataccaagcacggcgattcaccacctgagctatctcagtgcgtaaaagagggcgaacgaggtgcttcttccctagtgatgtgtgcagaagtattcttgcaaaagctggaactacttcccttgataagctagtattaagcaagacaactcctttgaccacgacctagaaatatcagtaccaactaggtttagaaaggaaaatatataagcctggacaatatacatctgattacaagtctactcactttgatgggatcgtttgttgccatcaatctttgtgcagctttgagagcaagtagacctccgtcatcatgaccaacaaatactactgaagagaaccccatctcataacagaaagcaataagcatctctacctggaagatccaggcattatttttgtcaaagaaagcacaaatcccccattgaggtttaatatcaataatgaggagacaactacctgattttcgagtgaataaggattgagcagctgtctttcttccaaatcattcttatgtggcctggccgttaatccccaaccaggcctatcaaatgcagtgacaacacaaccaagctgctgagccagtgaacccatcacatgcctccaagaaaacactcctcctccaaatccatgaaccaggaccacaccaaactgaccactttcacccaagtcttgctcctcagctccaaaattgaatacattcatgtcatccactagtcccgttccttccttaatctctttgaaaagaagaggagaagtaggagaaccatccagaagagggtcgtgcaaggaagaattgttaaacaaactgttgtagctcctgtggtgatgatgatgctggcttttggtgaccatactcaacacttttctgtcaaacttcgaccttcctgccattatctctggcgtattgtaactagaattggcttcgagaacatttgaggagatagactgccgaggtgaaccaggtgaacaaagcttgtaatgcacagtgaggcctcggattgtaacgaataaactgtcaacatcagcaagcaatctcactggaagctctccttcatcgtgggacaaaggctttcgccttgcttctccatcaaacttggaggcctttccaaccacaggagtgggtgaccgcgggactttctggtggccagagaagatgcttttgcatgaaagaacctgccacacacagtccatttaaacaaaaaaaaaacaaagcaaatgacttctattaatgagattcacgtgaaagaaagaacaaaaactcacagcttcagggtcaactcggtgatacaaaattttcctcctcgctctgcaacttgtcctgtatgctacaaccgtatgaccaagggcaaaaaccacagatgagaggaacaaaaccggcatcccccacgacttcttcaggtggagccgtttcctagatggagagaacgaggcttcgttgttgagttgagaattaacagtgaaaaggcaagctttaactgaaagaagaagaaccgaaaccacagaacacagagatacagttccaaggtaaggaccgtgcgagagagcaggaacgtccgagagtaaatagatacctattccacaaaatgtacaactaatgatcattaaaagagcagacttgatcatcaatcatagctatctgcgagagctaactcaaccaacagagctttgaacagtaacagccaaagaccaaaactttactatgacaaattcataaagatcaaacagtttcctaaacaagagcaagaaaaaagcaacgatatgaccttacagatgacaaggaaagatctgacaacagagacgataggaatatcagtcaaagatctcttgaaaccgtatcgcctcagatgctccttggcgccgtaacacgtcacacaagtaaagctcgacaacaagaagctgggaaccaacacatcacctatagctactaacaatggcaacgaggaaactagcagcgaagccaacatagcaaccatgaagaacaccgtcctcaaacatcttctcgccttctcaaccaaaaaccaactttttgccatcctctccgcttcaatcgggtcaaaccccaatcggacggctctaactcctcctcaccaattcaaattttacaatgtgtctacaaaaagggctctgagattaaccaaatcagatcctttctatgccggagttgaaacactagatagaagaaacagagacgtccaacaatccaacgaatccgggttattaattggaggtaaaagtaatggttttgccatctgccgacgacagatcggcggtgacaacgatgataaatactagtctctcttttttcacaaacgggaagaaaaaaagaaagaaggatcaaagctcacaagccaatgctacgattctgacaaagagattgaagaagagtgatattcagaatcgcaggaaagacgaaatagagaaaaacaaaatgaactttttggttttctctccagaaacaaaaacttccgttttcttctgttcttttttttgtttgtttgctttcttcaaccattcttttttaattacattaatattgcacgtcgtgttattttattttaactttatgttttaaaaaaacatataaggaagtaagtactactcctcagtgttttaagaattactatattagttgactaaatataatttactcaattaaacatgcatttaatttgttcagtctcgtaatagacagtgattagtgattactgtattttaatttctcttgtttacgaattcataaagaaaagaaattagtagtacacattacacaacaacaaaacgtaatatagaaaaacttgacaacttggtctgactctgagccgtctctgctcggtctgctgtcaaaatcttttctttggacaattctaccccttgttttaagtgtattaaacattatatattcgaggccgaaagagttttcgcactttattcaaattgactaattgagcatgaaatacagcattaagaaattagttatttgtaattaacgaaactttgacctcactttttattctccacattgtatgatagatagatccattcattgaccattgttcatcgtgatgccaaaaaaaaaaaaaaaaaaacattcattgtccactttagttaagctggtaataaagcgagtatagaaaataataccgcaaatatccgaatatattacctaatttcctaatataagacatgtatatataagtcgacggaaaagacggtaataattaatatttccatttaggacctaatgccatctcattttcatttccaaccgtaaatatttttaatgtgaaaacggtaaattttggtgcaagataagtaactttactaatactgttgatttgtattttgtagttgtagttaacaaaggaaattcggggaataaagaaacatagtaagggcacaacaaaaattttatctattaataaccacatggtcccaaaaagccataataaagtcgtatgatgacatgtttacacgaccatcgttagaaaattaatacatattacggatatcaaaatcacacccaattttcaaatctctttatctaattatctaaactgttccgtttttagagggacccaacaacaagccaaagcaaaaactttctggtaattgaatgtatattgtatcatttcgccaacaatttgtttgaaaatggatgatttcgccaacatagtttttggaagaatctgaagttttggaaccctatttataaattatataagtccattaaataaaagtatgggccgcgaaggaaaacgttatgggcttcgtattgggtttataatagaaagcccaatatgttaaaatttatgaaggaggctgggcttcacgtgagttattactactagacctctgtattcttctgaatctgacatatcgctgattttaatgcgacgtggagctttataagacgcaattcatcaaaatgaatgagccccactattttgttgttgttttggagtttttctgattgagggaaaagatgaaggggatcttcacagtcccccaacaacactccattggagccatttcccaagttggtaacacgtttatcaaagccctccctcgttttcatcaacaacttatcgattcatttgctttgtagatctctctttgtttcctgagctgagtttacttaggactaatcttcttcttcttttttttaaaagaaataaatgcatggcaagattgaaaatcaaattaaaattcagtaatcactatgctaaactaataccccatcaatttataatagaaaatcaaattttgatacgttaccggtggattttagatatactcatactaattaattactaggatttcgaaaatgactagacatcttcttgccatatttgctaagtatgattgaaatcaaactgatttaaagttagtaatacatatatatgctcatgattttcttgttttttggggtcaacatacatttctgcaaatcaaatatgctggtttaagtctactaaacacaaaagttctcatatattaatatattttcttttgtctcaataattctagtaaataaagtagaggaagagaatgatgcacgccagtagagatttttattcatataaaatcgttgtctttagaggaataatacatgccttaattctcaacaaaaatacatttataatgaggaaagtttactcaagttgcataatatatcaaagtacccaatgcacgaattctaatctttttttaatactaatcattaagtccattttgacgaaatatgtgaacgtcattacaaaaatcttcagaatattcagaccaattcaattttattaattacaaggattatcagcttcgaacataattagacggtaagagccgccctgttagggttttttgtcctcaatgccaaaatcctcccattgcagatattatatcactcccactgtctaataaacaactctcttctcctctctacccagagcgagtcaccttatcgtctctctatctcctccttcctatatccccttgctctctgggtttttgctcagtgtgctacgtgagagatagagagatggaaggtctgattcaaaccagaggaattc

SEQ ID NO: 43 - DNA, 80442 bp, Arabidopsis thaliana
aagcttgtcagtgttgtatccacggataatctcgcaatttttatcaaaagtttgatcatcacaaaattttggtaatcagtctcctttgattttacttgttgaaatgaaaacatgcaacaaacagtttatgagagtattgttgattcaagtaaatcagttttgaataaaactgtactcagattattgctgctaaagtatatgattcatgaaatctgaaattttgaattagttcagtgtttaggctcaatatcaaatattcgttttcgccatttgctcattcattgtgaagatcaaggagagaaacatttggcctgcttgaaacatcacatcaaaatttgaaaaccaacaaaattgaaaagattatgatgtccaagaccaagaccaaaatgaattttggtcaaacatgagtcaaacatgattttttttctttttctttttctttcatcaatgtgtttttagtcgttatctttaatattgctttttcctaactctccttctattggcgcatttattttttctgaatcctaattcattttttttttgttcttaaattaattccaatttccaagtcctcttcatctttattgctttttttattccctaactcttgttttattggcatagaaattttcttcggatcctcctcactgtctctctatactccactcttcatcaagcgttgggtcatcgccgtcttccctttccttccctctctaacgtaagctccagatttcttctattctctgttttctcattgaaatccctagtaatgattttctctattctctgggcatttcgtgcttcaatgcctttactcacttcttctttaagaaaatattttggatttctctatgttccttatcatgcatgcgacatgcgtgaatctcttagctgagttttgtaaatgctgtatcaatttcgtctcttttgctttctctagtttattttttccttaagttcttccctagggtttctcttgctctgaagatttccatactatcgactcagtttgctagaaattgagtctcttttgggctttaaactttgctgcatgaactatctgatgtgacagactcattttaactctaaaaagtttttcgatttcttagagattctatttagcttgtttggtgaatgcatcatcctcttggttgctatttttcatttgttatcattcttttctccaggtaaagcaggtaggatgagcatttctgatgaagaggctgagatcagcgagtcagagattgaggactattctgaaacaccctaccgccttttacgcgacgggacttacaaggtgaaggtgaatggacagctcagatgcccgttttgtgcaggcaagaagaagcaagattacaagtacaaggagttgtatgcacatgctactggggtttccaaaggttctgccaccagaagtgctttacagaaggctaatcatcttgctttagctatgtttttagagaatgagcttgctggttatgcagaacctgttccacgccctccagttgttcctcctcagttagacgagactgaaccaaaccctcataacgtctatgtctggccatggatggggattgttgttaaccctttgaaagaagcggatgacaaggaacttctacttgattcagcatattggctgcagaccctttccaaattcaagcctattgaggtgaatgccttttgggtcgaacaagattcgattgttggggttattgctaagtttaacggagactggagtggctttgctggtgccacagagcttgaaaaagaatttgagacccaagggtccagcaaaaaggagtggactgagaggagcggagattcagagtcaaaggcctatggttggtgtgcacgtgcagacgactttgaatctcaaggtccaataggtgagtacctctccaaggagggacagctaagaacagtttcagatatttcgcaaaaaaatgtgcaggatagaaacactgttctggaagaactttcagatatgattgctatgacaaacgaagatctgaacaaggtccaatacagttacaacaggacggcaatgtcactgcaaagggtcctagatgagaaaaaaaacttgcaccaagcttttgctgacggtatttactgacacactgatatgtttccgactcatatagcatttagggtatctgactattttttatactttatctcctcagaaacaaagaagatgcagcagatgtcacttcgccatatccagaaaatcctatatgataaagagaagctaagcaatgaactggatcgtaagatgcgggacttggagtctcgggccaaacaattggaaaaacatgaagcactaactgaactggataggcaaaagcttgatgaagacaagagaaaggtaatatcgttttcagtatgatacataggaaacaatcagtctgttcatatgtatgcatttctcttttccgaggaaccaatgatcattttatgtttttttttttgctttggcagagtgatgctatgaacaaatccctacagttagcctcacgtgagcagaaaaaggctgacgaaagcgtcttgagacttgtagaagaacatcaggtatattccttcatagcacactacttaaactgactaacaagttaattccaaattaagggaaaccacccgtacctacctttttgtgtctgagtttgaaactctctccttgccagaggcaaaaagaagatgctttgaacaagatccttctgcttgagaagcagctagacaccaaacagacactggaaatggagattcaagagctaaaaggcaaattacaagtgatgaagcatctgggggatgatgatgatgaggcggtccagaagaaaatgaaagagatgaatgatgagctggatgacaagaaagctgagttagaagggctagaaagtatgaactcagtcttgatgacaaaagaacgccaaagcaatgatgagatacaagcagcgcggaaaaaattgattgcggtacagatttctaatgctttagtgttcttgggtactgatacagttgcattttgcaattataacaatatgatcctgagaatcgttttcgtttttcgcatctaaaataattcagacatggtcaaacactctagtttgttggttatctttagttgacaactgaacttgcaagtttaacataaacctgtttgatgggatggattgaatatgagtttcaatttgataagattacggtgtatgacgtctgtaggtctctgataaaaatcacagatatttaccactatatcttgtgagttattaattgatgggagaacttgataaacatcacaagactcaaaaggttgctctttgatccagggtttgacaggattgttgggtgccgagaccgatattggagtaaaaaggatgggagaacttgatgagaaacctttcctggatgtttgcaagctgagatattctgcaaatgaagctgcggtcgaagctgccaccctttgctctacatggcaggagaaccttaagaatccatcatggcaaccattcaagcatgaaggaaccggggatggagcagaggtaggttcattcattttacaagtctttatcacactgaatcattgctttaggttggcgccaatatgactttgaaaagtttcttggccactgttttagttaaatatggagtaacctgtgatttctgtgaacgttgatacttgtatccatacgttggtacaactgtttttgtgagttagcggtaatggtgttagatggtaatggttacaggaagtggtagacgaggatgatgagcagctgaagaagcttaaaagagagtggggtaaagaggtgcataacgcagtaaaaacagctcttgtggagatgaatgagtataatgcaagtggtcggtacacaactccagaactgtggaacttcaaagaaggaagaaaagccactctgaaggaagtgattaccttcatttcgaacgacataaaaattctgaaacgcaaaagaacctgaaggtatgctaaatcttctacagttgacacaggtctccttataaacactcagaaacgtgtaagagtctttataaggtttagggtagaaactcgtcaacaaatactgcagaggcatgatctcttttgttgacttcagttaaagaacttgaattatgatctggtctggctttgttcttgtgccattttgatttgaactgaagaatccaatggtcttctacttttggttgctggattggagaagcaggaagaagaggaagaataaatggttaagctttatgtgatataagtaactgagaattgatgtaaaataattaggatgctcgtatgcgtatggagattggagactaatttctttcacttatcgttgaacctttttatttaaaagcattcgaatctttaagttatctctttgtttatgctttttgttttatatttttgttaatagccaccaaaaatcattgagtaaaaaaaaaaaaagatttatcattttatcagctttgattaaaatgatgatcatacaagtttgtgggtttggcaagttaagattatttgggcaagtaacatagtcaatgatctttttttaaaaggtttcttcttgggaaagaaaaatgagaaccctaaaggaaataaaaaaagaaagaaagaacacgatcaatttaggatttattttggtgcagaaacaagaaaacttgtggcgaagagctaataaatagattcagaggagaaatagagagagacagagagcgagggacaaaaaaaaatcgattgataatttttttcggcagagtcgagaaaattttgatatattaatatccgtaattccttaaaaagcctcctcttcgtcttcttcttcttctcctccccagtttcgcatcattctcttcgataaccgccacatcctctgaaaccctaatctggagaatcgccgccttctccagaaaatatctatttctataccttgttcgtttgatttccaggttcgaatcaccgcctcctcgtttctccatttccgtgtttgtttgttttggtttcgtttgaatctttctgctagatatattcgttgtctttgggattttgattgttcttggcattttgaaattgctttgcagatactgatgaaaccggatcggatctttctctagatccgttctaggtttatcgatttctttctatcaatctctcgcatccggatgctttttgcaagttcttgaagcggattcatcataaatcgacagagaaatgtcgcaggctccgaatccagaagaagaagacgacacgattgaaatccgcgaggtctggaaccataaccttgaacaagagatggctctgattgaacaatccatcgacgatttcccttacgtagccatggacacagagttcccaggaatcgtttgcaagacagtaacggcgaatccaaacccaaacccatactctatacactacgaatacaactacgataccttgaaggcgaacgtgaatatgctcaagttgattcagctcggtctcaccttatcagatgagaaaggaaacttaccaacctgtggaaccaacaagcaatgcatctggcaattcaatttcagagaattcaatgtcatatccgacatgttcgccttggattccatcgaactcctccgtaagtcagccatcgatttggagaagaacaacgaatgcggtgtagacgcaaagagattcgcagagcttctaatgggttcaggagtagtgctaaacgataagatacattgggtgacattccattgcggatacgattttgggtacttgctgaaactcttgtcagggaaagaattgccggaggagatatcggacttctttgatcagatggagaagtttttcccggtagtgtatgatatcaaatacttgatgggattctgtactaacctctatggaggtctggagaaaatagcggagttacttggtgttaaacgagttgggatttctcaccaggctggatcagatagcttgttaacgttgcgtactttcatcaagatgaaagagttcttcttcactggttccttgctcaagtattctggttttttgtttggattagataatcctcggttgctcactggatccaaaaattaaaattgaaaaaaaaaataaaaaaaatgaaaaaatttaaaactgttttttggtgtctttttggttaggctgcttttaggctatgtggaattacaaaataggtgttaagagcgtatatgatgcacaagaatttagtcactaaaaaggttattccatgatcttattaggtgaagaagaattgtagaaatgaaatcatgtatttaacatttggtttagtgagtttgattgttatggtgaaatgattctgcagttttcttattatcgatgataccatttcgtggaattgcgttttatatttcgcaaaactattgacaataacaaacaaatttcagttgtttacaccctttgtttgtcaaccacaacttttccaatgattccactaatccacgttgctgccaatgtctaatatcgtatcaattatcaaaattgtgggagagaagggaaccaccgaaataataatgtccttacacaacgtcgtctagcccaattaataggcccatttaagcccaaataatacagaattgtggccctggtccgctacgatccgttaaaatctgaaattagggttttagtttaactctccatataaattgttccaaatttcattcgtatcctttccgctgctgccgtcttcgtctctgaggtcagtgtttcagctccttgaacgatatatacgatcttatcgatttcgcattattctatcttaggctatgtatatgactgtcgaacttagttttaccgccgccgatttggcttcgttatattttccctagtagaattaattgtttaggtgtttgctaagctcatttgcatgacttatattggcagataataaggacttgtgtatttttccatcgttaaaaggcatttcaaagagacaatatgtcagggtaagcttctccttcgttgttaactgcatttgtgaatcttgcgttatcagtaatacatgtagctaatttctctgattatccatccctttttcatatactccacgataattctctcttctattttgaggtggccttatctatttaattaaatagcatctgttgttacattgttgatttctgttttgtgggacttagtcaagcttcggaataatcagaaagttgctgtacgagtatcattttgtttgtttagcttgtctgattcttctaatcgcgtctagttggttcttgacaagtttcaaatcagaattgttccatgctttagatgtttcgatgtttattgtggacaatccaagtatatgatatcatgtgttgtgtcctgacttttcagtgatgaggctgcccctgttgttgttcctccccccgttgctgagccagcggccatcccagaggacatggacttaatgactgcattggagttgactcttaggaaagctcgtgcttatggtggtgttgttcgtggtctccatgagtgtgctaagcttattgagaagcgtgtggctcaactcgttgtcttggctgaagactgcaaccagcctgattatgtcaagcttgtgaaggctctctgtgctgatcacgaagtcaggttgctaacagttccaagtgccaagacccttggcgaatgggctggtgtaagtctatgttttcctctttaatactgactcttcatatataccttattgtcgctcagtttatcctcctaaatgaatgtttggttatcaatggcaaattgaatctttgatgttgttgcagctctgcaagattgattctgagggtaatgccaggaaggttgttggatgctcatgtcttgttgtcaaggtatataaagtcatggatgaatcatctaatttttaggattcattgatgatggtccatagttcttttacttaacacgtttctgtgatttcttgtcaggacttcggcgaggagacaactgccctcagtatcgtcaataagcatattgcttctcaataaaatgccatgaagcatatctaaactcggatttcatatgttttccacccccaatgctgttttctcttggttttgatatattatctaatatttagcggacagctcttgagatttgtttggaacatgatcaagttttgttgttatctagactttactcttccaaggccaaatttgcttgagatttatttggctcattactcttcatcataattttttttttcctattaacctatatggtttctacttaactaatatagttgagagagtgaaagcatttaaaatctgtttaccgtatcaaataacaggatatttaactcagcctcgaaaacacttatatttcatattattcatcttgttccgtctgtatacatttttttttttgttaaaggctttggtccgtctgtatacatatgaattgtgttctatcgtcgtcaattttttaaaaaaaaacttttttcgttttacacgaatacaaaaatcattgaaaatttcattcatttcttttgaagtgaaaagctcggggagaaggcgggaagtggaaaagccaaggctctggtattgcaacaattgattataatttgtagagatacttaattatgatttgaaaaaacaggggattacttaataatcgaatgacaaagcacacacatgattgattttagttttgtgttttttgtcaagacttgcataatcgagtttaaagagtagcgtttttttgtttgtttatgagttaatttcgcatgtacgggttacatagagcagttcttgcatgttctacaccgcctttaaaaggcgcaaagttgtcatttttatttccttttcatttgcttccaaccatttagatttgaggactctctgtcttttcttatttcggagaatgttctttttctagggttttgaaattctaagagattttctgaagaagaaaacaaaatgggtcctcttgtcgaagcgactgagttctcgaaagaacaagcactcaccgacgctgcagaaaatctccttaaacctcatttctcaactgatgcgactctcagtcttctcgaggtacgaatccttctctctgtctctctggttttgtaacgctttctcgaaatttgggtttttgttgcttttgttcatgtgtgttgttgaaattcttctgttgggggttagattacaggaagcaattagggttttttcacttcttgccgataagaaaaattcgacttttgctgttttgttcaatgttcgttagtgatttcgtaaaggtgatagcttttagggttctgttgctttcaaatccctaggggggaaatctatttctctctgtggtttatgttcaatcatctgatttttttatgcttttatgtgtaggtaatggagtctctgctcgccactgtcgagcaagatctttcttcatcagtacaaaaggccctacatccaccaatgagggctttggtatccgctgatcttttgagaaaccctgattctgatgttagggtttctgttgtctcttgcttgaccgaaattatgaggattactgctcctgaggccccttacaacgatgagcaaatgaaggttgatattccattaatccacaatttgtgtaccagttaaactggtctcttgtttttgcaatgctttcttcaaatattctctcatgaggcattggctttgcttatttggcttacaggacatcttccaggtgacaatagaagcctttgaaaaacttgctgatgcttctagtcgcagttacaggaaagccgaggttattcttgagactgttgcaaaggttagatcatccttggttatgttggacttggagtgcgacgatcttgtcctagaaatgtttcaacggttcttgaaaatcataaggtagatacagaacctgatttaacaatgctcagttaactcttaggtactttatgtgacactgatgatggcttttcttttgggcatttatctaggccggatcatcctcaactggtgcttgtctcaatggaaacgattatgatcacagttatagatgaaagtgaagaagtacccatggacttgctcgagattctcttgactactgtcaaaaaggacagtcaggtaaaggcttttgctatttgaggttaaattcttccagcttttcaattgacttgaggtttgatttttctggtcggcatgccttaggatgtctcaccagctgctttgacgcttgtggagaaggttctcagtagttgcacctgtaagcttcagccgtgcatcatggaagctttgaagtcctcagggaccagcttggatatgtattctcctgtagtttcatcaatatgccaaagtgaatttgctactactcaagcacacaatgatgttaagcccaaagataatgaggtatcctcaatgctctgagctcttggtttgattgctactagagtaattgtgtagttaaatcttgaagttgcatctgccaatagattatattaagcttcttctatctttttcatttgttcaggcagatgaaaagatatcagaaggacaagtagttccaagtgattcattggaggtactgtgtttaaaggcttttggtgttcatcttctttgacattatctgttgcttaacaaatatcttcaaaatctgttgaattaggacaaattgaatttagggctttctcgcaaaggaactagatccaagagaagtgctagaggtggaactcgtcgagcgaatggagatgaaaaagtaataactgcaaatgaagggctgtctgaaagtacagatgcagagactgcatcagggtctacaaggaagagagggtggaaaccaaaatctctgatgaatcctgaggaaggctattcatttaagacgtcttcaagcaagaaggtgcaggaaaaagaacttggggattcatcacttggaaaggtggctgccaagaaagtgcctttgccttctaaagttggtcaaacgaatcagtctgttgttatttctctctcatcctctggtagggctaggacagggtcacgtaaacgaagccgaactaagatggaagagacggatcatgatgtaagttctgttgcgacacaaccagcaaagaaacagactgtgaagaaaactaatcctgcaaaagaagatttgacgaagtctaatgttaaaaaacatgaagatggcattaagactggcaagtcaagtaaaaaggagaaagcagataatggtttagcaaaaacatctgcaaagaagccacttgcagaaactatgatggtaaagcccagtggaaaaaagttagtccattcagatgctaagaaaaagaattcagaaggtgcaagcatggatacgcctattccccaatcatcaaagagcaaggtaatcagttatttgaaccatgatttcgcttatctgtatataatatactagaacttccttaaacttataatggggtaactgtgcagaagaaggattctcgtgcaacgacgcctgcaaccaaaaagtctgaacaagctcctaagagccatcccaagatgaaacggatagcaggagaggaagtggtgattattttgttgctttctctgtccatgatatgaggcattgacttctcacctgtattcatatggtatagattcctcttttcaggagtccaatacaaacgagcttggtgaagaactcgttggtaagagagttaatgtctggtggccactcgacaagaagtaagtttattgttaaacttactaacttcatttttgatactatatgatgaatgatagcaatcttacgatttgtatttgcacaggttttatgaaggtgtcataaaatcttattgtagagttaagaagatgcatcaagtgagttaacttctctatttggtattttaaaattctctatttattgcataactggtttatatagaattttcccactgatggtctcgcaggtaacatattctgatggcgatgttgaagagcttaatctgaaaaaagaacgttttaagataatcgaggataaatcttcagccagtgaggtgaaaatttcttacattctatcattcaccattctttatatttaccaaaatttcaatgtatctggtttccctaataaaatctaagcaggataaggaagatgatctgcttgagtctactcctttatctgccttgtaagtgaaacttccatagttctatgataacccacaatttataattttaatttagctttagtcttgagttttttgctgttatgtgcagtatacaaagggagaaatccaagaagaggaaaattgtgtctaagaatgtggaaccgagtagttctccagaagtcaggtatgaaagtatataagaattctagttttagttgtttgaaagtttgatccgtgagtgaattagttcacaattatggatgtagatcctctatgcaaacaatgaagaagaaagactctgtaacagactccattaagcaaacaaaaagaaccaaaggtgcactgaaggctgtaagcaatgaaccagaaagcactacagggaaaaatcttaaatccttgaaaaagctgaatggtgaacctgataaaacaagaggcagaactggcaaaaagcagaaggtgactcaagctatgcaccggaaaatcgaaaaagattgtgatgagcaggaagacctcgaaaccaaagatgaagaagacagtctgaaattggggaaagaatcagatgcagagcctgatcgtatggaagatcaccaagaattgcctgaaaatcacaatgtagaaaccaaaactgatggagaagagcaggaggcagcgaaagagccaacggcagagtctaaaactaatggagaggagccaaatgcagaacccgaaactgatggaaaagagcataaatcattgaaggagccaaatgcagagcccaaatctgatggagaagagcaggaggcagcaaaagagccaaatgctgagctcaaaactgatggagaaaatcaggaggcagcaaaagagctaactgcagaacgcaaaactgatgaggaagagcacaaggtagctgatgaggtagagcaaaagtcacagaaagagacaaatgtagaaccggaagctgagggagaagagcaaaagtcagtggaagagccaaatgcagaacccaagaccaaggtagaagagaaagagtcagcaaaagagcaaactgcagacacaaaattgattgagaaggaggatatgtctaagacaaagggagaagagattgataaagaaacatattcaagcatccctgagactggtaaagtaggaaacgaagctgaagaagatgatcagagagtgattaaggaactggaagaagagtctgacaaggcagaagtcagtactacggtgcttgaggttgatccatgaatgaaggattgttaggtaaatgttaatccaggaaaaaaagattggttcttgtggtttaggtaacttatgtattaagtgaagctgcttgtttagagactaatggtgtgttttatgagtagattcttctgacctatgtctcgttatggaactagtttgatcttatgtcaccttgctagcagcagatattgatatttatatatttaagagacatgcgcatgagaatgagggtatggaaaagtccatatcagatgacacaaacaatgatcgtatgtgtagtcacttgtgcatttccagttttggacataaaattctgatattgcatagaaatgtttttaaataacactaatccaaacctaaataaaatatctctatacatcatctagaaatgtatggcttgatcaagaattgtagataataataccctgagttaaatgattgtaggtattatttcagttttcaaaattgtccaaatttatgagctatattaaagataatattttcaataaggtgtgtagttctaaatgtttcttcttcttccaccaacccctctttctatatgtatgttcttttttctaaaataattgtttgttcttttttagatatatcaaattaaatataaaaaatattgacaaaacttatttaccattgttaggtgaacttggcaagtgtgtaaatataaagataacattccttttcgttctttatatatacgaaacgtaccacaaatttctaactaaagcattcatagtctctcgaaagcctcttttcagaaccgaagctctttactttcgtccaccgggaaatatgccagtcgacgtagcctcaccggccggaaaaaccgtctgcgtcaccggagctggtggatacatcgcttcttggattgttaagatacttctcgagagaggttacacagtcaaaggaaccgtacggaatccaggtacttgtccatttttatatatacttttttggtcacttgtgataattatctgaagttgttgaggttatttttattgttttgattgacaatttggatttctttataattatttttcttgcagatgatccgaagaacacacatttgagagaactagaaggaggaaaggagagactgattctgtgcaaagcagatcttcaggactacgaggctcttaaggcggcgattgatggttgcgacggcgtctttcacacggcttctcctgtcaccgacgatccggtgagtctttttcttgggttttctatttgttttatcgcatttttagtggcttacagagagaatcgaataaagttaaggacctacatgaaataaaataatacttatatagtagtggagctgatgatttcatttagatttttctgtcgtttgttaattagaccatgtcgtgacgttatctaatccctttttttaatcatgaacataatattttttttatctatttttaaaatatcgcctcattaaaagggtgaaatctctagcaatattattcttcattgaatatttggtttttgccagtttcgtcaagtattttaattttaggacgttgaaagttccatcttgttgtgatgtttttattacatttgactttaaaatgaagcaaagatggttagaaattattttgttggaaggcaaatcaatgagtattattatgtgaaatcacatcagagtgtgaaatgaggtatttaattggtgaaaaaaaaacgaggtatttaattaattatttttaaatgtataatcaattttcaggaacaaatggtggagccggccgtgaatggagccaagtttgtaattaatgctgcggctgaggccaaggtcaagcgcgtggtcatcacctcctccattggtgccgtctacatggacccgaaccgtgaccctgaggctgtcgttgacgaaagttgttggagtgatcttgacttctgcaaaaacaccaaggtcttgcactcttgcttcgtttttttaaatattttgcatttgttaattaaacatgtttatcatgttaaaaaattgaaaaatatttaatgtctaaaaaatgtgaattttttggttctattgtgaaatagtattatctttgatgttaggtctattgaatatttgtatgtgttttgtagaattggtattgttacggcaagatggtggcggaacaagcggcgtgggagacagcaaaggagaaaggtgttgacttggtggtgttgaatccggtgctggttcttggaccgccgttacagccgacgatcaacgccagtctttaccacgtcctcaaatatctaaccggctcggctaagacttatgctaatttgactcaagcttatgtggatgttcgcgatgtcgcgctggctcatgttctggtctatgaggcaccctcggcctccggacgttatctcctagccgagagtgctcgccaccgcggggaagttgttgagattctggctaagctattcccggagtatcctcttccgaccaagtaagtgaactttgcctttagcattttaatagtttctaactaattaatgtcagtcacttaaatatttactaattaagggttagttttctataataagttagaaacgaaaaccatattataaaatatagaattgaaagctcatatcaagcattgtggaaatatttccggttgtatctttcgaaaccaacttgaaggtaaaggttcatatcaagaattgtggtccaatatataaaattttcatcacatttgaaacgaaaaaactaatttaaattgtgggatacttgtagactataaaaaataatctaaggaaaaaaaaacaccttgtatcagttttgatgacgaatcatacatttggcagccatgcacccctcgtcacctcatgacatagagtctccacttacttgagttgagtcaacactttctgtaaatagtaaaaacacagcaaataacgttttttttaatcgacgatgttagctcttgtgtatcttattaagacaatgaccggtctcaaggtactcgtctttgtaactaacattatttatattatatggttataagactttgtactatacaattgcatactcgcatgcctcatgtactcattagtgtacattaataataataagtaaagaagtcgtcagaaacactaatcagtagacatatgaatatgaatacttacggctaattatgacgataatctgacgtctcttatacagtgtctttgctaatcttcacatatatggcttattcaatatatataattcgtttttgttcttacaaaatgatttttttttttttttgttctgtttcttttctctctttttttgacaaatagttcctttatcacttagtttgatataaaaccattgatgggtgtgaattggtcccatgatccttttttcgtctgtggtgaaggttggtatacccaacaactcacaccataagtccaagtcatctcgtcaccaaccgctcacgtggacaattttgaaaccataagaatatatatacaaaatataaaatgtttgatgggtatgttttattgaaaataaaggagatagtcattgctctttgtctaactttaattagacaaatcaatcgctttagagtaaataatgttcaagaaagattgtgctaagtaattaaccaaaagaaaaaagattgttgagtaacaacgatgtttctggtttaataatgttttcaggtgcaaggacgagaagaaccctagagccaagccatacaaattcactaaccagaagattaaggacttaggcttagagttcacttccaccaagcaaagcctctacgacacagtcaagagcttacaagagaaaggccatcttgctcctcctcctcctcctccttcagcatcgcaagaatccgtggaaaatggcattaagatcgggtcttgaaaagcttattaattccctcaagtatcccccttaagtatccttaaccattgaagttgcttttgtttgttgtctctggttatgtgaaacctctgtttcaatatgtctcgtctggttatgaatctgtacactcagttctttggccaaaccgtttgatggattttgtagtcaagtcttcatgtttgatctatgtaatagattacacttaagtaaacaacttcatttttattctatgcaatagattacaataagtaaacactatttcttctatctgaaatgttctaattcttcaatttaagtctcctataaccgctactctattaggtaactgcatgttggcaatatcttctctaggaagtgtttcctcggtctgagagttactgaagtctaggaaatgtgtggacgaggactctctgtttttacggaggacaaggtaactgatggcagctaagtaagtggcaatgcctgagaatccaagaactcctaagaaaacaatggctacaaggttcatgtgactatggagaagcaacttgatgaagctgcttacaagatagtaaatgtttatacccataataagtccaccaattatccaagtcaccgatgaaatctacaagaaacccgcaggttatgttagatttctttccttctattgatgttatgactaatgtatatgacagaagtgaagttgaatattattaccacaagtgaattggcgtgtgagcccattttggttttactgcttgtgaatttgagaagtgggactaaagcaaatgggagttcaaaggataagatcatctgcaaacatataagatgattgatgttaataaagtatgtatgtgattaagagattggatttaagttatggaagaggttataccgaggcaatgatgattaactttccggctccagctgagccacctatcaaagcaacgatcaaacttgggattatagccaagcatctggttaggaagtttctgagccatggttctagtcttaaatcaagaaacccctgaagaaaataagagaaggaacaagattcagacacaagttagggcttaggagcatttttctagagtttgatcacctgcataacgtattgtccagcatatgttccggttatggttgaactctgaccggaagcaagcaacgcaattgcaaatagctttgagctccatttacccacaacgttctgtgagacaaccagaataagtatatatagatcctctaataatgtgagaagttatgcaagaaattgaagcaaaagatataggattcatggatttacacgtagcagaaatgaagctttgtttaagtccaaatcttggcaactagctcgatcttctggactcaaatctgaggcattacaaactgcaccactcactgatatcacagagacattgatgagaaatgccaccataagtgctaatccgctttctatcaagtaataccgacaagcttcctgtaaatgagaacagggaacttaaagactcacataacgtccatgaaaatgtatgtatgttaggtgattagttaccttgatgccggttactgaacgaggaattttcctagagagaactaaagctgagtggagaaagagattgtgcctgtgaagaattaaaacagatgagtattttcgtaatttgtttgagggatagagagacagagagttgcttacggcataaccatggcaccgaggagagatatcgctaaaccagttgcaccattacccttcaactgaggaacaaagagaccatagaggacttcttttgggtctggctttgagtaatgaagctcaacaaagaagcatagggcaatggtgaacacaagaaaagcgatcaagaactcgagctttctaatctgtaattatataaaaagaaccaaaataccaatttatagacttaaaagccataataaacaaaacttaacaaatgtaccccatattgttgaagtgctagaagaatcaatgtactaagtcctgtgagaagaacaccaatccaaaccgggatattgaatagcatgtttaaagcaaatgctgttccaattactgtattcaaagaaaaaccaatgattgattcattattcagcatttggttgataagttataacagaatgagaatatttcccatcaacatcatcaccactgtaacataaaaaacctcatgccttctggaatatcacaagctactacagcgatttcagcaactacccataacataaagtttggaaccttggagtactcagctctacaatgctctgctaagtgctttcctacgatcagaaaaataccattgattgatgaatacaaagatactataagaaaattaccattgattcatgaatacaaagactaacaacattttttcaggtaaaagaaagagtgtgttcggatttaggattaaacctgtgacaacaccaagatttgcagccagagattgaatcactaaagctgcacatgatgccaccaatatgatccagagtaactgttcaatgtgaccaagaaacgatcaataaaaattaacaaaagaagaaaaacattgaaggttaaaaaagcagattgtgtaacgcacctcatacttgtattgagctcctgattgcagatcagtttcaactgtacaacaacaacaacaaaaatgcatagcttgtgtctgtctgcgtaagtgttacactttcatttatttacaaagagaatcttacagtttccaggatcaatgtaagcaattgagacaagaaatccagggcctaagtatgagaagaagtttttccagctctttttctgcagttatgtatatagcaacaaacatcaaaaccacaagtcaaaaacactcttgtacttatgaagtctatcaaccctttaggcagtaatcaaattcatgatcaacactaataacagtgattaccaataatgggagtttcagaggataagataagagtatatacaaaagggattgcaaatcaattcatggagactaacaagactgattaagcgtaagatgtggagagactcaaagttgagaaataataaagtgtggggttcaaaaaaagaaaagagacgagaagaaacctcagggacaagaatctgattagaatcagagttttctatgagaggagagtttgagatacttctgttgctgccacttgctgtttcagccgccatctcctgcctctctctgttacgtctcttctctccctatctataatgccaacatcaacaatttacatgcagagatatatttatacacactacatggcgtttggtcaaatgtcagagaaatattgaattaatgcaaatctttttccttcattttttttcattaatgcaaatgccaaaactatcttttttgggaaagattttaacaaatgatgattacaagttttgactaaaaagggaaggggttgttctaaggaataatggagtatataattattgaattttgttttctaatttggtagttaatgctttggcaatctaatctacatgtgtcgattttctatcgaaaatataagaagtaaagcgtacttatcaaaagtttaccacaattccctctttccctccctttaactaaatcttcgtttacagaaaacttcaactccaagttattttatttcttctaattagggaagttaaaatgcgtaggaaaagctaaatcagatattcttctaaaattagcagtaaatgatacgtaaaaaaaactttcaattttcttgtcctcagcttaaaacttagtaataagccaaaacgtaatagaaaagttctctaccaaaataatcataatccccggagtagtaaagaagaagcgattgtgaaatagggccaagtggccaacttaacggtaaagataaaacaaggagcccacaactccacaaggaagtacgcgtggttacgacttatgacaacaagtgggatccgtacacttttttttgttttggtaagattcgatagtcagtagacaacactcaataccatatcaagtttttctctgtttcttattataatcgacacgtaaatcttgttgacatatcaagattcaatgacacctaattagtatagcccttccatttctcgagtttataagaaaagagttgaggaaacaaaaaaaccaaagagattaagaatttactagtactttcttcatttcttgtatgttcatccccggatgaatataaaaaaaaacttgtaatttgactgagatgcctaccaaaggctatataacataccaaccattggtttcgattatatatgtccacaaaaaaagttattagagaatatgccaaagatgaatttgacgtccacaatgcatggccgttatttatcaagaatcgttttttcacaactcgatcggtgatataaaatcaaggaatctaaactcaaaacaattttttccttccagtttgaaataagctaaattaaaatgtagcatgtaatcgattcacacaaatacgtctggtctaagagttcatcgcaacattctactatgcatgaaccgataaccaaaatacatctatacaacaccaaaatacaaaactaagaacacgtcacggtaacaaaacctcgttgtgtcaattaatctctggaagcagaacaaacaacattggtactcaaatacgttaattagcttatttcagaatggctcttatttatcactctctctctcgttcttcttcttcgccttcgttgttgttgttgtctctgcatctacgcaacagtcttggtatctgaagcagcctatgagatgatcattcgtgagtccagctgcttgcatgaaggagtaaataactgttggactaacgctgcgaaagcctctgcgtacaagatctttgcttataaactcagctttcgatgtcttcacagggacttggcgctgatacctgaattggctctgtgtaggcttgttgttcacaaagttccacatgtacttcttcaatgatccacattcagctataatctggatgaagttaagaattaacaggcagacagattataatatttagacaagttctaagttttcagtaattatgatcagtaagtgtgagcttatgttctgttaccttgcgcacatggcgtgagttatcgaggattgatcgtatcttgacctctgatagtaaggaaatggcagcagtacctggcgctgttaactttttgtcattcaattcagctacagcgactggatcgaagtccataaaaacttccctgtttcaaataagaagcaaattaggcaatcagagatcagagctactggcttagcatcagaagtttatattgcgaattcaaaattcatattactaaagaacttggtttggttacctgagtatatgtcttctggagagaatgtcggtccatgagagttcggctagagcaccagagaggcataataactcaaaaagcttcctacacaagttaaccaagcggtaagagactcttataactacaaagtgtatctcagatagaaggaaaatagttgaggatgccacatacttgtcgtcatgtacaggaactccccattcttcgtcatggaaagcaacatagcacgggtctttacaacgtagaaaaacgcaacattattagtcaatttacagcagagaaagatatgaagcatgagagaacaacaaagaataatggaaagtgcctcttggcatggaaacatttatgctcattagtatagagaatccagaaaacgctgtttggcttacactaaaagcataaacgaagtggatctatcagctaatcaaaacatccttcatctaaatttcatggacactgagaagttaaaatatttataagagaacttcaggacaagctacttcataagttatgcaacatagcaaatgatctacacaatgctcactgaataaaatacatagcaattgaaacattttgttggccattgaattacttaatattcacatacagaagaacataattagatcaaacaaaaaacactagctccttgtctcaattcagtcccatttgattcaactagataagaactttatcatctcacacaatcaggctaaactcaatctcacattcacattttcactcatttcatttatttgaatgcatctaaagtcaaaagctctctcactatgcaatgtgtgataggtgaaagtttgatgcttaccagctttaggtgtgatccaagcacaccttttacgaccatcagcgaagcaatcaccagaaaccttctcttcttctttcccaacactcagcttccttgtagaagagacagacccacttcgcctcacaaccttcttacagctcgaagaagacgccacgctcaaaggcgatgactcacacgaagacgaagcatcagaggaatacgaagcagtcattgaagcactattctttctcaaaatcgaagagcaaagagacgagcattgcttcagagtcgtccttggtgaagccggagtagttggtttcttcgctttctcatcttttgagtcgatgatggtcttctccatcatcggcttctccagtttcatccccggtggtttcctctgcagcttgttcccggtaggaccaagaactgatcggaactctcgctcatcggaatttacggaccggaatctaggaggaaccgacattgacccgattctcacaaaaaactgctttttgatttcacagatctatcactggatcacacaacaacaacaaaattgctatttccaacagtctcgaaacttatttcaagagattatatatcggaaggcctagactttacagctacattagcaccaaaaatgaaacttttttgtcaccgctaaatatctcatttttaggaatcttctagtaaaactaaaccaagttgcttgctgtgttcacgagaaaagcaaggttagaaacaatgagcaacaaaataaaatctttgaacaatgaagaaaaaaaaagcttttgacttcagaaaaacccagaaaaaaaaaagaaagaaagaagctttttctgatcgacgacgaaacgaatcaaatcgagagagagagacgaggagaaaaggtcattcaccagtcacgacttaacacgtcatcgtttggttcttctgctttttctgttcttttgttcctcgacccgacaatgaaacgggtccttattgctcgacccgacaagttaaatggtttaattgcttactgtaatcagttggttaatgcttctgagttctgagattaggaatgtttctttgctcgtgcgtatcaaccaatgtaaagacaaaagttttaattaatcgaacagagaataatttctggaattgccataaccaaaataaataaattaaatgctaagttttcttctatggtcggaaaattgccacaaaagggacccacttatcctaagttcctacagagatctgttttctttcacaacatttaaaaatccaaacttttctttctttggctcaaaaaaaccttccaatggcttcttcacttcctctgttacccaaacccatttccccattctttaaaacgccgccgttttctacctccaaaccactcgtcttcctcaactttcaaactcgtcttacgtcgagatcttccgatgtatcggtcaatctcaagaagaagaataatccgtggctcgacccgtttgatagcggtgaagacccggataacgaatacgggtccttgtttgccgacggaaaacaagacgaggatccaagaccaccggataatcctgataacccttacggcttcttgaagtttccaaagggttacaccgtcgagcttgcttctttaccgttgaaaatcagaggagatgttagacgatgttgctgcgttatctccggtggcgtttacgagaatctactctttttcccgactattcagctaatcaaagacaggtaataaaagtataagactctgtctccgattcgacatttttttaaaaccttaaactgaaatgcagaacattgtccgtacgtttctgttgttttgtaaggtatcctggtgttcaggtagatatattaacgactgaaagaggaaaacaaacatacgagctaaacaaaaacgtgagatgggccaatgtgtatgatccggatgatcattggcctgaaccagctgaatacacagacatgatcggactcctcaaagtttgtaactttcaaatatttcaacgttttttctatctttcctttatcagactgcttagttaacttttcttttaagtcatgtttcagggaaggtactatgacatggttctgtccacgaagctagcagggttaggccacgcagcgttcttgttcatgacaacggctcgagacagggttagttacatttacccgaatgttaactctgcaggagctggtctgatgctgtccgagacctttacagcagaaaataccaacctttcagaattaggttatagcatgtgagttccttgaaaccgaagaaactgcaggtttttttatcgcctgtctaaattgactgttgatggtttcaggtatactcagatggaagattggttaggaagaccgtttaggagtgttccaaggactcctctgttgccacttagggtatcgatttcacggaaagtgaaagaggttgtggctgcaaagtataggaatgctggagcagtgacggggaagtttatagtgattcatggtattgaatcagattctaaggcatcaatgcaatcaaaaggagatgctgatagtttactttcacttgaaaaatgggctaagattataaagggtgtaaggtaattattacacaccttcaaaatgtgaattttttgcttagtttgaaattctctgagatatgattgtgaacaatgccaggggattcaagccggtctttgtgattccacatgagaaagaaagagaaaacgttgaagattttgtgggtgatgatacatctatagtgttcatcacaacaccaggacaggtatgcatgcttatctgtctgtatttgttatgaacaaagttgaattcactgatcttactttgattccttttcttgagcttacttagttggctgctctgataaacgattctgctggagtcatcgcaacaaacacagctgcgattcaactagctaatgcgcgagacaaaccatggtgaatacctgagtaatataaagagtactgattcaatgttttcaagaactaacatgtgtgtgcttctttttcttccagtattgggttgttctcttcagaagagaaagggaagctctttgtaccgtatgcagaagagaagagtaactgtgtaattattgcttcgaagactggaaaactagcagatatcgacattggaactgttaaaaatgcaatgcaggtctttgaaggatcattggctctcgtgtagataactttacagtttctgaaacaagttctatatatagagcatttatgtgtataaatcagttatgtagtctctgttctgatgttggcctctcatcaagaattggattattcagcatcaaaatcaggttccggaggcttttgcagatttatcaaggtctttgaactctctgagctcctaagtctgtgccctttcaatgcattagcagcaaatcttgatgcaaatatcgttgaacgcagtctagaagaagactcacttcttgtgataaccataggcctcttgtcactctcatcatcatattcatcttcataacccaattcttcttctttttcttcaatccgtctcaattcagcgtttttccttcttgaatagcgacgccaagcagcttggatgaagcaagaagcccaagttctccattgctgagagtaaaacctaaatgtttgttgaacctgtcgactatgaagtctcctaaactgacttgctacaaacttcagctcttcagcttcaagagcgaaagcctctacttcagtcagagccttcactgttcttgtggaagaaggtaagtttgagcctgctttagggtcaagagcccatgtcagaagctcttcaccacaaaagtctccttcttttaacaaccctctgttgaagaaaccgcttcttcccccatctgttgttacactttctaaccggcctcggattatgaacatcatttcgttaacggggtctccttcacgcacaatgtaagtgctttccgtgaaaagactcggctttaatctctcacagattgcgtcaagtaatctttcatccatattagcaaacagaggaacctgtagaaacagaacacatagttagttagtatctcaagcaattttagcattctgattgtgaaaacttaccctcctaactaaattcagacagagatggcgtttgatgtctcttctgagatccttaggtaaactctgaactatgttttcttcgtctacacctcttgtctctaaccatttgtattgatcatagcgtctgactctttccctcaaattttgtggaagtgacctgtgatgcatccactgttctgagtcacgtcttttgatcctcatttcctcgagacgaacagtaagtgactgaagataagtctgcatattcccgatgagaagcgcgaaaagaagaagcccagctatagcaatcgcaatggaaaacaaaacctctcctggaaatgtacttgtctgcagcccttgacctaacgtgctgttcatgaaaacaccaaagatgtcaagagtactctgcacaagctatcggttgaaccaatgacaatgagttgcccccgccttacctgagattttgaagaccccaccatagacaataacagaacttggagaaaaatgttgttgatgatacaatgcctgaagatatagcctgaccgtatatcccatagttaaactttgaatcatctgctttagcagaacaattgctcttaagaagctcagggactgttttgatccattcagtttctccactgctcacaaatttagtcccacaatacagaatctgaacacagagtcgcggatctggctgaactttacacgcaaatctccaacaagtatcgttacgctccactgacaacatgtaccaaaacgctccagttatctgtcaaaatgtgtttgtaaagtcagaaagtgaccaatgatgaataaatgtctcaaaacactaattaagaagagtcatatatacatagaaacgcttacgtggcttgcaagcatataccagagaagataataagcagcaccagcccaagctccttcggcaaaagctcctgcagttttcttcaactctgatgttaacggaataaacctcacgaatctcggaatatactgcacaattacaatgttcaacaatgccgttttcgttggtaacacatccgatcctttagacccgtgaagaaacttccacactgcaatctgtaatatccacacaaaacatcataatcaatcccaaaagtccaatatttttagtaaccatcaaaggatcttttcactctgttttacctgcggtaaaggcagcactgcaagaaaatcgacgacgaaataacgggttaaatagcgttcagcgatctttgcaggatcaatcacaagctcaccacgaccaaacacacgagaagaaggagctatataagctgtacgaaactgaagagccattctagttaagtaaaaaacgtcaacaatggttctaagagtcgtcgttgtaacagctagtttcgtatcaatccctatacagctgcttccggaattatcgacaatgggaagatagaagaacaaaggatcaacagagacagctaaaatacacgaaatgacgaacaatctgttccatacgagaagtgttttgtcttgaggatcaaagattttcttctctgttattcttaagtcttctggaaaaaccgctcttgtaacggatttaccgatggttattagaccttctgatctgatttttttaactccttccctgaaagatttggatgctttcttcttttcacctcctcggttctttaggttaaatccgaaacagtttctctgcatcatcattccagtcgcaggagaagaacttgaatctatatcatctaacctgtaattataagttaaatgtcattcatagatctgaagaaaacaaagaaaaatattgcgatcttttgattttcttacctaacgaatttttctctttggccgcttatgtattgggatttgtacattattctgagaaacaatcataagcttcatgcaaaaattaacctaacaacatcacaacagatctcaattatatgaaataaaaactggaaaagagctaattaaggatcggcaacaaatacttaaagtgatttgtaataaatgtgggaaagtgtatgaatgattaaggaaaatctagggcttgaagaaacttgagaatgaagaaattgagggttcctacttagtaccatagatgacggatgaatgattgaatactcctttagattggaccgttgtgaaagttggttaccataatcatacactaactaacttttgatgcggagcgtatttaccgcgtattttgacgaggcgcgaagagttattatagctctcttctcttctatctaattcactctctttattggctttcgatgagtagcgaatttaccgcgtattttttggtgaaactgtaatgtcagaaagttatcacgcttctacactaatatgtaacaaaatatggggtttaaaatgttattcaataaaaaggaaatcttatgttgatgggccataataaggcccacttatacatggtactaaaacctctgatggataaaccttgtgtgctgttgatcggaaaggaaaagtaaaaaagagagatctgagaaatgggaaatgagacgaagaccaacggtggtcctgcaagtatggccggaggcggaggattcagagctaaaatggaacattacgtttacagtggtgaaaagaagcacgtcttggtcgggatcggaatcgtcaccatcatcttcggagttccttggtatttgatgactcaaggtccgatctctctctcatcgtttaataattgtataaccaaatcccttcttggggattgaaagggtaattggtagaagatgaaattggaggattttgattgcaattagattctgattttggttttcttgcaaaatgagaaacatgacatagtgagtaaatggtttctcagtatatatggaaatggatcacattgtttcattctaacattcccataggacctgaatctgtatatctcttacatctgcttttggttacatcctatagtgttgactctgtttgggctaattggttgaagttctttggtttcttttagggtcaaagcatcaatctcaccaagattacatggacaaggccgataaagctcgaaaagcacgcctctcatcgtcttcatcagctaacaagtagtctgtctgaaggattgagtcatttgcacactgttatctcgtactcattttcccacacaagttaaaacttagtcaaaatctgagtcttttttgtgatttagattcaaaatcattctcattttcatgcaccatgtttggttatccgttttttaataaaaagatcaaagattctatcacatttggattgacaatgcctatgataaaaattcccaagattccattgtgtaaaggaaacaaatcattaatatctgtaagcaacataacaatataagttgatgtctactttctggggagcacattcatgtctctcttcttatagaggcatgagtcttctgtacttgaagaaccagacgaatgccgaaaatatcacaaagccacatactccagtaattatgagtacccatctgaatgcacctggctgattgaagaagtctatctcaaagttcatcccaaagatcccagcaacgaccccaaatatggctacaacaaacgttgcagtcgtcagaagcaactcgaactggatcagctgattccgcacattatcctgcagatattgaagaggttttcagcatgactcttgtgcattctcaatctggattaatatcagctgtggaagatggaattttgaggtattaccagttgaatgttaatgaaatcttcagtgtcatcaatgtactcctttaactgtaaagtaaagagaggaacacagatgattaaagctgtctagcgaagaaagatcaaaagtaaaaatgagaggagccattaaagtaccgatgtcaacttgtttagagtactatcaatgacgacaaagtaagcttccagcaacatctctagctcttctatattctctgcaccttcagaactccttgcactgtcatgccgactcctcgcaatgctcaagcttttatcaagtcttcgggaatcaggtggagaagaaacaggagacaccggtgcagaaacagatagaccatcatttgacctgtaacccaataaggactggtcaccgtacatagatccttccattctcctcttcttctctgttagatacatttctgccatatctccatcatcatccattagctgctcgatctcatcccgaaccttctgaactcttcttgtcagtgctacaagcctgctctttagtctacgcacacgctccaagtttagtgtactgatctttgaggtaagctcatctaataacgggtatgcctcaatctccaactctgaagcctatagagaaggataaaattaaatcaacttagcgtgtagtagtcaaatccaagcccaatattagtctatattttctgagggggaaacaaaatcgaagctaaagtgttactaacctgggaatcgagaaacgtacaagcagcttcaagggctatttcaagagctctaaactcgaaaggtaaataatcaggggatgaattctcaaaagcattgtcaaaactcctgctcctcctcctactcaactgggaattttcctgctgccacatctcacctacactactagtctttagtctctgctgcaactcaacaacatagcgcagcacgtagttgtcaagggaattcagaagcagaacttcgtctgcagtaataatacaacggatctgctctaagttgacaacaatagccttctctcggcctaggatagtagagggatacacgaataagggatcaagcagccttaaatcacgggcgggtaagtcacacctacgcatcatagtgaacttgtcaacctccatgacctgagtattaccagaagtatcaacacgaatccaagagcgtaggccttgtccacgcttcttcagacccaagacatcaactccaagaaggggtggtcttccagaagcagaaggccgagtcacagaagcatctctgaggttcatagctgaagcaggtcttggaggaagcaggcgctcttttagctcagacattgttgcaaaaattcagatactgaaatgccaaataactacaaatatcaaaataaatgatgtaaacaatgatatgattaattaggtaatcaagaagattaagtagtttcacaaaccaccaaaaaaccggaagagaaaaattgaaaacataggctaaagaacaaataccagttaggaaaccaaggctgatttcgtcgttctaactctatccacgacgactgtaacaataaaacgatgaactagaatcagattccgattaaaaattcgaaaattttcgaaaatcagaaccaaacgaacaacaaaagccataccagagctacaaacgccgtaatatcctaccagccacgggatcaaagagctgcagatttggaaacaaaacgaaccaggaatcatatcgatcggtacgaagcataaaaacaaaaaagagaaaacctaacagaattttacctctagcacggagattggtttcatcactcgagttaaactgaatctaatgaaaccgcgatagagagattcataaggcggaaaaagaaaaaccctaacacagatcgatcggagcttctcggaacaaacaccgaatggctcgtcggatatcgttttttccgatatggctgaagaagaaacaaacgagcgatggagacaacaacaaacacgcaaaagctttttctctattagttagtcgcgcgactagtgtgaatacgagccattgatgggttaaccggaatgctaaccgaccgactatagctaatttaccggttatctctaacttcccattatattatcaaatctaaactacttaactacttagatcttttaacgttgtgtcattatcactatctcccattatttttatttatggttaataattaaccgagtaataaagtaagatactaactgaatgattgaacaaattatttgagattcgcattcacacaacgtataattcagacggatatgtctgacttaaccggtggagcatctagaaatattcggtttacccgtttcagatattgacccgattatttgataacccgacccggtttatttcgtggcggttagcagctgtccacctgctcctcttccttgatccttgtcacaaaatgtcgcgtaattcttctactgatttcagctcaatcgctcaaattcgagtttgcgtttagaaattgaagttgactcttctgttcttgaatctatctccgatcggtgaactatctcgcagtaccaggagattgatcactccttcgacattgctctttgaattcgtcctcaaggtagtcaattttcacttaattttttttccgtttcctagccttctacagtaattttctcttctcgatgtatgggttcttcggtcttcttattaggaaccttacttggtatttgtgtgccgtggttgaatcaccaatgtgctcttgaaaccctgaaattactttggattttgaagtagagtacatccacattggaaacaacaaccaattgtaacatgcttgattctgacgcggttcttgcattgtattgttagggtattaatgagctcgtagaagctaccagaaatggcgtccatgagctctggtgatgaaagccttcgactttgcatgtttgatttgaggagaggtcaaactgaaggacaagagttagagaaaattttgttcttttatcctgccgatttagacttctcgacgcagttatcagtgatcgggctcagtgaagggcttattacttttactaggtcagctgctatagattcttcttctttttgaacactgtgagatgtgtttttacaattgctggtgatctagatttggttgcatttgtgacttgttcgataaattaagtcagggtcgttaatcgatagtctgtgtagatcttcttcatgttttgaggcttggtgtgactattaatgcagacttttctctccggaggcggcttgtgaagtgatcgaagcagaaagacattcccatgttttctatgaggctgaacctgatatctggatggttatggtaaggcattgtcttacttttcttttgttatagcacaatgttttctatgaatgatgcatcctatggtgtcttagcaatgtaaataaacaagatctgatctatacattggcaggttgtggagaaaaataaggagacaggagcgatatggaggatcgatgcattaaggagggtgcttaaagaagtgcactcactctttgtgatgtttcacgggtcaattagggcattaatcgaaaaagaaccaacaggagggcttacccgatcactattgtacccgttcatcacagattatttaagcagtaagtgactatcacaaaatctagcatatataactttccactgttttccctttttattctgtttcccgcttcaatacattttatgtcaataattgtcagcatttcaaatatggtctctctcggaagactgctgctgtggtaaaatcctgaagttgctgtgtcgaatgccttcctttggatttgtgcaaaaccaccgcatattttgttatcttcatggtaaaatactcaagttcgttcttatgcaaaggttttctgttcctggcagaattttttgttgggaagaaacttcagctaccaactttccgtgaaactttgagagagcgtggaactgttcaaatgcttactttagcaagggatactgcagttgaagttcaggtttgtgtctccaaacctgttggattattattacacatactaatttggtatttgacgaacagtttttggatgtacagtctcttgttcaagtactagattcatgtgctgggagcttacgatgtcactctatgatcttatttcaagatcttttggtttcaacaaccctctcagctgatgataccgtcgacttgtttacatttgcggtaatgaggttgacctcaaaagctttatcctctgatacgagttcttggtcatatctacgtaaagggcctggttcatctgaaatctcttctagatctaatctggcacccgttggctcaattgattccctacactcaagaaacggtaataacatgcatcatgttattaggccactacaaaatgataagtggacaaaagggaaagatgggtttctaataaccgatatttggggtcttgagactggcggctcccctgattctgccatccctacaatttggcttcagcagacacaagaaagaatgtatctccttgcctatcagcataaaagtctcaccttacttcttctgatgcctacaaatgccattgtcaatggagatttaagcatctcagccgtgaaacagcaagttattgaagatgttagcacatctcccatcgatcttttttgttgaatctcttttctggtgtcttctaatatatacccaatatatcttttccaggcatcactgagaattttgaaaattgaagagaatatttcaagagggtggggcggtgagaatgcttaccatattaagggttaccgttacttagtagttgataatgacacgaaagtatccagatcttctccttcaggaaaagtaacaacacttgcaaaggtaacgtctttcacactacgatttactagctgaaattattaccaccttggactcaaagtgtatgaacttcgaaaccgcaggagtctctacttgcactaaacaagcttagagaagaagtggattcagaaaaaagccgtgcaaaaggacaggagaaagacatggaaatatgcatcagagctaagaacaatgtgtgggtgatcgcccgtgtgaccagaggcaaagagctttacatggctttggagaaaggcagcgacactcttcttgataccacagacgctgttggaagattcagcaacaggtattgctacttacgaactaaatactctgccttgggaacaagttcatgactgttcttacaaaaacatgtgctgggatttaaacaggtattgcagcggagcattcttgatggactaagttttcgtgttctttcttctggttttgggaagagggttcttctagtttcaagtacgaagtgaaaagctcagaagaagtaatgagcacttctctctcagccattaattttgttttgtgagaaattgcagagaggaaaacgattgtgttcttagttggcctgtagatatgtaacaatgatattccacgttggatcagtgcaaacaaatccttttttgtgcggaggaaagcatctttctcgtgggtcttaatccttggtttggttggatatacccactcctgattactagtactatacaagtgttactctgtatccgtttcaatagaatttgaagtttacaatattcagtacaatgtcacactcaggttaagacatttgtttaggcactacagaatcttaatgaactattgaaagaagttaatgaaaacattataaaaccagtaaagagaacggaggcagcggagaagaacaacggtggccggtggtccatggcggcattacgtttttttggagatgctttccggcctccaccttttccgcctgtaactccacgacctcctttccccgcccggaagatgtcgatgctcttgtcatcttctccaccttttatgtctttgattgtaagctctgctgtaagaagaacaaaaacgagaaaatgaagcttaacagctctggtcatataaacaaaagtgaatcaacagatacttaaaacagagcaccatgggcttcttcttggttgagtgagctcgtcgatggatcgagtttctgggagtccaatgagatggggaagcagagaaagacgaggaagaggaagaacaatgcaacagatactgtccccattgctggtctgagctttgtggatttgagatgtgactgttatgaagctaacagtgtgtatatttatatatgtatgtggggtgggccaagacagaacttgttgtgaaatgacaagttaggcatcaaatatgtacttttctttatggcgcttcaaagatcaaaattctctgttctgactcttcctttttcagggcaaagacaactccagcaagcaaagaagcatcaatatgtattttatacacacactctgtatttcacttcctaacgaacatgttctccgagaattgagttaatgcaacgatgacgagacaaacttcctctagatttgtcaatgtaacactaatgtactcttgagaaaaaagtatatcactttattactcgaaacaactgaaacagctgaaatatgtaaagcatacaactatcgttcactagcaaaacacctatgagtacacaacactatttgacacaatacaaagaaaagactcgctaatggtccaaagccactctttcgtcttaacacactaaacacgctctaatccacctcttcgatcttgggacctccagcagcacctgagctactgaaatcaccatctgtcggcatacctccagcagcagcaccaccctgatacatctttgagatgattgggttgcaaataccttctaactctttcaacttgtactcaaactcatcaacttccgccagctggtttccttcgatccattcaattgtttcatcaatcgccttctcaatcttctgcttatcctcttgagttagtttctgtgcgagtttctcatccttgatagtgtttctcatgttgtaagcatagttctcaagcgaattcttggcctccaccttcttcttcacttgctcatcctcagccttgtacttctcagcatcttgcaccatcttctctatctcctctttactcaaccttcctttgtcgttggtgatcgtgatctggttcttcacaccagcggttttatcctcagccgacacatttaagatcccattcgcgtcaatgtcgaagcaaacattgatttgaggaaccccacgtggagcaggaggaatgcccttgagctcgaaagttccgagaaggttgttatctctggtccttgcacgttctccttcgtagacttggatcagaacgcctggttgattgtctgcatacgtagagaacacttgctccttcttacaaggaaccgtcgtgtttcttggaattaacacagtcatgaccccacctgctgtctcaagtccaaggctaagcggagcaacatcaagaagcagaagatcctggaccttttcacttccttcacctgtaagaatcgcagcctgaaccgcagctccataggcaacagcttcatcagggtttatgctcttgcataactccttcccattaaagaaatcttgcaaaagctgttgaattttcggaatcctcgtcgaccctccaaccagaacaacatcgtgcacactgctcttgtcgagcttggcgtctttaagaactttctccacaggatccatacatttcctgaacaaatccatgttcatctcctcaaaccttgcacgtgatatcgtcgcatagaagtcaataccctcgtgcagagaatcaatctcaatagtcgtctgagccgtggacgaaagtgttctctttgctctctcacaagctgtccttagcctcctaagagctctcgcattcccagcaatatccttcttgtgtttcctcctaaactccgcaacgaaatggttcacaagtctgttgtcaaagtcttcaccaccaagatgagtatctccagcagtagctttcacttcaaagacaccttcttcaatcgtcaacagcgaaacatcaaaagttccaccaccgagatcgaaaatcaaaacgttcttctcaccggccttcgtacccttcttatccaaaccataagctatagctgcagcagtcggctcattgattatcctcaaaacattaagcccagagatagctccggcgtccttcgtagcctgtctctgcgaatcgttaaaatacgccggaaccgttacaacggcgtttttaactgtgcgacctaagaaagcctcagcgacttccttcatcttcaccaacaccatggaagatatttcctcaggagaaaactgcttctcttcattcttatacgaaacgactatcatcggcttctcaccggggccggaaacaaccttgaacggccagtggagtatgtcactctgaacagaaggatcagagaacttccttccgatgagacgtttcgcatcgaatacagtgttctgaggattcaaagccacttgattctttgccgcgtctccgatcagccgctcagtatcagtgaaggcgacgtacgacggcgtcgtacggtttccctgatcgttcggaatgatctccacacgatcattcatccaaactccgacacaactgtatgtagtgccgagatcgataccaatagctttctctgatttcgtcgccattgttgctaaaaaaaagcttcagtaattgaatgaaattggaagtgaggtttttcgatttcttttgtttgtttatctgtttgatgaagaatcggaaacgatggaagaagctatatatacgaatccgacgagaggaacgagacatttcgagaaaaaaggtcgtggcacaacccaggggattgtggaaaggtggagaaatcgcgcaaacgtacaagagagttctggattcaccgaccgggatatattttatctccggcgaccgcttgataattaaatgggcctattaaagcccatatggtataaacttgtaggcccgtatatagaataaaaggcccagtgtaagttctggaggattttcaatattttgtttacgtcttctttcttcacttgttctgtgatttcgaagacgagaaaggaaaagccatgaaagaggcgaaggagaagaagaatccagaaatctccgttagtatcacgatatcaacttggggggcttttgctgtttatgtgattactgggttatttctgatcttcggatttcacgtggtccgtaacaaatactctgtcgatctcatttctgatccaactctcactctgcgtctcctatgggtactaaaactttctttcataacctggttgctagtggatatttttcagttaattttagcctttttgttttgatgttgatattcagattattgagttcccgatcgtggtaatcatctacagcttgttccgacgaaacccagagaaatgctcggtgagtatagttcatctctgaggttctctgtgagaattaaagaaactgaatttctcgttttaactcgattgctttgtgcttgtctcatttcccttttatgaaattgacaaaacaagctagtatcctcactttacactcttaatgctcaaaaaaatcgtttcttttcatatagtattattttggtcttgtgtgttttgactctgtattcatgattttctcattgatttccagtactttagagctgttggccgaagcttagtcggactaattgccggttagtatttctgtttttcagcttattatagctcactaatttttcaaagaagttgattgctcaatgagttcacctggaaattctagatgttaagctaaacctgaagatgtgagtgagtctgagcttcttatgctttcatcttgtgcttttgctgattcagtatcccttgattgtgtctactatatctatacctgtgttttgatttgtttaataggtgctcttataaatgctttgggagctgtttctttgggtgcacctattggaatgcagtatgtttcactaagatcttctttctctatatctttttatttctttctaattgtggaaatgttgattgtaaatctggacttttcagttgtccagattaaaaatgaggctccttaatgctggttgtggtctcacttctgcatggagattgtgtgattttcaaaagctgacatgagtattaccttctcatcttatgcagatctctatcaaaaacaattcactggtcctttctaatgtctgttttcacggtaagctgcagtgtccatgacttaaaagatgttaataccatgccatatgtgtatttctgcagtttgaaacaaaccttttgatggtgtctgatgattttgattttcataggttgtaccagcaactgcagttttaggtgcatcatggatagattggcatcgtatctttgcttcactaaagtaagtcacttatgctacctagtatgataattcacacactttatgttgttgttaatccatcttttttttttcttttagaccaatcggaattatagaacatatgctcttagttccagcatatggagcaattattggaggatggtttggagcttggcctatgccacttgactgggaaagaccatggcaggtaatgtttatttcttctcaacatacagtcaagggcttgtttctgaactttattgctcccttttttcgcagttattgcaagaatgaactaatccttatattatttttctcgacaggaatggcctatatgtgtgtgttatggagctataggaggctacattggtggacaaatggtgagtttgttgactcttctcagcgaacacaagaatttgaagctagcctagaatagattgatcgtctctggatcggcagaatgagtgtcattttgttttgacttgattgctagatggagagacaacaatagggcaaaggtttttgttagcttggacaaattttgttatattccacatcgaatcaagtgttcaagagaattgcaacattctaaagtcaacaacgatcacagacttgaaagacaaaattcagacgaacgtagggaaattgtaaatgataataagcatctctatatacgcagccgacaaccgttagaatttagaaaactaacaaaaataaaaggatagaaaacttctccttttgaatcaaaaaaggaaaagaaaagattctcctattttatttctgttaaatctagatttcgtatgcaaatagttgggactgatgcgaacttgcgaagcacagtatttgactgtacgagtcatctaccacggccagactctgtcggatgacgtggcgtgtaattattggctgacaggacctcagttgtgtcatcgtttcacgtatatggttaaatgctgccaagtgcaacctctgaaacatggaccaacgccgtaaaaagatggcatacccgaaactaggcggtgaccattgccttgcttgcatttctcatttatatctcatgcatcgttttctcttctttttttcctgtagacaactaaaaaaaatattggtttcaagtttgtagacaagttaaaacataattacaagaaaactcataccactaaacgttagactataagttatattaacgaaatgataaaatgttatatatttggagttcattggttgtatgtcagatcaatgtatatttttgattagttgttagagtaggggacgaactaattatgtggacaaattaaaataatgtttttatttatgttgtcttatctatttataattcgtaattcatatttcaacaagtatggtgttattcccaatctcattaggttctaaatagatatatcaaatttgatattttgtcaagtgtatttcttaagttgctgattagttgcatatcttaacacgcaaaatatcatgtggcccgttttagattggactgttgtagaccatttttaccataattgttgacatttgctcccatctagttaaggggcaggtatacacattaaattacaatttgtgttattcaataaaaaactataagaaaacactgtattaaccttataagaaatgcactcgtaaaaacatgacgttcatcatgtaacttttataatgatgttctactttctgttataaaaaaaaacctaaacatatactcaaaatatatgggagttccaatgtttaaagtttaattaaggctattgccttatttcttgcaaatttttttgttttgtttgggttaaagatgcatatgcattacatgttatattttgcatatttttagaacataattcaaatatttcggtggtaagtctctgttccattccatcaattaattaggaatttggaattagagaactaggagtttagcaatgttattatcatattacttggaaatgtgtttttagagcaaaacgattgctaaaataattggaaggaaatattaaatataatggaacaaaaaaatgtaaactatataataataataataagatcgttctttagcattacattatatatctttcacggcccgaccaaaaagtagataaaccaagaagtggagaaattatgaagctccgattttgcttgcctactttctccaagatttttggctcagcggatctaaacttccacatgtcaattcctcatttgttctgaattaaaaacacgaattaaaagctatatattgaaaacaaataaaatggctaaatcgcttaatatcaggtctaaatggtttgattacgattaggaattttaataaatgagaaatctaattacagaagtacaaagagggccgtagcaaaggaaatcttttaaagcaatagcaattaaaaaggctaaaaaaaataaaacggaaaattataattttaaatactcaaccatttctctttatagtttccttataaaacaaaaacaaaaaccattccatcaatttctcatccttgttgttttcttcttcttcttcttcctcttcttttatgttcatcgccgtcgaagtttctccggtaatggaagacatcacacggcagagcaaaaaaacttcggttgagaatgaaaccggcgatgatcagtcagcaacatcagtagtccttaaagctaaacgcaaacgccgatcgcaaccacgagacgctccaccccaacgtagctccgtccatagaggcgtcacaaggttaacatgagaacaaaacacactcaaaacgtcaccgtttttgtttatctttacttaatcatataactttccgattataggcatcgatggactggaaggtacgaagcacatttgtgggataagaatagttggaacgaaactcagaccaagaaaggaagacaaggtcagtctatacatacacacatatctatatatctttatgagttattaaagatattgtcgttttgatcttcaactccgatttctccggggaatgagttcgtcgttactgttcttgatttgaaaattaattatatcttattttgtattttttgttcttgttggttaatatgtttttttttttggttttgctgacgatgctgaccggaataatggctgactcatcacgtgcagtatatttaggtgagtttgttttggtcatttttcatatggcgttttctttttgcactctcaaattggtagacactttttagagtgagtgatgctaattaattatcacctctaattataaaaaaacaaacgttacttctcagttctttataaagccaacttggtggttctaaacaaaagcatacatgttaacatctatggcgtgacaaaaacaaacaaatgatctgataattcttaaaagtacatttcgatttgtctttttcaaatgtgcttagtcacaaattgaaaatcaaccccaaacatttttgctacttcacctttatgtttacaattgacatatgtagttttttaagaaaatatttacgtaatatatagtattttaatacgtaaatgaaaagaaatcaagatttaaaccaatgtttaattaatgtattaatgtggtttgcacaggggcatatgacgaggaagatgcagcagcacgtgcctacgacttagcagcattgaaatattggggacgagacaccatcttgaacttccctgtaaattttctcggaatcctagttaatacttaaaaacattaaataattagaaagtagttactattcacatgatctttgtttgcttcacaatctttcttacatatgtgttcttatagaaagaaacacaaagaaagaagaagagtctgtttatatctaattcttgcttcttctttttttttttttatagttctaataactattgtttattttgtgtgtgatttatagttgtgtaattatgaagaagacatcaaagaaatggaaagccagtcaaaggaagagtatattggatctttgagaaggtaataactaaatcacttttttgaatgattggtggttaactataattctctgctttcttttggttaacaaactaagtattgattaataatattttttggatgattttttacagaaaaagtagtgggttttcacgaggtgtatcaaaatacagaggcgttgcaaagtaaaccgactttaattccccataataaaagactataagaacaatgatcaatttcaatattactaatttcaaatgtttgataagttattatggacttgcaggcatcaccacaatgggagatgggaagctcgaatcggaagagtgtttggcaataaatatttataccttggaacttacggtaactttttgaaaacttttttattttttatatacagtaattaatgaaaaaaacatgatatctccaaacgcaaaacataactagatgaaattcaagacaagtagaagtaaatatgcgattatcatttgacacatttgatcaaacttgtacgttttcactaatgttttatcaaactactcctgcatttgagtttattagtggttagtttcctaaccaaaaagattgtatgatacatatatattttgattacaaattataaacattcactaaattggatggtggtaaatggtagttgtgataacaacaaattctacaaatgctatatgtgggattctctcttcattataaccaaacatttttactttgaaatctttaataaggggttgatatatgcacgtaatcagatcttgtgttggttgggaaatagatcaccaaacccaaccacttagtcaagcctttaatttattatagagtttgtttttccttatgtttatacatatttatttattgtatggtttaaattataagttgctcatccaattttactggccaatttaattctatttattatatgttttacatattgtcctatatcaacgggacaaagtacattttcaaaaaaatctaacgtgattattgacttgtagcattttcattttgttgttgttggcattattcacttgtgtagcacaatattacgtattaggcaaatccataatagtttggggagtaaaacgtaataattaacaaaccaaagaattagaagtttcataaattgtcttaaacttctcaatgtgacattttgcaccccttttattgtagcgacgcaagaagaagcagctatagcgtacgatatcgcagctatcgagtaccgtggactcaacgccgttactaacttcgacatcagccgttatctgaaactcccggtgccggagaaccctatcgataccgcgaataatctcctcgagagtccgcattctgatcttagcccatttataaaacctaaccacgagtctgacttatcacagagtcaatcttcgtcagaggacaacgatgatcggaaaacaaagctcttgaagtcgtcacctttagtggcagaggaggtaatcggaccatcgacgccacctgagattgctccgcctcgtcggagcttcccggaagatatccagacgtatttcgggtgtcaaaactccggcaagttaacggcggaggaagatgatgttatcttcggtgatttagattctttccttacgcctgatttctacagcgagttaaatgattgctaaagtgttgttcttctgataagttttgttttttagttgttcagaatctcggttgtgaaaatcaacattgacacatcgattattctttcttgtgacaatcttatataataaagtttgaatctttttaacagttgtccactttcagtttcctctgatggtgaatttgatttgagaggtactgaggtagtttgtgaaactcagatagaggaattgtttatgtagaaaagtaaggtatacagatgatgatcattggagggatgttcagagattgaactcgtccgtttattaatgatcaaacagtacaacaaagcttggaatcaatagaagccaagcaaatgcagaatgcttggtagcctgagaatggatacctgcaaacagataaagcaaaagacttttagatgataaagcctttaatcctaagcttataagtatgtttatgtttggctcattctggtttgagcaagtagtacctgaagtcgattacatatcttgctttgtcaactctccccatttgaagaattgtctgccttggagtctcctgcttataccaaattacacaatgtttaggattcttgagattggtttttgatcaaagctttaaagttgtggaaatgcaccgtgagtgttagctgaaagttcttcaccgagctctgtattctcagtcctgttcttcctctgtctctgaagtctaactcatgctgcttggagatctaaagaaaggggaagacacaatgaatttcatgctttacaaaatcaacaatgatgcccggtgagacttactttgttgtaatgtggtatccttgagcatagcttctgaattttttccttattctcaagccaatcaagcggtagtttactagcttgttgaacctataaggagatacatacatacgtgtattaacagttttatgttttcggaatgcaagattgatggagagaagtttaagattaggcatttacctgcttattgttgtttttctgcattggctgctgctttggtagcaaagttctcattcttctgtagctccctgtccaagttgttatggtgggtgtgaatctgcagaagccaacagatgcataagcaaacccaaaactaaggcagaggcaaattcatcaaaaaacacggcattcaaaatcctcaacgcttacattacaaccgaaagaagcggcttcaccattttacctacagaaccaactcgaactccctgcaatggaatcaaaagaccagaaacattcatactcgatttccaacctataagcagaaccaacaccgttacattgagcttgaatttctgaccttgtcccatatgtagtacttggaacccaagagattagccgtcatggaaccgacataactttcatccgaactgcacagcaatcccttaacattctgtgccaccctaaatatagatttcccattacgtcggctatggtaagcaactgctaacttccggtctttacgcccccgaccttcctgagatatcagaaacattgatatcactacatctcaattctcactcagcatcatggtaaatcgaatatctatatacttacatgtgtataaagtgaatatacagatccgtggctcaagccttcaggtgattgttctttcacaatcagacaagtgcatcttcccacatccaaaggtagtgtcttgcacaacaaagccctgtttaacaagtatatacatagtttcagacatgtttagaacaatgaaagcacaagaatcttggtaatagccgtgtttttacctgttgggcaaagtagaccaagaggaagcaggggcagcttcagaatccgaaaactcccacactttcaacgaacttgaatgctctgaatcaacactagtccaagttttcattccgaaactactcttatcaacctcactgttcttctgcatacacgcttgcagtgatgactgcttcagagctgttcgaccaccagttgagaaagatttgaaatttgtaacttccgttggaaacccagagttacccttcatcgattgagacttcaaagctcgatctagtttccgagtttccacagaggtagagactttctccggcgacacattctccttatcctctcccttttgagtggataaagaccctgtaattgtgtccacatttcccttattttcctccaacaaatcattcacttttctcgaaccagccatgttttttttccctttctggatggattgctttcaagtatcaagtttagaactttctgggagctaagtttatatctttatagattttgaagacatgaatctagaaacaggtgtttgacaatggtactgagttgaaagtaacgtttttataaagtcccacagtgtttccatttgaatttgaatagccattggggattgtgcgagcacagaaccaaagacacagatggacttttcttttcttgtcttaaacacaaaggttttttagatgtctgcgtttggtttttgccctttttctactttctacggacccaacggtcaatacacgatagtgggattttgattaatattttgtcgttttcctttgtcgggaaactgaaaggttgatgattggattgaggtttagcgggaactgtgtttcaaacactcaaacacttaaagtatcaacaacctgccgttttttatatttatcaacgtcatgccgttttatcttcgtgagtcatccaaaaccgataagccagagcctcaaaccatcgagtggctgttaaaccatactgttcaaattagtccaaccaaaaccatgagaggccacaacatcgtcgaagcccattattatcaccatggctaaagccagtagtactctgtttgctgtttcctgctccgcttcagctcgtttctctttcctccgacgctctgaatctcttaaaccctcagtttcaagagcgagattcgccgttccaatggctatggccgccgcgtcagctgccaccgctaaaaaactagcgcctgctgtgattgtgggtggcggaagagtcggaagggcgttacaggaaatgggtaatggcgaggatttgttggtgaagagaggagaagcagttccggttgattttgaaggacccattttggtttgtacaagaaatgatgatctcgatgctgttcttgaagctactcctcagtctagatggaaaggtagaaactttcataggccctaagaatcattagtgagccaaattgttagatgttttagggcgtttgatcatcgcagagcacaattcaaatgatcagattatcaaattttgattgtttcttcagtttatgacttggtatagtaaaaacgttgtgtgtaattaatcagatttggtcttcttccaaaatggaatgatggagccgtggtttgagagcaaaggtttgggtgatacagaccaagtgttggcctattttgctgtgtcaaagctcggcgagcctcccgtggatggaaagactgacactaacccagaaggtcttactgctgcttatggaaaatgggcttcagagatagctgcaagattgcaatctggtggcctctcttgcaaggttacaagaagcaaatctttgttttatgataacgcagaagctgcatggatatactaaatgtgttcttttgtcggtgtttctgtggttaggtacttgacaaagaagcttttcagaagcaaatgttggagaaactcatttggatttgtgcatttatgcttgttggagctcgtcatccaggtgcaagtgttggcacggtggagaaagaatacagagatgaagtaccgaaattccattcctcgtttcgttttagcattcaaaatcgttgtttagtgctaattacttatacattcaggtgtcgagactcatccaagaacttgcagcagctgctgccgcggaaaaaggactaacctttgaagagaacatggtggaaagactatgtgcttattcacgagctgtttctcatttcccaactgctgttaaagaagtacatatatcacttttatcatccttgatctctctctttcaatgcatgtgcatgtgcatcagtatctgtttcacaactagttttctgattattgcagtttaaatggaggaatggttggttttattcactctcagagaaggcgattgcggaagggcaaccggatccgtgtcccctccataccgaatggctgaaagagcttaaagtgatatagagccagtctttctaaattgtgagtatctggattaagtatcattcttacatattttaagtagatgatctgaaactagtgtcaactgtgtacacgcctgagaagtgaaaaaaagatgtaattttttaataaagaaagagaatcagttcacgctttgtaaaatgtccagacttttatatgtgtaaacttgtgcattttcaagaatcaaaacttttctgcttctagactcccatcaattagggaagactagaatcttcaataataaacaaattatgacagatacctatgtagactctttggaatcatcaatagttgacaaagtaagaggcaggatcgtccacgcttgtttgaattttcagcctttgcaggcaaggtggtccaagtaggcaactgtggtttcttcggttagttactatataacacataattctatattagctttagctttagcttcacataacataactcagttttctacaaagaaaaaaaaacagagcataatgagcagagagaagttttccatatataacttgctctctcttctggttctgctgatccatggtttgattgcagcatctgctcaagatctcactgtcttcagttcttgtcaaagccattgcgggggaatagcgattccttatccctttggaattggtaaagattgctatctcaacaacaatgagtggtatgaagttatctgtaaccgaacctcaggaaaccctctgccagttcttaagagtatcaacagagaactggtgaatatctctctcccggacgactcaagcgatgtctttgggctaacccgaatcaagaatccggtaacttctttaggctgttccaatatggaagaaatcagcttggctttgaatgtgaccgggagcccattcttcctcaccggccgtaatactttagtagcagttggctgtaacaacaatgcctcgatgactgatgataagctgcagattggaggatgcgagtctacctgcgacgtggggtttggtcagagaggacggaacagaagctgcaacggctatagatgttgccaagcgaagatactctctgaccgtctgcaacagattggcatcaagatagagagtcttgatggtaacacaacgaaataagctgggtgcagagttgctttcttgacagacgaggcatattctcctttaaatataaccgaaccagctttgttttacgataagggatatggaacggtggagttaggttggttcatagataggttacacaatatgtccgttgtactggggtttgctattcaattaccgagggtacaagcggttggagttacagtaactatgaagcttgcatatgtagatatggtaagtatttagagcgaagctatagaagctgcaggtgtaacagtggctacagaggcaatccatatctctcgagtggatgtacaggtaaactaacattttctggtataactttgcgttagtttctgtaagctccatgaatcattgatgcattcttcgcctaagtagatattgatgagtgtgaagaagccaaagctgaaggaagcaaccattgtgggaaagggtatgattgtgagaatatcccaggaaactttaggtgtaaatccaacaaaaacaaaagactagccatcattcttggtaagctaccgatcatctgcgatatgtcatcatggatagcaataaaacggatttggctttaaatgtgtttcttttgtgttgggtaggtattagtctaggctttggcttgttggtagccattggagcatggtggttgtataagtttatcagaaagcaaagggagataaagcggaagaagttctctaagcttaatggaggactattgatgcaacaacaattggtttctaacgaaggcaacattgagaatacaagagtattcagctcgaaagaattggagagagccacagaaaacaagagtattgcaacatagaagatccttggaacgtttgtactgattcttcctccaacatcaccaccacatcttcatttggtcgaaacattgtgaccatcagagaccactagatgtaaccgtatcatttgaaattttggtgttattcgatttgtttagttgtatgtattttgttttatccggtttggagaatgttatattgaataataagaaccacaaacatatcaacgaaagtaatcgctcttgactgaatatttatgagattggactatgactagaatagtagtctcattgcatttgtagtactagttgttcgcaacagctcagattcataaggaccaccagccaatcaatagaacaaaaatgaaaagtgaaattatcgcccaccgtggggctcgaacccacgaccacaaggttaagagccttgcgctctaccaactgagctagacgggctttgtgcttagcttaactgttaattgttagatagtctataactgtaggtaccaagtcaaattttaaaatatctcaagtcaatgatctgcactctgcagaaactaaataattgagatgaaaggatccatacatggagttgacttttgatgataaaagcttcacgcgtctatccaaacttctttgaacgtggacttttgtcacatagaagataagagaagatcaatcagattaaaaaaatgcagaagtatgaagaagactaagacttaccaagtcttctgtattgctgcactctctgtcctaactctgcagcttatcaatggttcatcagcagcaacacctccacctccaaatagtaattcttcaacttcttgtaacagagcctgtggaggagtctcaattccgttcccgttcggaatcgggaaggattgttatctcaatggctggtatgaggttatctgcaacacttccacttccgggtcgtctggcacaacggttccgttcctctcacggatcaatagcgaagtggtgaacatctctcttccagatggtaagaaactatatggagtagttcacatcaaaggtccagtgacatcgttgggttgctctagtagtagtagtagcagtcaagtatccgaaatgtcattgccgaatttgaacgtcacaggcaggggaagtccatatttcctcactgatgagaactgcctcgtgatggttggttgtggtacaaaggctttgatgaaggatatagaatcagagatcttgggttgtgaatcgagctgtgaagatagcaagagtagtgaagaagtaacaaactcgaaatgtgacggttacaaatgctgccaggcgagaataccgttggagcgtcctcaggttattggtatcaatatagaaaacactagtgccacaagagggaaagaagggtgtagtgttgcgttcttgactaacaaaaggtatgcgccgatgaatgttaccgagccagaacaattccatgctggtggctacgcagtggttgagctaggttggtactttgatacatcggattcacgctataggaaccccttaggttgtagaaacatgacgcggtacagttcttacagctcctttgataaatgtagttgtgagtatgattacttttctgggatgagttataggatttgctattgcaactatggctacacagggaacccataccttcgacatggctgcataggtaagtgattgttttcttcttctttcgttgctgcttttcattgttcaaaccatcaatgaataactatggttcaaaaatgtgtagacatagacgaatgtgaaggacaccacaattgtggagaagggacttgtgtgaacatgcctggaacacatagctgcgagcccaagataacgaaaccggaaaaagcctctgtgcttcaaggtgagttaaagtagcatcttgcatttacgagactctaagacagagaacataaaagaagtttaccttcgtttgtgtaggtgttcttataagtctaggagtgctgcttttcgtccttggaatcttggggttgtacaaattcattaagaagcgaacgaggatcatccgcaacaaaaactttttcaaacgtaatggtggcttgctgttgaaacaacaactaattacaaagaacggaaatgttgatatgtcaaggatatttagctcaaaagagttgaagaaagctactgataacttcagcatgaacagggtgcttgggcaagggggtcaaggaactgtgtacaagggaatgttggcggaagggagaatcgttgcggttaaaagatcgaaagttgtgggtgaaggcaagatggaagagttcatcaatgaagtcgtacttctctcacaaattaaccataggaacattgtgaaactcttgggatgttgtctagagactgaagttcctgtcttggtttacgaatatattcctaatggagatctgttcaagcgtcttcatgaaaaatctgaatccaatgattacacgatgacttgggaagtacgtcttcgtatagctatagagatagcgggagctctttcatacatgcactcagctgcatcgattccaatataccacagagatatcaagactaccaatatactattagatgaaaaatatagagccaaagtatctgatttcggaacttcaagatccataaccattgctcaaactcatctaacaacgttagttgcaggcacttttgggtatatggatccggagtactttttatcaagccaatatactgacaagagcgatgtttacagtttcggggtggtcttggtggagctcataaccggagaaaaaccactgtcaaggaagaggattggcaactgatttccttgaggccatgaaagagaacagagtgattgacacaattgatattcggatcaaaggagaaagcaagctgtgccaagtgatggcagtcgcaaaactcgctcgaaagtgtcttagcaggaaagggagaaagcggccaaacatgagagaggtttcatttgagctggagaggatccgttcttcatcacctgaagatttagaggtccatgttagaaatgttgatgcagaggaacaaatcatggaaatcaacagagaacgattttgagggtatgtacatgagtgacaagatccattctttatgttaaactagaagttgcccacaaatatgcctttaattgctttcaaaatacgaattaaatacgatgataacttgtagttaaagtctcaacttgatatgtttatagataataaaattttagtgtattaaaatctttcaacaaagtttaaatctaagaccaatgaaagaaggaaacaaagttgaagaaacacgagaaactatgtagatcaaagatttgtcctccattccatgcatgaactttaaggctgataccatacggcatatcttcactatgatcgagtatattactctggatttctctcctacacctgtggccatcttcttgagcatagaaaccaaaaattcagctatcttcatggttgatggttcagttttccagttattgctttcttgcgttcatccaagtagatttggttgttgtctgttcgtataggtcattttcaacaatcacatttaggccatacattcccaacgtcctctagcttcttctagcactttttctcttctctttttatcctaagctcaatctctgcaaacataaatacaaacctatagatgacgtgaagagaaaacctctctgagtttgacttgtcacattctgaattgtcaaagcttttgagtttcactgatcaatgtaaagaggctatgttaacacacaatttagattttttttctaagacataatttagaaatttcttctgtcacgaatcatattccatctatattatattctctaaaacacgcctgcataagagacatcaagagagaaggaagactgtatataccttttcggcctcatactccgttctccaagaatagctcttaacaattcctttttaccatatactgttttgaatttcaaaacagaagacgatgagcttcacaaatccgaaaaatgcagcccttgcaaaattttggatgcaaaatatattcaacggaaaatatgtttttatgttatagatagactcaaacatgagtactggatgttaaagccctctaagaacatggataaagtgtaagaattaaaaggcaggtaaaagtataaacatacaataccatcggcgaacagtggcggagatggaataagattatgggagaagtaccatcaacacgatgatggcgtgaccggaggtacctttagccacgaagggaagtttcgtggtagggtaaatagacttttttttgccgtttcgtttattgaaaatcatcaatgagtaagtaaagagggtttggcaaataaatttgccgtttttgtttaataaaaattaatgagtaattaaaaagttttttaaggaagaaaatgtaagataataaatgaggaataatatgtggacacatgtagaatgtataaaatgtcaaatgtccaaattttagagcaagttaagaagaaaccttgtcatattatgtaagataagatgtatctttaaaattatataaccttagtgacaagaaaatcaataagatcccatcgacagccatcaaatcaaactagatcatttaaatctgactcagtctgttctcacttcttacaaaaaacagagcactctgttcttacttctcacaaaagaccctttcagtggtgaggttgctcttcttttgggttttttcccacctaaatctggagtttgacttagctggagtagcgtaaacagcactagaggtcaagtttctcaaatgttgattcattattagaaaatagattcccttaggtgtagagttaacattgaataagagtattttaatgctactttgtaacatgcttcacgtttctttctaaacatatcttgaccttttcatcagatcagacacgtacatacctttttcccctagatgaacagatcaatcagatcaaggaaaaataaacagaattatgaagacaaagactagcatcttccaatttattgtagcatctgtccttactctgctcatcaatgactcatcagcagcaacacctccacctccaattagcaattcttcaacgtcttgtaacaaaacctgtggaggaatctcgatcccgttcccattcggaattggcgggaaagattgttatctcaacggttggtacgaggttatctgcaacacaaccacttccgattctaacacaactgttcctttactctctatgatcaatcgggaagtggtgaatatctctctcccagacagtaacgaaccatacggacttgttcaaatcaaaggtcctgtgacatcgttgggttgttctagtaatactagtgaaggaccccaaaactcgctcccggttttgaatgtcacaggtaagggcagcccatatttcctgaccgacgagaaccgtcttgtggcggttggttgtggtataaaggcattgatgacagatacagaatcagagatcttgggttgtgaatcgagctgcgaacacagaaagagtggtgaagaagtaacaaatttgatctgtactggttacagatgctgccaggcgaggctaccggtggggcgtcctcaggctataaccgtaaatatagagaactctagtggaggagaagaaacgtgcaaagttgcgttcttgacggacaagaggtattcgccgtctaatgttacagagccagaacagtttcataacaatggatatgtggtgctagagttaggatggtactttgccacttcgaactctcgctttaagagcctcttgggttgtacaaatatgagccgaaaaggttctgggttctcggatgataattgcagttgcgagtatgattacttctccgggatgagttataggaattgttattgcgactatggctacacagggaacccataccttcgaggtggctgcgtaggtaagtcataagtgattgttttcttcttttgttttctcattagatcatcaataattatgtttcaaaattgtgtagatactgattcatgcgaaggaaatcacaactgtggggaagatgctcattgtgttaacatgcctggaccaatgtccatgtgcaggcctaaccccaagataaccaaacctaccaaacccccggtgcttcaaggtgagtggcaacttttaactattagactgataaagtagaggataatgtataccttatgtttatttgggttgttgtaggcattcttataggtttgtcaggattagtattttttgttgggctattctggctatttaaactcataaagaagcgaaggaacatcaaccgcagcaagaagtttttcaaacggaacggaggcttgctgttgaaacaacaattaactacaaaggacggaaatgtagaaatgtctaagattttcagttcaaaggagttaagaaaagccactgataacttcagcatagatagagtgcttgggcaaggcggtcaaggcactgtgtacaaaggaatgttggtagatgggagcatcgttgcggttaaaagatccaaagttgtggatgaagacaaaatggaagagtttatcaatgagattgttcttctgtcacaaatcaatcaccgcaacattgtgaaactcttgggatgttgcttggagacagaagttccaatcttggtgtacgaatatattcccaatggagatctgttcaagcggcttcatgatgaatctgatgattacaccatgacttgggaagtgcggcttcgcatagccatagagatagcaggagctcttacatacatgcactcagctgcaagttttccaatattccatagagatattaagactaccaatatcctactggacgagaaataccgagccaaagtgtctgactttggaacttcaagatcagtaaccttagatcaaactcacttgacaacattagttgcaggaacttttggttacatggatccagagtacttcttgtcaagccaatacactcacaagagcgatgtttatagtttcggggtcgtcttggtggagctcataaccggagaaaaaccattgtcccgtgtccggtctgaagaaggtagaggcttggcaactcatttcctcgaggccatgaaagagaacagagtgattgacataattgatattcggatcaaagacgaaagcaaactggagcaagtaatggcggtagcaaaactcgccagaaaatgtcttaaccggaaagggaagaaccggccaaacatgaaagaggtttcaaatgagctagagaggatccgttcatcacccgaagatttagatgtccgtaccgaaaacgaagacgaagaagaggatcaaccaatggcaatcaacaacaaaagatgattcttgaaccgcgttcatcagattttctgagaacatctgtatatatacaaaaaaaaaactaatgctcattttgtttgctaggaggagtaattataatgcgtgttagtaagtgtaaaaacctctgtaccactattttttttctcttcaaaatctagggtttccaatgaagaaaacaaaacggacaaagtaaagatttggggatcgtgattcgtaacgatttcggaagcttccttggtcacttcggctgatgaaagagagatttgtgggccagataacactttacgcgtccaagttttgatttcttcagaaagtgggactcaaagagttcatgtcagattgtcagctaccagctaccaacgtcacattacttgcacacttgtacattagaagactaattctgccaaatgttcatacgtcattggtcataatccaagagagtcaaacatgaaattcgttgactcttaataagtactatattttggtcaacattgttttgcatctcttttcacgcatcatccatcttatctcatttctgacattttcgtctatgcagagtcttgatttttgttttctcccttcattaaacaacattactagaatcaaaagatcagatagagctggcaagttgagagaacaagaacaagatcagtatgaagacagagactcacaaccgtcaatgcattccactagcgatctctgtcctatctctgttcatcaatggcgtctcatcagcaagacaacctccagatcggtgtaacagagtctgcggagaaatatcaattcctttcccgtttggcatcggtgggaaagattgctatctaaacccgtggtacgaggttgtctgtaacagcacaaactctgttccgttcctctcaaggatcaacagagaattggtgaacatctctctcaatggagttgtccacatcaaagctcccgtaacttcctccggctgttctacaggaacatctcagccacttacaccgccgcctttaaacgttgctggccaaggcagcccctatttcctcacggacaagaacctactcgtggcggttggttgcaaattcaaggctgttatggcgggtattacatcgcagatcaccagttgtgagtcgagttgtaacgagagaaacagtagcagccaagaaggaagaaacaaaatctgcaatggttataaatgttgccagacgaggataccagaagggcagccgcaagtaatcagtgtggatatagagatccctcaaggtaacaacacaacaggagaaggaggatgcagagttgcgtttttgacgagcgacaagtattcaagtttaaatgttacagagccagaaaagtttcatggtcatggatacgcggcggtcgagcttggatggttctttgatacttccgattctcgtgatacacaacccataagttgtaaaaatgcgtcagatacaacaccgtacacttccgatacgaggtgtagttgctcatacggctacttttctggattcagctatagggactgctactgtaactccccaggttataaagggaatccgttccttccaggtggttgtgtaggtaagatattggtgttcttctgaacgttatcatatcttgtggcctgatataagattgtcgctaattatgaaacaaatttgcagacgtggatgaatgtaaactagatataggacgcaaccagtgtaaagatcaaagctgtgtgaatctgcccggttggtttgactgccagcccaagaaaccagagcagctcaagcgggtgattcaaggtaaaattgaactggattttattactatcttgagcgtcttgcaaaacgttctgttatttactgtttggttttttggtggtgcaggtgttcttataggttcagcactgttgcttttcgccttcggaatcttcgggttgtacaagttcgtacagaagcggaggaaactaatccgaatgaggaagttcttcagacgtaatggaggtatgttgttaaaacaacagttagctagaaaagaaggcaatgtagagatgtcaagaatattcagctcacatgagttggagaaagctactgataacttcaacaagaatagggttcttgggcaaggaggtcaaggtacagtgtataagggaatgctcgttgatggtagaatcgtcgcagtaaaaaggtcgaaagctgtggatgaagatagggtagaagagttcatcaatgaagttgttgttcttgcgcagatcaatcatagaaatattgttaaacttttggggtgttgtcttgaaacggaagttccagtcttagtttatgagtttgttccaaatggagacttatgcaagcgtcttcatgatgaatctgatgattacacaatgacatgggaggtgcgtcttcacattgctatagagattgcaggagcactttcttatttgcattctgctgcatctttccccatatatcatagagatatcaagactactaatatactcttagatgagagaaaccgagctaaggtgtcggatttcggaacttcaagatcagtaactatagatcaaactcacttgacaactcaagttgcaggcacttttggatatgtggatccagagtactttcaatcaagcaagtttacggaaaaaagtgatgtttatagttttggagttgtccttgtggagctcttaaccggagaaaaaccttcctcccgtgtccggtctgaagaaaacaggggccttgcagctcactttgtcgaagccgtgaaagagaacagagtgcttgacatagttgatgatcggatcaaagatgaatgcaacatggaccaagtaatgtcagtggcaaatctagctagaaggtgtttaaaccgaaaagggaagaagaggccaaacatgagagaggtttcaattgagctggagatgattcgttcatcacattatgattcaggaattcatatagaggacgacgatgaggaagatgatcaagccatggaactcaactttaacgacacttgggaggttggtgcgactgctccagcctccatgtttaacaatgcatcccccacgtctgatgctgagcctctggtgcctttacgaacatggtaatgatcaactcaaaacactgcatatgtatactctcatctgatgtaaactttcgataatgaatatttggttttcaccatgtaatataacacacaaattgcattatattttcaagaagaaaaataatgttttagtacaagaacaataaatggggcttcaaccttcaccaataacactctagagaaattaagtttccctttggagatagctttaacatgttgtaattgacacattgcctttgtctttcccggtcaaaccatagcacaaagagtgcctagcgcctaaagtaaccgcaaacagtacagagtaacgctccaattctgcctcgcttttgctagtcatgccttgtttccaacattagcatctatcagcttgacctgagacgtaacaaagatttacagccgcacaattttagccaaataggtcttgatggtcagtatatttctgctccaacattcagcagttgtgttgtctcttcgactttcaacacacaagcagagtactctgttctcaaaacagagcctttcagtggtgaggttgttcttcctgtttttatcctaactccggattttcacttagctagagtagaagtccagaagttgattctggggactttgcaggtcaactttcatatggtctgcagaaaaaatcgatttttgtaatccactgttcattcattaatttaaaacagaatccatcagccgtagagttgattttcaatagtattttattgttttgcaacttgcttcacgcttctttctaaacttctcttgactatttcatcagacgagggcaagtatttaacatttttctttaaaagagcagattgatcagaccaaagaaaaatagaaacagaattatgaagacaaaaacttacaacttccgttatattgtagcgtctgtcctaactctgctcatgaatggctcatgagcagcaacacctccaaatagtaattcttcaagctcttgtaacagaacctttggaggaatctcaatcccgttcccatttggaatcggcgggaaggattgctatctcaatagttggtacgaggttgtctgtaacagcaccacttccgggtcctgcaaaactgttcctttcctcactaggatcaacagggaagtggtgaacatatctcttccaaaatctgacttcttcagcccttacggagtagttcacatcaaaggtcctgtgacttcgttgggttgttctagtaatattagtcaaggacttcaaaaaacactaccagatttgaacatcacaggcaggggtagtccatattttctaacagatgagaaccgccttgtggcggttggttgtggtacgaaggcgttaatgaccgatatagaatcggagatcttaggttgtgaatcaagctgcaaagacacaaagagtaatgaagtaggtaactcgctttgtaacggttacaaatgttgccaagcgaggttacccgtagagcgtccgcaagcagtaggtgtcaacatagagagcaataacgatacaagaggagaagggtgcaaagctgcgttcttgacaagtatgaagtatttcccgtcaaatatcaccaaaccagaatggttccaggccgatggctacgctgtagtagaactaggatggtattttgatacttcagattctcgctttaggaaccctttgggttgcacaaacttgacccgttctagtggctcttacttcttaaccgacatttgcctttgccgttacggttacttttccagaatgagttatagaagctgttattgcggcagtggctacagaggaaacccatacatacgaggtggatgcatcggtaagtgcctgtttttcttctgtagtcttgaccaccaatcagaaactcaataattatgatttatgtatgtagacattgatgaatgcgaagtacccaacaagtgtggagaagacacttgtgtgaacatggctggaaggtacagttgcgtgccaaagataaccaagcctgccaaactcgctcatgtgcttcgaggttagtcaaaattgcaccttgtgtatacaagaaaacaaacaagaacaaagaatttagtgtaccttaacttttcctttgttgttgcaggggttcttataggtttgttgggacttctgttttttgttatagggatttttgggttatacaaatttatcagaaagcgaaggcggatcatccgtagcatgaagttcttcaaacgtaatggaggcctattgttgaaacaacagttaacaacaaaggacggcagtgtcgagatgtcaaaaatattcagctcgagagagttggagaaagccactgataacttcagcatagatagagtgcttgggcaaggcggtcaaggcactgtgtacaaaagaatgcttgtagatgggagtattgttgcggttaaaagatccaaagttgtggatgaagacaaaatggaagagtttatcaatgagattgttcttctgtcacaaatcaatcaccgcaacattgtgaaactcttgggatgttgcttggagacagaagttccaatcttggtgtacgaatatattcccaatggagatctgttcaagcggcttcatgatgaatatgatgattacatgatgacttgggaagtgcgacttcgcatagccgtagagatagcaggagctctttcgtacatgcactcagctgcatcttttccaatattccatagagatatcaaaactaccaatatactgttggatgagaaatacagagcaaaaatatctgatttcggaacttcaagatcggtagcgactgatcaaactcacttaacaacattagttgcaggaacttttgggtacatggatccagagtacttcctgtcgagccaatacactcacaaaagcgatgtatatagtttcggtgttgtgttggtggagctcataacgggagaaaaaccaatgtcacgtgtccggtctgaagaaggcataggtttggcaacttatttcctcgaggcaatgaaagagaacagagctgttgacataattgatattaggatcaaagacgaaagcaagcaagtaatggcggtagcaaaactcgccagaagatgtcttaatcgaaaagggaataagcggccaaacatgagagaggtttcaataaagctagagaggatccgttcatcacccaaagatttagatgtccataccgaaaacgaagaagaagaagaagaggatcaacttatggaaatcaatagaatatatgattcttgaaccgtcgtaaatcagactttgctttaataaaacattttgtatctatatatacatttttgcagccatcttgtgaaataaattatggagttggaacttatttaaaatggctgccactggcttttaattattgattttttttttgcaataaattaattaataaataaaaaacattccaaatatatttcaatcccatatatcacgcaaatttcttcaaaatttgaattagatttcggtagctatttaaaaaaaaatatttgacagaccaaaatacaattacaatcccttaaaatgagcaaaacacacctaaatacatttcttatcaattcactaaacttatttctccaacatttgaactagatttcgacaactatttaaaacaaaaatttgtttgacaaactaaaatacaattgcaatcccgtaaaacatttattttcattatatatttaaattagcggtgtactgcggttttttttacgggacggatttggcgaaacgggtttggaaggacgttacttaataataacactaaactataaaataaaaataatttataaataaatataatttgcaaacttttatatatactgattttaaaaaataaattgttttcgcggtgtaccgcgggttaaaatcgagtattgtagaactagagttcaatcaatgtgttgctgctacaaaagtaatactagaaaacagaagggacaaattaatgatttgggatccagatttgtcccgatttcagaagcttcgttggtctcctgagctgacgacagcgagcttcgacgattgtgggccaaattactttttcccaaaaaaagaacccaaaaatgtccatatcagcaattagctagccacgtcatatatttgacagttggataatattcagttagcttatattacaaaacactgccaaatggccttgcctcattggtcatcgccattacattaatggttttgaaatccgttgacttttgagcaaagactattttggtcaaacattgttttgcatttcttttcagttttcacgcatgatccatcttatctcatctttgacattttcgtccaacaaatgcaagtcttgatttttgttttcttccttcattacacaacataaaaagtctcaaataacaagaccgacttgacgagttgagaaacaagtatgaagaaagaaactcaaaacctccaatgtatcccactagtgatctctgtcttatctctgtttggcgtctcatcagcaagaaaacctccatatctgtgtaacagagtctgcggaggaatatcaattcctttccctttcggtatcggtggaaaagaatgctatctaaacccgtggtacgaggttgtatgtaacaccacaacctctgttccgttcctctcgaggatcaacagagaattggtgaacatctatcttccagatcctactgagtactactctaacggagttgttcacatcaaaggtcccgtaacttcctcagggtgttctaccggaacatctcaaccacttacaccgcagcctttaaacgttgcaggccaaggcagtccctatttcctcacggacaagaacctcctcatggccgttggttgcaacgtcaaggccgttatgatggatgtcaaatcgcagatcatcggttgcgagtcaagttgcgacgagagaaacagtagcagccaagttgtaagaaacaaaatctgcagtggtaataaatgttgccagacgaggataccggaagggcagccgcaagtaattggagtcaacatagagatccctgaaaacaaaaacacaacagaaggaggatgcaaagttgcatttttgacgagcaacaaatattcgagtttgaatgttacagagccagaagagtttcatagtgatggatacgcggtggttgagcttggatggtactttgatacttcggattctcgtgttttaagccccataggttgtatgaatgtgtcagatgcatcacaagatggcgggtatggttccgagacgatttgcgtttgctcgtacggctacttctctggattcagctataggagttgctattgtaactccatgggttacgcagggaatccattccttccaggtggatgtgtaggtaagagatgcgtgtttttctttctgtatccattaatgaattcaatcaagtcttctatcactgattatgaatcaaattcgtgtagacatagatgaatgtaaactagaaataggacgcaaaaggtgcaaagaccaaagttgtgtgaataagcccggttggtttacgtgtgagccaaagaaaccagggcagatcaagccagtgttccaaggtaaaagtcaatttgattttatcttgaatgttgtgttgaagatattattgttttgttctgtaatgtacatattgtttcttttggtggtgcaggtgttcttataggttcggcactgttgcttttcgcctttggaattttcgggttgtacaagttcatcaagaagcagaggaggagcagtcgaatgagagtgttcttcaggcgtaatggagggatgctgttaaaacaacagttagctagaaaagaaggcaatgtagagatgtcaaagatatttagctcgaacgagttggagaaagctactgataactttaacacgaatagggttcttgggcaaggaggtcaaggtactgtttacaaaggtatgctcgttgatggtagaatcgtcgcagtgaaaaggtcgaaagccatggatgaagacaaggtagaagagtttatcaatgaagttgttgttctagcgcagatcaaccatagaaacattgttaaactcttgggatgttgccttgagacggaagttccagtcctggtttatgagtttgttccgaacggtgacttatgcaagcgtcttcgagatgaatgtgatgattacatcatgacatgggaagtgcgccttcacattgcaatagagattgcaggagcactttcgtacctacactcggctgcatcttttcctatataccacagagatatcaagactaccaacatactactggatgagaaatatcaggttaaggtgtctgatttcggaacttcaagatcggtgaccatagatcaaactcacttgacaactcaagttgcaggtacttttgggtacgtggatccagagtactttcaatcaagtaagtttacggataaaagtgatgtgtacagttttggagttgtcctcgtggagctcattaccggaaaaaacccgtcctcccgtgtccagtctgaagaaaacaggggatttgcagctcattttgttgcagccgtgaaagagaacagatttcttgacatagttgatgaacggatcaaagatgaatgcaacctggaccaagtgatggcagtggcaaaactcgctaaaagatgtttaaaccgaaaagggaagaagaggccaaacatgagagaagtttcagttgagctggagaggattcgttcatcatcttataagtcagagattcataatgatgatgatgatgatgatgatgatgatgatgaggatgatcaagccatggaactcaacattgaagagacttgggatgttggtatgactgctccagcctctatgtttaataacggatcccctgcgtctgatgttgagcctctggttcctctacgaacatggtagtataccctcatctgatgaaaaaatgttatgtttcgattatgaatttctagcttttcaccatgtaacaataataagtaacgtttctagtctgtacatgtgattatatgtgtttcataagtctgtacccacagtcatctctatgtattcgacgttcaaaagaaagaatgttttagtcataaacagtatcaggtttaagctttcaccgataacactctccaaggatttcagtttcccttaggaggtaccttggacatgtgttctaattgacacattgcctttctctttggagattcaacgccagcaaacttggacggctttaaactccgatatcctctgcttgaaaaccttctttcctacgctaccacttcagtgggcaagatttgttcaatgtttaacagaataaaaagtcaaaaccaagaatgtcaacatcatctatccattatccatgtgatcggctgattgccactaccttggattacattttatttgactggtcatagattcgttgtttaggtcaacttctgttttgtatcctgaatcctgaacgaacatgccaacatggtgacgatggtcaaatgagtataatgtggtggtctactttcatatggtcatcagaaaaaaggttaaatttttataatccaacgtgaactcattaaacttaaattagaatccttcaggcattgacattgaccaaacttaatttgttttataattccttatgccaacatggtgacgaactgacgatggtcaaatgagtataatgtcattggtctactttcacatggtcatgagcaaaatattggatttgtatattcaacgttcaatcattaacttaaattataatccctcaggcattgacattgaccatagtcttagtagtgtttactaatttttaggtgctttgtaacttgcttcacgcttctttctaaacctctattgacttttaccttaacatcagatcgggcaggtccttaacatgtagaaaagctgattgagattgatcagatcaaggaccaaagtaaaaatacaagaattatgaagactaaaacttaccggtttgtatgtcttgtagcttctgtcttaactctgcagctcatgaatggctcatcagcagcaacaccaccgccacctccaaacagtaagaattcttcaacttcgtgtaacagaacctgtggaggaatctcgattccgttcccatttggaatcggtgggaaggattgttatctcaacggttggtacgaggttgtctgcaacgccaccacttccgggtcgtccggcacaactgttccattcctgtcgagaatcaacagggaagtggtgaacatctctcttccagaaggtaataatgaacaatacggagtggttcacatcaaaggtcctgtgacttcgttaggttgttcaagtaatactagtcaagtaccccaaaagtcgctaccggatttaaacgtcacgggcaagggcagcccatatttcatcaccgacgagaaccgcctcgtggctgtgggttgcggtactaaggcgttgatgacggatatagaatcagagatcttgggttgtgaatctagctgcaaagatagcaagagtagtcaagaagtaacaaacttgttatgtgacggttacaaatgttgccaggcgaggataccggtggaacgtccacaagcagtaggtgtcaatatagagagctcaggaggagatggatgcaaggttgccttcttgtctagcaagaggtattccccgtcaaatgttactataccagaacagttccatgctggtggctacgtggtggtagagctaggttggtactttgctactacggattcacgctttaggaaccccttgggttgtataaatctgacatattcgggatcttacttatccggtgatagttgcctttgcgagtatggttacttttccgaaatgagttataggaactgctattgctcccttggcttcacagggaatccataccttagaggaggttgcattggtaagtgtttgtttcctcttcttttttcgttgagaataaatcagatcattaatactgataattgatatatatgcagacaatgatgattgcaaaggacctaatatctgtgaagaaggcacttgtgtgaacgtgcctggaggctatagatgcgatcccaagcccaagataatcaagccggccaaacccctcgtgctacaaggtgagttccaatggcaccttgcatctaccatcctttaaggtagagcagaaaacagtgttatttatgttttttcttgttattgcaggggttcttttaggtttaatgggactattgttcttagttgttgggacgcttgggttgattatatttataaaaaagagaaggaggatcatcagtagcaggaagttcttcaaacgtaatggaggcttgttgttaaaacaacaactaactactacaaatgacggtaatgtagacatgtcaaggctatttagctcagaagagttgaagaaagccaccgataactttagcgtgaagagggtgcttgggaaaggcagtcaaggaactgtgtataaggggatgatggtggatggcaagatcattgcggttaaaagatcaaaagttgtcgatgaagataagctcgaaaagttcatcaatgagatcatccttctttcacagattaaccataggaatattgtgaaactaataggatgttgcttggaaacagaggttccgatcttggtttacgaatatattcccaatggagatatgttcaagcgccttcatgatgaatccgacgattatgcgatgacttgggaagtgcgtcttcgcatagccatagagatcgcgggagctctaacatacatgcactcagctgcatcatttccaatataccacagagatatcaagactaccaatatcctattggatgaaaaatacggagctaaggtttctgatttcggaacatcaagatcggtaaccattgatcaaactcacctgacaacaatggttgcaggaacttttgggtacatggatccagagtacttcctatcaagccaatatactgacaagagcgatgtttatagtttcggggttgtcctggtagagctcataactggagaaaaaccgttgtcccgaattcgttctgaggaaggaagggggttggcaactcatttcctcgaggccatgaaagaaaacagagtgattgacatcattgatattcggatcaaagaagaaagcaagcttgaccaactgatggcagtggcgaaactcgctcgaaagtgtcttagccggaaagggattaaaagaccaaacatgagagaggcttcactcgagctggagaggatccgttcatcacctgaagatttagaggcccatattgaaaatgatgatgaagaggaccaagtcatggagatcagcagagaatgattctggaagcgtgtacaagaatatttcagcctttatgtaatgtatatggtgacaagaaaatcaataagatcactcggcagcaagtcatccatctttagccacaaagtgtatttgaaattcgaagttaacatgtacttttgaaaatgaagtgtggacttttggtgtgacttgaatgtattatttgatgactggaaaaacttacttgtctaggagtcaacgatgtgtcagaaaatgtttgacttcaagcattatggtttcagtttcagagtctcgacctgtgtaggtagtagaagttatatcccgctgctatcatcattccgctggtaagaattcccaaatatacagaaacgcatgagctctaataagagcgcctaatagaggcttgacatacaaccggaggtgacgatccgactcaaaacagtgcacatgtatactctcatctcatctgatgaaataaagttatctttcaattatgaatctctggttttatttcaccatgtaataatacacacaaattgcattatagaataaagaagaaaaagaatgttttagtacaagaacaataaatgtgggggtttcaaactttcaccgatagataaacagtctagaagaatttaagtttccctttggagagagcttgaacaagttgtaattgacacattgccttgtctttcccggtcaagccatagcaggacgagtgcctagcgcctaaagtgactgcaaagtaaagataaacagtacagaggaaagccaaaagagccaaagctgttaagagatattgatgcctctgaataagagtcgaccagctacccaactcgtcccactgcttctttagacattgttgtctccttgacggtgaagatacaagcccatcaagaaccatggctttataataccaattaacctgcaaaaattgacacacaagtcgttttaacacaattttacaagaaacataaacatgctatgaaaaggagatcatcacaatcagattgaatgtaacatttgggagatcacttttccatcataaaccatcataaatgtcaatgagaaacaagaattcgagacacatatcgctgttttgattggttgtggaaacgacattagtcataattataattacaaaagagcttggatcgtatacgaaagatgaaaatgaaagcaacaaattgccaacaataacgtcattctcaatcaatcatcaatcacaatacacaacaacaacaactcgcgatcgatgcacattggataatcgagggaaacagatccgaagtaggtgaaagattattagaaaacgaaccggtgagaatcggtttagagatctggagaagaaaaagctagattccagctccgtcgacaacccccgaaatcttcagcagtgttgttgcgatatggagagagagagagagatggatctcctccgtagattgatgatggctcgagctgggccgatttgccggatacgccgtacgcggcttattatgtccgttacataaaacgggaatttagggattttatatacaaaacaataaaaagataaaaaataggaaagaagatatataaagaggacaaaaaaatgatgatgcgttgtttgttagcttccactcctttgtgttttgaagatgatgggcatgttgttagaatccgatgatgagtgatgacatttacctaggactatgatctgactcttgcagcttccagagggcatttacgaatacgtattaagataaacttttttaatcattaacgagaagacaactcatgttctagtaatcacgataatgtttagtacttttgtatattgtatttgtatgacagtatgaggtgttcaatattttggtttgcttccaactaaactaaaagtctaaaatacattgttttagttgcactgaaatcctaatagactgagttgccgttgccgtgaatcactttagccggttagcatttagcatccaaaccaaaactatttacccccaatagcctagagttttttttttataacttttttctttttctttgtaaggagacttgcaaggttttagtagaggtctatcttaatcaaaagcccatgcatgataaacagaaggagaaattaaaataatttgggccattagtgggccaaacatgaaaacttggtattgatggtttactagttcctttgtaagttggtcaaaagtccgaaatcaggagcgagataataaagaaacaacgagttgttttacttttcaaggagaggatagctcaaggtttttgatcgatcgcaaggtattttgattctctctttctcaagcgattttcgttttccttcttttgttccagaggtcaaattcaatccctaaagctaggtttctcgggtgaagctttagatcgggagctatgatttcatctcgaatttggggataaatttcagcttattttaaccaatttcaattgattccaaataattctgtttatctctgagcaaaattgattaattttcgattcggtctttaaaaagctgcttttcttaccgtctccatccgaaattagttttttttgtttgtttgatgatttgtgttttgatgatttgtgtttgcgttttggttgatactagcagctgaatattgaatccaacctttaatctgagaggagaaagaagatgtttgcagcttcttgtctcgcatcgtgttgtgctgcttgtgcctgcgatgcttgccgtactgtggtttctgggatcagcagacgttctgctagaattgcttactgtggtctctttgcactttccttaatcgtttcatggattctccgtgaagttgctgctcctctcatggagaagctcccttgtaagtttttttgttattatacttctcgtgagattattttggtgtatgcaactaatcattgacattgtgtgcagggattaaccattttcacaagacacctgatcgtgaatggtttgagactgatgctgtgttgcgtgtcagcttagggaatttcttgtttttctctattctatcggttatgatgatcggtgtgaaaaatcagaaagaccctcgtgatggtatacaccatggtggttggatgatgaaaataatctgttggtgcattttagtcatctttatgttcttccttccaaatgaaatcatcagtttctatggtaagtttctgtttatcattgcaaagtgattagtgaatcgattaacttggaactaatgggaatcaattttacatcttgcagagtcgatgtcaaagtttggtgctggatttttcctgcttgttcaagttgtacttcttttggattttgttcatggatggaatgacacatgggttggctacgacgagcagttctggttagtaaatatatttgcaattaaatcatgtgacttcattatcccactactaatctaagtacttgacttttatatataggtatgctgctttgctcgttgtttctcttgtatgttacttggcaacattcgtcttctctgggtttctcttccactggtttactccatctggacatgattgtggactcaacaccttcttcattatcatgactttgatatttgtattcgtctttgccattgtagttttgcatcctactgtaagttttgactgaaaccttatatttctcttatctgagatcttatttgattcccaatttcaggctcactgaagtcaaattaacctattcttttgcaggtcggtggaagcattttaccagcatcggttatatctctgtactgcatgtacctctgttacagtggacttgcaagtgaaccccgggattacgagtgcaatggtctccacaatcactctaaagctgtttcaacaggcacaatgaccattggcttactcacaactgttctctcggttgtttattctgctgttcgtgctggttcttccactactcttctctcccctcctgattctcctcgcgcaggtatgtttctgacaaaaaaaaccttctcctatactttgcctccttatattgcaagataaggattcattcggaaactcgaatcaaacctgaactgaaacatatattctaaatccctatattgaaaccttgttgtgtgagtgtttgagagttgcttctaagtatcataacgtatttcctttcaatgaaaattttcagagaagcctctgcttccgatagacgggaaagcagaagagaaggaagagaaagagaataaaaaaccagtttcatactcatacgcattcttccacatcatcttctcccttgcgagcatgtactctgcaatgctcctaaccggctggtcaacttcagttggtgaaagtggtaagctggtggatgtcgggtggccttcagtgtgggtccgtgttgtgaccagctgggccactgctggtctcttcatctggtcccttgttgctcccattctcttccccgaccgtgagttctgagctaatgcatctacttgagattctgaataacttttcatgaatcttcaatttgtaaaaaaatattcgatctttctactataatagaacatcgtgtgcttaatcacgaatggcctttgttggcccttctgtaatatgaagatgatataaataaattcctttctcgtaattttcatctgtctcgacttctccacaattgcgttttgcccgattcgcgtttgtgttttgtttggtcaaaacggtggcgcaaggctggtatgaatgaattctgattaaattatcatatgttaaacgtaccgatcattgttatgattattatactggtaaggtagtaaaccggaaattaaaaaaattgcactggattgattaatgttttatccgggtaaattttagaaagaagggtgtgtcacgtgcgatgcacgtggagctcttgccgcgttttaaaacgctatgttgttgacagcgactgtttgataaagtcggcattgttgtacagtgattgaaaatcaaaaagctcttttaggtcactctctatttttcgctccctcgccggactttgctgacgccgccggttatatcttctagtctcattcgtcgacatgaagctcactgttaagactctcaagggtagccattttgagattagggttcttcccaccgacacggttagtccttctccttttccgcttccttggtccgtacctacgtgtaatactgtattaggaaatcagtagatttagatatcttctgaagatgagagatgctgctataccaatctgggttatgaaacatgtgacttgttgaacagctttctagaaatgctagatttagaattttgagtttttttttttccgatgaaatggatgggttgagtgagtgtatttgtctatgagttcttacatggttatatcctggaatttttctactttgctttgaagataatggcggtgaagaagaatattgaagattcacaaagcaaagacaactatccttgtgggcagcaattactgattcacaatggaaaggttttgaaagatgaaactaccttggtggagaacaaggttaccgaggagggttttcttgtcgtgatgcttagcaaggtacctatctgatttcttttatgatcctagatagtgcttagtgtgagtcactctaagcaacctggatttatatatccttcttagtcccattagatatagtggctgtgttttctatgactaatgatcgcaatagcagaaactcatattgataaaactttgtttttgttataagcaatacatatttctagtggaagcttagatgataggtgaataaataacaaattaagaaacgctacaagggaacctatgtgcttgtgctgacaacatctttgcttttttttttttgcaatggatagagcaaaactgcaagttcagctggtccctcttctactcaggtaagcttatttcttagtttctcatgtttgtgcacatcacttggtcagttcagtattcctcgttgaagaactttctttctatctcacagcctacttctaccacgacatctaccatatcttcaaccacggtaattttcttacattgtttgggaattgtgcagtccacattttgtttccttggttcatttaacacaagtttctatcaatcaaccagcttgcagctccgtcgacaacccagtctattgctgtgccggcttcaaattctactcccgttcaagaacaaccaacgtaaattttattcttgaacaagaggctttattgggaatttttgtttttcagtaatcaagttctatattctctatgatctccacaccattgcagggcacaaagtgacacctatggtcaagctgcttcaactttagttagtggcagtagtattgagcaaatggttcaacaaataatggaaatgggaggaggcagttgggacaaagaaacggttactcgtgcacttcgtgcagcatataacaaccctgagagagcagtggattatctatattctgtatgccccttctctgtaacagtgttctgtgaatatttgaagggattgaaactgctgatgtctattttaattttcagggaattcctgaaacagtaaccattccagcaactaatttatctggagtaggatctggtagagaacttactgctcctcctccctctggaggccctaattcatctcctctggatttgtttccccaggtatgagcatggtacttttgattcattggaaagagtttatagaagttgagttcccattgcaaggcacggttttttttttctttcccaggaagcagtttctgatgcagcaggtggagatcttggaacgcttgaattcctcagaggcaatgatcaggttgtcattatatccgtaccctcttttcattagtgagtcgagtagaatgattaaggatttgaaacttggttgctagatttgttagaagcctgtttcatcaccttcatggaggtgtattttagcctacttctatgtgatattgctttgaacattcgatgcttcttcttcatacactt

SEQ ID NO: 44 - DNA, 114498 bp, Arabidopsis thaliana
gaattcctcagaggcaatgatcaggttgtcattatatccgtaccctcttttcattagtgagtcgagtagaatgattaaggatttgaaacttggttgctagatttgttagaagcctgtttcatcaccttcatggaggtgtattttagcctacttctatgtgatattgctttgaacattcgatgcttcttcttcatacacttatcttgttacatttccatttgttatagttccaacaattacgctccatggtcaattccaacccccagattctgcaggtgagtgaatcttaatcttagtctgactttttattgcttctgaacatctcacgatttcattgctgtttctgttacagcctatgcttcaagagctcggaaagcagaacccccaacttctgaggctaattcaagagaaccaagccgaatttcttcagttactaaacgagccctacgaaggatctgacgggttagtactatatactggagatcgttttcttgtttgggccactggttgaatcgctaaattagtgattgatcagagcaatcacgtctatatgaatatatgtgatcccatgactcaatgcctcttattaattgcttaaaacattcagggatgtggatatcttcgatcaacctgatcaagaaatgccccactcagtcaacgttacccctgaagagcaagaatcaattgaacgggtacctacacttacattcctcaccaccattatctcaacatgtaatgccatttctcatcccttctaacacttgcgttaaacctttctgatcagcttgaggcaatggggtttgatagagcaatagtcatagaagccttcctttcctgtgaccgtaacgaggaattggctgcaaactatctactagagcactcagcagattttgaagactgagttccgagccttttaacctgaacaaagcacaagattttgttttgtttctccaccccttttatctgaactgttactatgctcagagaatcaaatgattatatcttacacctccatatttaccttgaagaataatctgcgttttccacactgtaaacacaattcattgtgtttctctctactgaaatgattattaacaatatgatatggttttaaataaattgtggtcatactcgcatgttgtgtgattgtgattattccagctcacaggtatccttattaaatcgatattgtctggctatatcatagtgtttatacacaaagcacaagaaacaataagcaatgttacacagtatctctcactaaacatattttctgggaaacaaaagattttcatcatgctctctgccatgcatctccttcttcatcacaccttccattgttctgactccaggttgcatttcactcattagcagcagcagccgcagcctgttttaacaataatccatccctattaatcaacacctctgcctactacttccagagacctttaggtgtgttaactgcaaacttatttgctacaaacgcaagatggattatcacttacctggttaagaggattatctggtgatttcttccacatcttccatatcaagtccttgtactgtgtgtgagttagacctggtttctcagacttgagccttggaagttccacttcttcatatgcctaaatcacaatcatagaaacaactcagtatatagatccaccagaatttggctttgcgtatcatgatcaatctatcaaacaattatcatttcaacaacagaactctcctaatatataacttcaaaaattcatacaagaacaatccggattgtctgctaatatgatccactacaaggagcaactactaatttcctctataatgacggaatctgaacatcaaacacaagtgctatgaatcaagaagcattatagcaaaaggcacacgaggtataccttaaaagaagccttgagcctcttctccgggtgtcgatcaacgggcaggttatctgacacagtaatccgtgcaagagcctcgtcaacggtatgtgcctcgatgagagaatcatcgcgattggtattggtcaccagaaccatcttttcatactcatcttcccctgccatgcgagtctgtttcttcttagagtcttctgctttcttagccagagccacttgatcttcctcgcgtcttcggatgagctcagcctctgtgaccttaggaaccggcacagtgacgcgattcgccttcttgtctggctttttcaaagccttctccaactctttctcctcctgctcagccagacgcttcgcctccaatttcttagcggcggtctctgccttcttctccgcttcctcttctcgcttcttcaccgctttggatttgggaccttccgcctcgcgccagtattgttcctctttctcccgagtctgacgatccttctgctcagcctccgcggcgttcttacgagatttggcgacctccgccttgctgttcagacccatcttcttcggcatattcgattcgctggggttaattgatctctctcgctctctcgattgttgaattcgcttagggttacgattcaactttgtgtgatagataagaaatgaattaaccgtaccgctcagagctgagaattgactggttcgatcttaacagctttgtttggttaaggcggtggctcaaaagctgggtcaacaaccgatcgatcatttcatttgttaaggtcgttaaccgggattctttttttcaaaaatccactacaatcccttgtccaaagtttagagggccgcttaacggttcaaccaacttaatccgagaaaagcccaagttttgatggagtttgggaaatttgaactattttaaattggcaataaccataatttagtttgctttgtaaagtaattgatcacacactatagacttttacttctcttagacattaggttttgataggaggagaatctagtgtatttttttttttttcacaagaaacaacgtatgtaacaattatatacacttgatgcatattcttaggaagagtttggacttcggaaatattgattttttacatgcaatgttagacatagaacctgataaatttggagtcttagactaatcactataaaacatatatacagtgattgtcatttgattgaaacatccgaccagaggcaagagacacgtttcaggttctatgtcaattacgtgaacaattcttgctaatactaaatgtttcagtaaaatcagatttttaaaatttgaaggggcagaaaacatttaaagagtgataaagtggctcacgtgcagtaccaagctgcgacctctttccaatatctctctctctttctctaattctttttgactaaaaataagtacttttttgaatagtcagtcttaacgggagtggagttagtaaacacttttgtgctctggtctgtgttcaagttttgtctcttctcaaacagagaatcctaaacagtttacgagattcttgattgtctctactcactaatgttttgtaaagatgtgatttttgcttctctctatcttagtcttttttcttgttgatgttgaaatggaagctgtgagtctttaaacgggaatttattgccgaccaaaccccagacaaaaaaacaggtctctggtagattctatttctaactatcgattttaagaaaaaggctttaacttgttttgaaagattggggatttgcaaatgggtttgtgtcattcgaaaattgataagaccacgaggaaggaaaccggagctacaagcaccgccactactactgtagagagacagagctccgggaggctgcggaggcctagagacttatacagcggcggcgaaatcagtgagattcaacaagtcgtgggtcggcttgttggcaatggttctagtgaaattgcttgtctttacacacaacaaggcaaaaaaggaactaaccaagacgccatgcttgtctgggaggttcgtgtttcactttttttttattagggttttagttcactgtgatgaaatgttggattgtttgatgtttagaagcctttttgttatgctgttgctgctacagttacaatgctcttcttgttgctattgatgttcttcttgtgatgtattttagcttttttatatcttcttcttgtttaacttgttacagaatttctgttcgagaagcgatacagtgttatgtggtgtatttgatggacatggtccatttggtcatatggtttcaaagagagtccgagatatgttacctttcacattatcaactcaactgaaaacgacctcaggaacagaacaaagcagctccaagaatggcctcaactctgcgcctacttgtgtagatgaagagcaatggtgtgagttacagctatgtgagaaggacgaaaagctattccccgagatgtatctccctcttaaaagggctttgctcaagacttgtcaacagatggataaggagttaaaaatgcatccaaccatcaattgtttctgcagcggaacaacttctgtcactgtaatcaaacaggtgaaagtccgatcaccggttatttactctatcattggctctgttcaatgactgtttggtatatattcctttatagggtaaggatctggtggtgggaaatattggtgactcgagagccgttctagccacaagagaccaagacaatgctttggtggctgtacaattgaccatagacttaaaacctgatttgccaagtatatctagtctcttctttatgttgtcactattgatcatctttggaaacataatctgattttcttctctatgtacttgctttaggtgaatcagcaagaatccatagatgtaaaggtagagtgtttgccttacaagacgagcctgaggttgcgcgtgtgtggttaccgaacagcgattcacctggtttagcaatggctcgagcttttggggacttctgccttaaagattatggtctaatctctgtcccggatatcaactaccatagactcactgaaagagatcagtatattattctagctactgacggggtacacattactcttcttattcttctcactggttactatcgaaatctttggagctaaagtgtctctaatgctaggtatgggatgttttgtcgaacaaagaagctgttgatattgtggcttcagctcctagtcgagatactgcagctcgtgctgtagtcgacacggcggttcgagcatggaggcttaagtatcctacttccaagaatgatgattgtgctgtagtatgtctctttcttgaagacacttcagcaggaggaaccgtggaagtttcggaaaccgttaatcattctcatgaagagtctacagagagtgtcaccataacatcaagcaaagatgccgacaagaaggaagaggcttcaacagaaacaaatgagactgtaccggtttgggagataaaagaagaaaagacgcctgagagttgcaggattgagtccaagaagacaacactcgcagagtgtatatcggtgaaggatgatgaagagtggtcggcgttggaaggattgactagagtcaacagtctcttgagcattcctaggttcttctctggcgagctaagatcaagtagctggagaaaatggttgtgagtcaacaaaactcataaatgatcaaattaacaaagaatcactgattttcatttcatgattggttttctttccattgatgacataaaaatcggtgtttccaaatgtcacaaaatgttcgttgcttcatatagcgaagtcagacaagttttttcttggaagaactcatagatacatttttttgtctctgcgttctatttacttgctaccatatcttaaatctttacgaagacagcaagctgcgaaaactttgcatctacttcttaagggttcttgcaacagaaggggaatcagaggaatgagaagtacacgcacatcaggggatagacaagtgcaaaagagttcaaactccaaatgatcacacaaaatagcagatcataaaaaagaccatccctatggagttcctctttgtgatgatcattactgtgccaaatagataacaaaaccaatatgcaaatttaccaagtaaaacttaatcattccaagtaactcaacctaaaatccttcgtcgtccaaacttgacaaactcggaaagaccgaagaccacaaccactactgacaatagcagtgtcatgcaaacaccagtatcgatgctcctctgcaactcctgtaataaggaacaaaacagagcagataaagaccatgtaagtctttaatttttattattttctaggcatgcctaccgcttagtcattagcttagtatattacctctacgtcagaggcactaacatccacatggtggtctaagcgatcctgtataaaaggaaaataccagctgatttggtaagacaaggtaacccaaataaaggcagtaaactaaaaccaatatgagaagccgatgacatacgataagccttgtctgcaagccaagctccatattcatagctagagcctcgcgttttagatgcatgactcctttctccaacatctcaagtgctttgtcttgtactactcgcagaaaaaaagaacatactcaatagagaaaccaatacagaattcaatatctgtattatgttcactaggatcaaaccagcttgcctttcattgtagttcgttgaaagccaacaatttcttggttatccatgtcaataactctgctcatgatatcatcttgccccaacaagctgccaatattggaaaattttaacatgtccaaagcagaggccatctgatatgcttttgatctcagatcctcaaccatatccttgcaccggctcatctcttttgctgaactgtttcagtaagtcacgttttcagattgataataaaaaacaaaggaagaaaaagatccattcacatatcaaacattaaacttaaaaactatcaagtttacatagattttccttgactttcagcaagaagattctttagagtctgaactccgtttgccaaaatggtgatctttcttcgcatatatgaagcatgacctcgagcataagatgatgtttccgccaatgaacttctttctaatatcattccatcaatctcctctgaaagttttatagcctcattgtgttttctcttccacgaattacagaaagaagccattgacctgattcctacatgaccaaaaaggttgatcaaatacagagaacttttttaacttgacaaaggatgtataattgtatatacaagaacaacaacaaaaatttaactagcttacaagaatattggtattagcacatgcattaagggaagatcggagcaattaagcaacatatatatccccaaaaagagaatccaattgctcacgaaggacctttagattaatccatcattctcatggagaaagagatcaacctgctgagtgttgactttgtagccacgcaaccagacggtagtttccgtcgaatgaagagaacttctaaatacgaggccgtttacttatatgatcgtagaaagttaggcgttgacaaatcatttaagaatgaaagaaacagtacacacatataaaaaaatgaagtatcaagcaagaattttggaaaagaaattccagtgatgatgacatgaaatatcggtgttttttaaatgtaccacaatattcttcttatagcgaaactaagacaagtttcttcgtggaagatctgacaaatatttttttttgtctatgcattttactcgctataccacttcttaaaatttttatgaagcagcaaactgtgaaaactgcacacattatatattgtgttaaaagcattatttacttcttaagggttcttgttggatataagatattgaggtttgacttgttggataagacacaactgttaccaaaggttattcacggttttgttatgtagaaaactatataagtgccagtgttgtcttaatatgtaaagtcgtcgagtaaataaacgaatagtttcagatcattaatattgctcgtgtgtgtgtctctctctggtccaagtcttctcttttatcgtacaagaagcaatggcttctaacatgaaataagagcataaaaccaacaagctaagatcaagtcaacaaaactcaaaaaatgatcaaacaaagaatcactgattttcatttcatgattggttttctttccattcgtgacattgaaaatcggtgctaacaattgtcacaaaaacgctcattgtttcatatagcgaactcagacaaggttcttcttggaagaacttatagatacattttctgtctctgcgtttttcttagttgctaccatttcttaaatctttatgaagacagcaaactgcgaaaactgcacacattttatatacttcttatttcttaagggttcttgcaacaaaaggtgactcagaggaatgacaaatccaagcacatcagagtcaaaggataacacaaaatgtcatagcatcctgcatatcagagtcaaaggaccagacacattaagctaatgactcaccacactattgtttgaaaatatttaagctcgaatatgtattacccttacgccagagtcactaacatccacatggtggtctaagccatcctgcataaaagaaaaatcccagattttgtagctcaagaattcccaatcaagacagtaaaaaaataatgaaaagccaaagacatacgataagccttgtctgcaagccaatctgctcattcataactagcgcattgtgttttacacgcatgactgtttcctccaacatatcaagtgcttcgtcatgttctactcaaagaataaaaaaaaaacatactcaatagagaaaccaatacagaactcaacatctgtattatgttcactaggataaaaccagcttgcctttcataacttgtcggtgtaatccaacaattccttggttatccaagccaataactctgctcatgatatcatctttttctggcctcagcaagatgtcaatattggaaaattttaacatgtccaatgcagaggccatctgatttgcttttgatctcagattctcaaacgtacccttgcgccggctcatctctttccctgaactgtgtcagtaagcaaatgttaagattgataatagaaaaaaggaagaaaaagatacattcacatatcaaacattaaacttaaaaattatcaagtttacatagattttccttgactttcagcaagaagatactttagagtctgaactcgggttgccaaaatggtgatctttcttctcatcgatgaagcatgacgtagagcataagatgatgtttcggccagtgaacttctttctaatatcattccatcaatctcctctgagagttttaaagtctcattctgttctctgatccatgaatcacacaaagaagccattgactttgattaatcctacataatcaaaaatccaatacagatcactttcagacaacttttaactttaccaaggatgtatataaatgcaacaataagaacaacaaaaatccaactagcttacaagaagcaacaacttcgataatggtattggcacatgtattaaaggaagatcggagcaattcagcaacatatatatctctaaaagagaatcaaattgctcaccaaggacctttaaataatacatcattgtcattgagaaagagatcaacttgctgagtgctgactttgtagccacgcagccagacggcagtttccttcgaaagaagacatcttctaaatacgagaccattacttatatgatcgtagaaaggtaggcctacgttgacaattcttggcgaaataaaaaaaggaacatgcattacactatctcttgttttgcctcttacaaatgtagagattaagaaacagtacacatgtataaaatgaaggatcagatacgtattttgcgaattttgtttccagtgatgatgatatgaatattggtgttttacaaaatttccacaatgttcttcttataacaaactcagacaagtttcttcgtggaagattctacagataatttttgtttttttgtctctgtgtttgacttgctaccacttcttaaatctttatgaagacagcaaagagcaaactgtgataactgcacacattatatattacttaaagggttttggtaacagaagagaaatgaaaagctcagccacaaatgtggaatgaggaaatacattgcaaccattcacatagagagtagaggccagtggacctacagaggaacttataagttgtctgatgttggtattacatatacttaaccaacatccatattacaacagcaagaccgacgatccccagcactgacaagagcattgacatgcaagagcaaccacttctcatattcttgttcatgacagcaaggctcttctgcactctctgtaataagataacagatcaatgtctttaattagccattagcttaagcataatgtggttcttggttgagcaaaccgaaaacagatcaccattacatcagtgttactcctaatgaaagtatggatcaactaaagcttgggattcaccaaagtaattagtttgttgaaatatttaagagttgaagcatatattacccttaagcgagagtcagtaacatccacatggtaatctaagtcatcctgcataaaggaaaatccaaatgtgttagtatccgaaaattcaaatcaaaggcgaaaaaatgaaaagctagtgacatacaataagcctagtctgcaagtcaagctcttcactaacagccagagcaatgtgttttgtgctcatgactgttccctccaattgctcaagtccttcgtcttgttctactcacaggaaaataaaacattcaataggaaaaaacaaatacagaaatcaacatctgtattacgtttactaggataagagaggttttacctctcataacttgtcgttgatatccaacaattccttggttatccatgccagtaactctgctcatggaatcatccggcttgatatctggcccgagcaagctgtctctattggcaaagtttgacatgttcaaagcattcgccatctggtttgcttttgacctcagattccctaccatatcctttcgccgattcatctctttctctgaactgtgtcagtaagtaataattcagattaacactaaccttaaaggtgtctaatttacagatttaagcaattaggattggactagtaaatggcttacataggttttccatgaatttcagcaagaagagactgcagactatctaatttgttaccgaaaatggtgatcttccttcgtatagctgaagcacgacgctgagcatcaggccctgtgacagccgatgaacttctttctgatatcattccattaatctcctcagagagttttaaagcctcgttgtatgctctcatccatgaatccgatgaagacgccattattcctatataattaaaagctaatcaaagcctggatcacttccattgaaattttaaaatgatcaaggatatatacgtaagatccaacagaaacaacaacaaagatctacaaattgagacaaaaacgcggcctttgactacaattttgaggcacaaggctcaaaatctgaaatttacaggatcatgaagtccattatcaggggaagatcagagagattcagtaacagatataatccctcatcaatgactcggattgacaaaaataacatcgtttaaaggatcgaattgcttaccaaattatttctcggacctttgtattcttcaatttgtccgagctcgtaccatgtaagagatcggcttattaaatgttgagtctgtagtcgccggaatcaccgtgaatcggaggagaatgattcaacctgtcacgcaccgggtagcagggcccgtcgcaagaaagatgagataaagacgaagctgaaataaaacgacgcggttttaacttgttatcttggaaaagttatgggttaaattagttatttaagaaagtatgcgttaagaagcagaaagaacatataaatgaagggatcaataaagaatatttaaattttcgacccattataatggatctatccatctcatgcctgtttcttccgtctcctctcttccttgccagaatcctgagtttctctctgactgtgcttagttccatcataactatatcgttctgattgcagtttccgtttcgattatcgttaatggtgtttttgtttccgggaaagtgataaactttgaagcgcgattttggtgttctaaagcaagttcgagaaggggatcagaagatacatttacaatctctcgagtacgattcggttcatgtaagtgttagctctcttgttcttccttcacaaagttgaatctaaatctcaatcctttaccttttctcttcaaaatcatgttttgtcttaaaacattgaatgttgattattgattgaataagtctgatcgttagtggctgaaacttgttttcagggaatcaatcgagcagtctataatcccaggtttgcctgatgatttggctttgagatgcatagcgaagctttctcatgggtatcatggagtgctcgaatgtgtttccagaggctggagagatttagttcgtggtgctgattactcgtgctataaagctagaaatggatggtcagggagctggttgtttgtgttgacggaacgttctaagaatcagtgggttgcttatgatcctgaagctgatcgatggcatccattgcctagaactagagctgttcaagatggttggcatcattctggttttgcgtgtgtttgtgtttccaattgtcttcttgtgattgggggttgttatgcgccttcggtgtcatcgtttcctcatcagaagcctgttgtcactaaagatgtcatgcggtttgatccgtttaagaaacaatggaaaatggttgctagtatgcgaacaccacggactcactttgcttgtacttctgtctctggcaaggtttatgttgctggaggtcgtaatttaactcattccaggggaatcccatctgctgaggtttatgatcctgtcgctgataggtattttttcccacactaatgtggtttatattctcgtgtaggatagaactggcatatttaaccccacaatgtactctttttgtttttttctatgatgggtcaagatatagttttaaaagttttctcatgtttcacctgaaaagctatcaaactggagtatgacatagtagtattgcaggtgggaggaattaccagcaatgcctagaccacagatggactgctcggggttatcgtacagaggctgctttcatgttttaagtgaccaggtgggatttgcagagcaaaattcatctgaagtttttaatccacgagacatgacttggtccactgtggaggatgtctggcctttctctagagccatgcagtttgctgttcaggtgatgaaaaatgatcgggtgtatactattgtagattggggagaaagcttgatcaagactagggatacagatgaaggggaatggtacaatgttggttcagttccttctgttgttcttcctaatcatccgagagagttagaagccttcggttatgggtttgcagctctaaggaatgaactctatgttataggaggtaaggtccttaaatgggaagaatcaggggcagggagatttgacattgtgagattgcctgttgtgagggtatgtaaccctttggatagacctctgaattggagagagaccaaaccaatgtgcattccagccggtgggtcgatcattggttgtgtatccttggaagaatcttctcccccttaaccaaggtgatagaatctttcttgatgtataaaattggtatgttcaattctttgattgttgcatcgtgagatgtaaaagtagttaaaaggaaccatggaaagcacttggttgtcattgatatcttctgttgtctttttacaaacaagtaagttcacgttgttatatgatcatttcttttacagaagtgtcgtttggcttatgtacaaaaataagatagactgaaatttagcatatcttttttttttcatgcttgcatggaaactccaattatagccataaacttagctgtgtgttagtttgcagttgattatggttgcgtattttccaataagggtttctgacactctttaaattattttccaataatattcatggaatcagtgtgttccttctctgagtaagaccttggtcccactgtgaaagtggaagcttttgctgtaatactcactgcacagacatctggacacttgaggctaactggaaaccgtgagggtgaaaacagttgttttaaagggaagtagttaccgaagaagtcaacctataatgcatttatcttccaggtaaaggcttccacttttatgtgaatgagttcagtttgtcatcctatgatatgattactgcaagaaggttaccggccgtggtcaggccattactgtcactcatatttggaattaaacttgtacataataagattcatgttatatctcagtgtatttgagtgttagtgattgttatgtgttcatttgacctacaccaaggtgtatcatgtgtatagaccaaacacttgaatgataaattaagagtgatacaaatagtttgcttcttttttagtctcgtttttgtccttgatttgctacatataattaaagtcttataaatttcgtatagaggaactattagatgaaattacggagtacaatcacacgagcaataagactttcaagtttgattggatatcattctatattgaagtattatatattggaaggtgaagagtattacttttccagtcactgtgtcttgtgaggcattagtggttttgtgtccaatgagaatgagctgttttcaacgactatgttcggagaagagtaactaagtgacatagactccggcattgcgatctggatgtgtgcatgctcttcaccattctgtgcttggctttgagtaccttttctcttagattgcatcctatctagttcaataaatacgtctctcatggtagggcgatgttctgagttcaagctcaaacaccttcttgcaagtttggctactgcaaggacctcttctcgatcacattcctccttgatgcgagcatcgagaatttcatgaagtctgtcatttctcatggcttcgaggaagtaagcacccaacattcggacttcttgccgtctcagaagggagacaggtttctctccggttaagagctcaatgagcaaaaccccaaagctgtagacgtcactcttccctgtgaagtggtttgactgaaggtactctgggtctacatatccaattgttccttgtacaattgttgtcaagtgagtatcatctatagcaacagatctcgagattccaaaatctgacacttttgcacggtgcttttcatccaataagatatttgttgacttgacatctctgtgataaatggggatagagacggctgaatgcaggtaggagagggcatcggcgacttcacaggcgatgcagagacggacttcccaactcattgggaaatcctctgatgggttgtgaagatgatcgaaaaggttacggttaggaatgaactcatacaccaatataggtacttctgtctcaagacaacatcctaagatcttgacaacatttcggtggttaatctgtgacaaaaggatgatctcattgatgaattcctcaagattctcttctttcaatgctttggacttcttgacagcgacgatcatcccatcttccaacattcctttataaactgtaccctgcccgccttgccccagtattctgctcgcattgaatctatctgttgcattctccaggtcattggagctgaaaactttggttctatttacacttccgtgaaggaaggatgtttgttgctgcaacaacaaacctccatttctttggaagaacttcctcttctgcttggctactttccgctttctattagccttgcatagcaaccacataccaaagatcaggagcaacaatccagagcttagagttccacctgcattgtaagttgatcttttcactttcaatctaaaaaggcttatgcagaaacattatataacttacttaaaatggctggccaagttttctcacatctatatgatccgagaacattcacacactttctctttccacatttatttagatgtggatctctgcattcatcaatgtctacggacacaaaaattccaaacttcacataaggttatatagtacactcaagccctctattcaaagaagttaataggtaccttggcatccgccaggtatgtagggatttccttcgtaaccattgtgacacgaacattgatagctatcttcgaaaaatgtattgcctttgcatagtacacgctttgaagtcatgtaggaaagatcaagacgccattctagctctattgttgtatattcactgtactccattaattcgggaggagtaaacaaggaccctgacaatgtgaattgagtcaagaaggcaacctgacatccttgtttatttggttccagtttctctacggttgcatcaaacacttgaagttgaagaagaggtggtatagtcatctggcagcatttgtaaccaacacaactcgtgttagctcctttgtaagaccgtatctcatttccacatgtcgtctcacatcccacgatttgtaaccctgtgacattcatgaacgccttgttgttgcatccaacagctgtgaacttattgttttctgatatgaagaatgggctgcccttcaaattcaaagacgatgatgaataaccatctctgttgggacaacctgaatgtttcaatggactctggatgtagaatttgttgtacaccgatatggagaaagggtctccaaggttgaaggaagtaactgctcgtcggatccttggcaacaaaagtatcggttgttggtctgatgagcttttgcagacaatctcgaaccatttgttcttgtaacaacctttgcctatcccaaaagggtaaggaacactaacatttccgcaatggtcactgcaattacgaagtgcaagaggaaaagtagaagcagctgcgtattcacagattcgcaacagaagcataacaacaaggaaacgtttcacatcaacacccatttgctctctctctctctctctttctttcaggagccagaagttctgttcaggctcaggcacacctctctctctctctctctttctctaacacagataagtcaagagtcaaccttttcacttttatattaattttgcatgatacatcaacgaagaccttgacccatatgaattgaggccataacatatttcagtagtgggctccgtagatacagcagaaaccacgaaaaaagaggataatgtttgtaattaaatgttttaagatattctttatcaaaacaaaacgaaaaatgccaaagatattcatgttgagcctcttcaaacgaaacacaagagtttttagtttttactgtgagacgaagtttttcattaagcagaacgttttaaaatggatatgccggtacttgagatttttttcattaaaatatagatcactatttgggtgacaattaatgaaacaaaggagcccatagtcatggtcctttaatttcaaaatgggcccaaaattagtcatggtccttttatcctttaatttaaaaatgggcctaaaattcgatatcgaaccaaaataaacattgggatggttacatttacttgtagcggtcgacaaaaaaaaaaaaaaaacatttacttgtagcggccaaaaatcccacagcatattgaaatgaaatttccgaaactgaattcaatgcaaattgaaatggaatcagattaatggaattcagaaaatgacaattcgtgtgggggaaaaaaaaaacattacgtaaggaaatataaagagagaaactttataacgaaaatgagattgaaagtatccatacgcacgttcttctaatttccattaaatttcatttaggatctgatgatattgagagtcccatttaatgcaaaccgtataacataagctacggagagagacttgttgattccatgcttctcacttactccttcacccccaaaatcttattcttctttcatctccgccgtctatttttcatcaacatcgatagatgtacggttctcgtttcttctggttataaagcaaccgagtcgcacggacacgaaccattttgtatttttctttccattacaatacaaaaaaaaagaagcaatttggtcatttttatcatttctttaagcagattttaccattttttgagtaagcaacgaggaaacctagagaaggtgagagaaaatcaacaaaaataaagataaaaataaaaagttagggttttgatgcatattcttagatttgaacaaagagaagaagatagtttttgattgttactagctctcacaatccttcttgaatctattccacctgtcaagctctacattttttctttgtggtattgttctatcagttttggattctttgccattttctgattctttatttttttggtgtctgaagctaattttagcgatttggtatggtgaaatctttcaaatcgagcgaaggttttgtttttcttaaattacttctattgaggtttttggattaattgatttaaggttgttgtagagaaagtttccatttttggaacaaaaagcatgtttttggagttttctggtcggattattcatctacaattgcaaatgggaagaactttgatgagtagtctgtgtttaattgatagtttctggaggattcaacttctgccaaaacttaattatttctcccaattgtttttttttgcagcttaaatatttgggaggggaaatttgtagcctacaatctctgaagcaatttggcatctttaaagttttagcagtgattctttatagttcagtatgtcagattcttgttacaggtcttgtcagttagaataatttgaaggactgttgttgttgttgttgttgttgttgttgtgatggatagaaacagaccaccacatccgttccagcaacatgctatggaacctggatatgtgaatgactctgtcccacaaggatttacgcctgatcaaacgggtctctcgaatgcaaatgtccgacctaatcctgcagatgttaagccggggcttcattactccatacaaacaggagaggaattttctcttgagtttctgcgtgatcgtgtcatttctcaaaggtctgcaaatcccattgcagctggagatatcaattatcccacaggttataacgggcacgcagggtctgaatttggttcagatgtttccaggatgagcatggtgggaaatggcatcaggcagtatgagagaacaaaccccccggttcacgagtttggaaataaactcgggcatatccattcagcaccagaagcttcattatgtcaagatagaagtttaggaaatttccatggatatgcatcttcttcagcctcaggtagtttaacagcaaaggttaaagtcctttgtagctttggtgggaaaatacttccacgtccaggtgattcaaagcttagatatgttggaggtgaaacacacattatttccataagaaaggacatttcttggcaggagctcaggcaaaaagttcttgaaatctactatcggactcatgttgtcaagtatcaacttcctggtgaagatcttgatgccttggtgtctgtatcatgtgacgaagatctactgaatatgatggaggagtataatgagatggaaaaccgtgggggttcgcaaaagcttagaatgtttctgttctctgtgagtgatttggatggtgctcttttgggggttaacaaaagtgatgttgactctgagttccagtatgttgtagctgtaaatgacatggaccttggatcaagaagcaactcaacccttaatggactggacagctcttctgcaaacaatttagctgagctggatgtcaggaacaccgagggaatcaatggtgttggcccttcgcagttaacagggatagattttcaacaatcctctatgcagtattctgagtctgctccaccaacctcctttgctcagtatcctcaatctatcccacacaatggtgcatttcagtttcagcaagctgttcccccaaatgctactcttcagtatgccccgtccaatccaccaagttcgtctgtccactatcctcaatctattctaccaaattccactctccagtatccacaatcgatctcatccagctcgtatggattatacccacaatattatggagaaaccgagcaatttccaatgcagtatcatgatcacaattcttctaattactctattcccatacctttcccagggcagccataccctcaccctggcatcacacagcaaaacgcacctgttcaggtagaggagccaaacataaaacctgagacgaaagttcgtgattatgtggagcctgaaaatcgtcatattctggcaactaatcaccagaatccccctcaagctgatgatactgaggttaagaatcgggagccatcagttgcaacaactgtacccagccaggatgctgcacatatgttgcccccaagaagagacacacggcagaacactcctgtgaagccttctacttaccgtgatgctgttataactgagcaggtcccagtatccggtgaagatgatcagctttcaacatcaagtggtacctgtggtcttgttcataccgactctgagtcgaatctaattgatcttgattatccagaacctttacagcccacccggagagtatatcgttcggagaggatacctcgtgaacagttagaaatgctaaatcgcttgtccaagtctgatgactcacttggttctcagttcttaatgtctcatccacaagctagcactggacagcaagaaccagcaaaagaagcagcaggtatatcacatgaagattcacatattgtaaatgatgtggaaaacatctctggaaatgtagtggcatcaaatgaaaccttggacaaaagaacggtctctggtggaggtattgagacggaagctcgtaacttgagccatgtagacacagaaaggagtcatgatatccctgaaaagcaaacttcttcaggtgttcttattgatatcaatgacaggttccctcaggacttcctttctgaaatattcgcaaaggcactctctgatgatatgccgtcaggtgccaatccatatcagcatgatggagctggtgttagcttgaatgtagagaatcatgatcctaaaaattggtcttattttcggaatctggccgatgaacagtttagcgatagggatgttgcttatattgaccgaacccctggctttccatctgacatggaagatggtggagaaattgccagattgcatcaggttgctccgttgacagaaaaccgtgtggatcctcagatgaaggtcacagagagtgaggaatttgatgctatggttgagaatttaaggacctcagactgtgaacaagaggtataagtttctggtatatttgattttacgattccaaaaccatgagtatactaatgaggatggacttggtaggatgaaaagtcagaaacaaggaacgctggacttcccccagttggcccgtctctggcagattacgacacgagtggcttgcaggtatgatggactatcaattcttacacctgatagaagttttatttattctgcattagataaaggattgtaagtttcagattgttagaagaatcaaacatagtatagcccttgtttgtcatataaaataaatgtctgcttctaatctcctcttgtgatctttctattcttaaatgtttctagatcattatgaatgacgatctcgaggagctaaaggagcttggttctggcacattcggtacagtgtatcatggtaaatggagaggatcagatgttgccatcaaaaggataaagaagagttgctttgctggccgatcatctgagcaagaaagattagtgagtgtttctgcattttcttttggaaaattttcctttgtgcatatgttaaaaggattagagagtgataacacttgtcgattgctcatcatggaaagcttatgaatacctttcttgttcgctagactggtgaattctggggagaagctgaaattctttcaaagcttcatcatccaaatgtggttgcattttatggtgttgtaaaagatggacctggtgcaacattggctactgtaacagagtacatggttgatggttctctgagacatgttctagtcaggaaagataggtacaaatctctcttataacgtttctgcattttcctatctgatgaacggtttaagactacttgcttttcattttaatattgttacttgctatacattttaatattgtcagacacctggatcgtcgtaagagactaatcattgccatggatgctgcctttggaatggaatacttgcacgccaaaaacattgttcacttcgatttgaaatgtgacaatttacttgtgaacctcaaagatccttctcgcccaatctgcaaggtaaaagctgattcatatgatgtctttgaacaaaatttattcatactcttcactcatttgttcttcctcaaggttggtgatttcggtttgtcgaaaatcaaaagaaatacattggtatctggtggtgtacgcggaaccttaccatggatggcaccagagcttctcaatggtagcagcagcaaagtttcagagaaggtaaaattaaatacttcatagtgaatataaagaatgggaacaaattgagttataactgtttttcctgcaggtcgatgtcttctcttttggtatagtcttgtgggagattctaaccggcgaggaaccatatgctaatatgcactacggtgctataataggtgtgtgttttggttgggtttgagttttactttgaaggattttcagaaaacatgaggttatagtcagcttattttctttcccatctcggtttcggttctggtgtcttctggcctggaattggtaaaatcggatgggacacgacttgttcttatcttactcataaattaatggtttaaacgcaggtgggatagtgaacaacacactgaggccgaccataccgagctactgtgactcggactggcgaatattaatggaggagtgttgggcgcctaacccaacagcaaggccatccttcacggagatagctggtcggttacgtgttatgtcaactgcagctacttcgaaccaatccaaaccaccagctcacaaggcttcaaagtgaaacagattcgatattttataggtttctctttactctttccaagtgttttggggtcaggagggagatatttgttgacccttttctcctttccccctttttttaccaaaacaaaacaaaaaaaaaaaaaaaaaaaattgtttttctcgctagtgttgagaaggaaatatgatagattaatgtaagaacgtttcttaccaaatgtgaacaatcgagattcaagactacgggatttgctaaatgtgaacaaagtaagaacattggtaaacatagattcttagagatttgctgctcaaaatgcagctaagagaacaaaacttgaagatgattttttagtcatcaattttctgttgatttctgccttttgccccgtttcttaagcaaccctttatccgcaagtgttttccgtttcaatttcctccggtctttaaccttgtcttcgaatccattatctagcatcttcatcattgccactcttttggcttttgagacctgcagatatagatttcgaagtttggatcagttaaacatgtcaggatataactcgcagccaataactgatcttactcttcttaaatacccaggtgtactagaacctagacaccatggcgaagcagctggtatgactcagtatttgatcagaactttgatgtataacacagcgaatcttacctttgtgacttctaaactgtcagtgattacttttttgttgtatggttccatcttttttccaacttcctcttctattttatggataagtttcacatcggtctgcaaaaggatatggaagggttagtaggctgtaagcccaaccataaccaacaacacttaaggtcgatgtctcatgtggttctatgatttactactttacctcagtgataatgcttacagccagtcctcctctaccagctctagctgtacgtccaacacgatgaacataatccctaggatctctgatgtgagccaaatgtagaattagaatatcagttaaacatgaaaagcacagtgaatcaaagaaaaaggacagcaaaaggtacctcggaatgtcataattgatgacaaggtcaacagtaggaatgtccaatccacggctggcaacatcagtcgcaagcaatatcggtactttcccagacttgaatttacttagtgcagatagtcgcatagactgagaattcagagaatgcatagctatattttccacttcaagctcgtcaagcataagacttaacctttgacatgttctaaaacacgaaacaacgtctaatcagtaactgcaaatggatcacccgatgataaatgaataaagctatgaataggagacctgcaagtggagacaaaaatcatggctgatcgaatgcccttgtcttccatttgcgagaggatgtgcacaagatacagctctttggcatctttgtcttcgaaaatgaactgctgcgtaagagtgtcaacagtctttaacccttcataggcttcatagaaataagctttgtttgaagaatgttcaagcaaagcctgtaagttactagtcatggtagcagagaacaacaatgtttgtctactctttggcagacactgaaagattgtgcgtaactcgtcttggaaaccaacatcaagaactctatccgcctcgtccagcactaagaactaatcaaacaaacacaaagtaaagctaaagaatcaattaaaaagcagctactttgatagctcagaaatttgtgaatgttctttaccttggttctagagaaaactggaggaacatcaggattgttttcaagcaaaaccttgattcttccaggagtagtaataacgatatgaggtcgtgaaaccaagctcatagtttgcgtcaacatatccattcctcccacaattacagagcaacgcaaattcaaacacgaacccaaagccttaaactgctcagcgagctggaacgctagctctctagtcggcgtcactacaagcgcgaagactccataaggatcttcagcaaggcggtgaagtataggtagagcaaacgcagcagttttaccactaccagtctgagcaagccctaaaacgtctcgtccggctaatatcttcggcacgcagtgagtttgaactggagtgggtttacgcatcccaagctctttacacgtttccactgcccactcagctaatccgagcccttcgaaattagtggcggatgtggtgtcggagctagggttaggattagtgaatttctcaaattgaggagtattctggtccgaatcaagtttctgggactgaatgtttactacggttttaggatttttgcgggatttagacatgatggtgattcccccttcctcctccggcgttggttcctccattctttatgaatcagaagaaaaaaatgaagaaattggtttcgaagtatcgccggaaaaatacgttcgttagccgccgttcttagattgttctggagatatatgcgtaaactatgatagggggagttcaaacccggtttatccaaacctaaacttaatatcggaatcgccggttaagcttttaccatcccatttaatttcgcggtttatttattgagctaatttcgaagatttgaatgttttgcatatttgaagattgtttttactctttgaaagaaccagtttgtcatttgttaaattttctacacagttaatcattcatcgtacaaataaaatgacaaagatatttaaagtcaaaaacagaaaccagaaaggaaatcttgtgataacaaacacacgaaaccaaagctaaatccgttaatcttcatcatatgtgtcttaataaacgttgtctcataggataacgcagcttcctgaatccctgatgaggaaaagaaccatcaaaaccaatcataaatcagatttgtgttctttcagagtgtagaataaaatagttgcggttatgaacaatgatacctcttggactcttcatagtaactcagagcttgctcgaacttgagccagagtggacatgattcctcaagatcgacgtggtcaggacctttcatatatgcttggacaatgaattgattacttctttgactgcgtatcacatagtttgaatatgttttgagtaagatatgtttgcaagatcaggatttttaagtagagagttggagttggaagcgtaccttccttcatattccgataaccaaaccaaataggctacaccaaagtacatagagataaatggtttggttagatcgtctgctgaatcgactctgtatgctcggtatcctagctccctttattcagaaaaaacagccccatttggatttaatatttggttaaggctttaatgcaaaccataaagaaacgaagtttggtcacaaacttacgagtataaccatgaagcggttgagtagtccactccgagtattcctacatgtttcttaataccgttcacaaaccgcatgcacacagtatcagcaatcgcacaaacaagaggctgcaccagtgatatggaacatattttatcagaatagcaaatgaataaaccctaaaagatgcccaatataagtttcctcagcaggtgataattagcggatatgcacacttacaactctaattcctttcgtgctgaagtactttgaaacaattatttctgcaacagcctaaaatagaaaatatagcattacttggaaggcaacatggtgagaacaattttggttattgttctacgggaaatatctgtcaaactgcaagctcaattaaaagacacacagtaccttaagttcccctcgagaaaggtaaggcctcttttcaccatcttgtgaaaaacgaacctttcccctttcttctttagattttgtccactctttacatatttcagactgattccacatatcttccatatcttcgggggaagctcgagagtcccagtatgtgaaatcggtgtctgttcaaccggagggtatatttcagttcatatcagaacttataagagaatgatagaggttctccaaatatgagcatagagctaaagcattgccacactgcacgatgctcctagagatctttatatgtttgacataggtgcatgtttatacacgtggagacattgttatatgatacagaacgatacaaaaagagggagagattacttgagcctggggaagcgggattcgtaggacgaaagcttgaagggccagcatcgccatgttttctgcaacaacaattaccaaagagactgaagttttagcttcgcttccctcaacttcttggtgcaactaccttattagtagtatgaacaaaattaacaatatgaaagcccacggcaacacaaaaccttatccgtgcaaccatgcataaaatatgacagcagaaactaggtacatagagcaagcagagataagaagcaacaaccttgaagggagactttctttcactgcaaggtatcgtttccaatatggcaatgtcgacttgtgagtcgccttttttgtcccaccattgtatgctctgacaacaaactcttcacttctctggctgcacatggaaagtaaaatatatttaaagtaattccaagaggaacttagacttgttgtcactgaaattgtaaagctagcaatgtaagcttagggacaatatatatcatacttattctgatagtctgttaaccatttcaggtaagctgccccaaagtacacatttataaagggcttgtgaagaagatcaggattgtcatctacattatatgcctgatagccttggcccctgcaataaagattgaccaaaaccggaacataagatttttttataaacttaagatcttcttgaaaaggagagaaactagaaatcgttttgtacccagccaaccatgctgctgtcttttcgaaaacttgtaaaattccaaggccagtttctttggtctttttgctgtaccgcataatgagaggctttcggtcactttcaagctcagcaattgcacatatcatttcctgcagaggaataggaaggtgcaaaacttcaagatcataaaggggcatagataatttcaataacctaaacagtagctaaaaccaagctcaaaactactagttttctaatgaagcataccgaatccaagatggaatcaaaatgcctccggacagttatatcagaaacagcctgaaaatgtaaggggttgatctcaataagtagaggcagaaagaaagaaaggtctaactagaaatccacatcaatcttgtattggaatgtttgaaatttcttatagattaccctcatctcggtctgtgtaagataaggctgaccatcaggatcccttgagaggtgaaccttctggcctttagtctctccaacatcaatccattcagcactgaccgcaggatccatccacatttcttctaaatcctctggctcaacacaatcattccagaacgtgaaactgttggccattcttgcattgctatacgacctttccattgatatctatcagaaacaaacgaaaaacaagaggaaacagaagcttatttagaacacatcgttaacaacatccataagtaacatgtttgccaaatgtaaagaagaaaatcgaaatatcagacctagccgaaggcttaagcgggaaggaagagaatatcgacgagagaagcagaggaagaaggtttctcggcgaatccagagagaagaagatgatgaagattcaaattaatctctgggaaattcaagagatacagagaattcgacggttcgccatttttgacgggagagccaaaaaagcaaattaatcacacagaggggactgtgagacgagccaactgcagaaacagcacgattctttcgaagaaaatgccacctggcatatcggagctggctcagcctcgtcgtcgtttaagttttaacagtacagaagccatttttagagggagagccagctggacttgacacgtgtcaaactaaatcaggcccattttattttcgcgtggcaaaactcaataaacaacaaaagatacgtcaacgttattcaaatatgaccaaaggcccaccaaatcatgggccttgacgccgatccggtacacgcggctttgtagttttcctccgtgaaatctcaacccttagatctcatcgcaaaagtagttacgatgggccgcgacgcatcagaacacagtcatcgtctttgcagaatcgtaagcatattttacatgagaaattgcaattgcaatttgcatttgtctcatttttttactcaaacgaacattttcgtggctccagagctacactcaaaagccattcagcggaaggggttaggatttttggcggcgagatctctctgtttctggtagcttagcaatggccttatcttctctcctcagatctgccgccacttccgccgcagctcctcgtgtcgagctttatccatcgtcatcgtacaatcattctcaggtattaaacgttttcgtttctcactcttgcgtttgtgttccatttaatatgttttagctcgcttggagttttggtagatactagatagtaggaggtgatgttttgtctttggttctggtttcaatttctcagtgtaaagtcaacttggtgtttctatagtatcgctatcttctctacttgagtcctcacatgtagttgaaatattgaattcctagtcgtttggcctgagttaactgatgagcatctgaatcgatgataggcagcattaaagtttcagtgagtttattatatgttttgtctcaaatgatcaggtcacgtcaagtcttggattcagtcatagcctgacctcgtctagattttctggtgctgcagtttcaaccgggtaatcttcaactttacagttatgtgacaaactctgtagtacatgtaaatcttttacgatgctttcttttggttctcaacaatgttttaatgttcaaatgtacagaaaatacaatgcgaagagggttcaacccatcaaggccacagctacggaagcacctcctgctgttcatagtaagaagacaaatttaattgatgttcttacttgtgtttgttgctgcattctgacagtaacttcgatttgattgacttgtatagggtcaaggagcagtggaaagacaaaggttgggatcaacggtattttttgtttccattgctggattcattttgaaattcaacatcatcagatagtttattccgtctgacttgcttctagtcctctaccttttcatttcttattgatgactgtattttatatgtgcgagacaggttttggtcgaattggaagattggtcctccgcatcgcaacctttagggatgatatcgaggttgtagcagtcaacgatccattcatagatgccaagtacatggtaagtagtagatgcaacttacaatgccgtttttgctcttactagtttctaatgtatttttcgccaggaatatcttataactgttgctcatactcttttcccatttagttttccttactcatagtaactgatccacgtgcttgaacacgtaatattaatcatacttaaaggcatgggataatatatcaaacttaaaccaaatcttctctcctcctcttatgcaggcttacatgttcaagtatgattctactcatggaaattacaaaggaactatcaatgtaattgatgattcaactttggagatcaatggaaaacaagtcaaagttgtcagcaagaggtattgcctcaaaatgttgactcatgtgtatctgtctagtatggtcaaattatgaatcaatttccactaatatcctattggtagggttttatgcttatccttttttagagtctaacatcttaattgttcttcctcagagacccagctgaaatcccgtgggctgatcttggagctgagtatgttgttgagtcttcaggggtattcaccaccgttggacaagcttcatcacatttgaaggtatgcactttcatttgaacacgcttgttgatctactagtttcattgatgctaacatttaataccaagccttatattattaataattccaaacattcaactcctaaaatggtctatgattttcttgacctttcattgtctgtgcagggtggtgctaagaaggtcatcatttctgcaccttcagcggacgcgcccatgtttgttgttggagtaaatgaaaagacatacctgcctaacatggatatagtctccaatgcaagttgtaccaccaattgtcttgcacctcttgccaaggtttgtagcattgcatttttgtcctgtatatagctcattatgaagagcttcattaaagtcaaataaagttgtctatggcccttaagcacttgtatctggcaggtggtgcatgaggaatttggtattcttgaaggcttgatgacaacagtccacgcgaccacaggtatttgatccttgtgccctcttgttatatgtcactgtatattactgaattttcgagactcaactatgtgttttttttaatcttattctttgcttttgaatattcagctactcagaaaactgtggacggcccatcaatgaaggactggagaggaggccgaggcgcaagtcaaaacatcattcctagctcaacaggcgctgcaaaggtacccaaatttgtacagttatatataaacatagcatctggaatcatatttaagccatgacttttttacttgtctcaataggctgttggtaaggtccttccggaactcaatggaaaactaacaggaatggccttccgtgtcccaacaccaaatgtctctgttgtggatttaacttgtcgacttgagaaggatgcatcgtatgaagacgtcaaggcagccataaagtattactctcaaaacctgttcaactaatttgcgtaccattctctatacatgaataaaacatggaacttgtaataacatctcatgattttgatttgaaatctctaacaggtttgcatcagaaggaccacttaggggcattcttggatatacagaagaagatgtcgtctctaatgattttcttggagattcaaggtatgtcactcttaaatattgtagcggatcatttaaaatcttggtactcaaaggttgtggccattgtcaaaaaaattcaggtcaagtatctttgatgctaatgctgggattggattaagcaagtccttcatgaaacttgtctcctggtatgacaacgaatggggttacaggtaacagttagtctctctcatttctttaccatcacatttaccatttgacaatacccaaagactaaaatatgcgtgggtcttgtaatgttacagcaaccgagtccttgacctgatagaacacatggcgttagttgcagccagccgctaaaaccatatcccgccaacgttcgttaggtagtttttgttacattgggggttcgattactgaaccttccggttttggctccaagttttatgtaaaaccatacgatatctaataatatggggaagattttttttgttgtacgaagaaatattgttagcagctagtcgaaaccttttctatatataaaaattggtttccaaagattggaattttctggttatatggttttttgttagcttcaatatctcatctctaagttatgaatattcgaaattgtgacagtgaaccatcgatgagtacacgaagatgtaacgttgagaatgagattatgactttgtacagcgtagtatatgatgaaatattgacgtgacatccacttataggcaaaatgatgtgatagcaaataatatctgcaaagtaaaaacataaacgatctataggactttgttaataatacgatgcaacataaaaacccactcagagaaaatgctggtaaaaagaggaaaagtgtgagttaacaaaaggcagaaggggacaaaaagctttatgcaatcgtgggaaaccactttgatctaaaaaactgtggacgtagtatttaatcattccttatcataatccaaaatgtataataaaaagatatctctacttaacgtggccatatagaaaaccttttaagatgaaggaaagagtaatgtaaaagaattggtaatggtatacatacatactcgtgattttatgaccatggctttttgcatcactagtgagtaatgcccacctacttcgtcaactcaacaacttatgaataactattcaattttttttttgccgattatgtgcacaattttaaaacagaagacaaatgtaaagtatatgactataaaatattgactaaataactttccggcgattttgttagtaaatgttaagaaaatttgttctttttccttgtagaaaaggaatgattctaaattactatcccaaaaaaaaaaaaagtaataacttgtttcgaagagtttgtgtgtgagtcgtatatgccgcttaactcctatattttctttctctttctcacaacttcccctagaaacacttttttcggaattcgaacgcacagcgatcggataatggcgacggagcatataactcgtacgggagatgaatacaatgtcgagcttttacctagtgacgacgatgcgccgccgcttgaatcgtcttggcgtctcaacctcgacgcttttcaactcccttcttccaccggtggccgtcacgacggacgtactcgcttttctcgctattttcgtactccaagtaatttttttattcttcttcatgtttttgttatctgctctcaatccgtaaagtgtgcatagagacgtgtacgtaaaatgatcagcgaccatgacttgtgaattgtggatatgaactttgatcatgtgtatgaaaaaaaaaaaagtagttatacaaatgtgtagttgttgaaatttttttgggaaaataaatttagaaattcagtctagaaggaaaaaaattagagtgaatgattctctctgtttaaaaccccttgctattgatttgattcagtataaaactttttctttttgttgattcaaagtttttgatgggatctttagcttctcttttggagtttgtatatacccatattctttgttttaaagttatgtggatgctgaatcagattaatctctacagaggttataaggcgttttagagtgatttgagaaactgttatacccatcaaaggtcgactatcaaattgttaaatcttgaaaatggactttaactttgaacccttttctctgttgtctcaatgcaggaaaggaacgtagagtctctgaatactacaagaagcaagagaggctcctcgagggtttcaatgagatggagactatccacgaaaatggttttgcatctggtgttccaactgaggtctggcctctactgttctttctttagtttttttttcttatggtatagatattagatgaatcctcaagcttgtttggtttgaacaggaagaaatgaagaagcttgcaaagagtgagagacttgcggttcacatatcgaacgcaacaaatttggtgctttttgtagcaaaagtttatgcctctatggagagtagatccatggctgtgattgcttcaactttggactctcttttggatctcttgtctggttttatcctctggtttacagctaatgccatgagaaaaccaaaccagtttcactatcctatcggaaagcgccggatgcaacctgtggtatgcttcttctgttttgatctcttaacccctttgtttggaacttacttgtctcacaagaaaatagaactgataatgtaaatttacagggtatcattgtgtttgcttccgtgatggcaactcttggactgcaagttttgctagagtcaggaaggcaactagttgccaaggtactttacatattttcaggtaactgctttcatcggttaattaatgtatttaaccaattctgttttttgttacagagtggtattcatatgaatagcacagaggagaaatggatgattggtatcatggtctctgtcaccatcgtgaagtttcttctaatgctttattgcagaggatttcagaacgaaatcgttagggcctatgctcaagatcacctctttgacgtcgtcactaattcaatcggcttagcaacagctgtcttggccgtcaaattctactggtggattgatcctaccggtgctatacttgtaagtaactaacttaggaatctaaaatgatcaagaaatgtctcgtcggattactaaaacgttttttttttcctttttatggttgcagattgctttgtacaccatagcaacatgggcaagaaccgtactagagaacgtccattcactgatcggccgctctgcgccaccagatttcttggcgaaactgacattcttgatatggaaccatcacgaacaaattaagcatattgacacagtaagggcttacacttttgggtcacactactttgtggaagtggacattgttttgccagaggacatgagactacaagaggctcacaacatcggagagactcttcaggaaaagctcgagcagctcgctgaagtagaacgagcttttgtccacatagactttgagttcactcatcgtcctgaacacaagtgtaactagattttaagtagtaatttgtagtactataattagttctttagtttatgtactcttcgtgtcgtttttgtctatatagatacttgaacgttgtgccgtctctgtttatcgaatgcgcattgtgtgtcgtttgaagctaatcgtcgacattaatagcgtttcaaacactaaactcaaaataaagataaaatcatatataataaaataatgaattttaaatgaaaaccactcaaaatggtttttatctatcttccgacaaaattccgtgcttcattgctcttctccacaagacaacatttctctggctcagaatcgacgccatggaaatgtaaagaagaaacaaagacgagctctcaaatccagcagcaatggcttttcttctttctaatctatcatctccgtcaatccatcttcaaaccggaaaatacccaaaccttaaacccattttcagtcaatctctatcgtcttcgtcttctgttagctacgaatttgtagaagagaatctatctacactctctctattgagcatccagtctcctcctcttaaagacacgcaagttcagacaagacacagttcgcaagataagcataataaccacgacagagatgaattctatatcaatcttggtgtcgctgtccgtacacttcgtgaagatttgcctttgctcttcactagagatcttaattacgacatctacaggtaaatttctcgtttgggtatttgataattgatgaaagaaagaatctttggatgctatcttcagaaatttatcattttggtataaaaaaggagcttcctttgatctctctgtttgtgaatgtttctcttagaaattcagaatattttttttgtttgacagggatgatataacatttgtggatccgatgaacacattcactgggatggacaactacaagattatcttctgggcactcagatttcatgggaagatattgttcagagatatctcacttgagatcttcagagtatggcaaccatcagagaacatgattctcatcaggtggaatctcaagggtgtgcctagagttccatgggaagctaaaggagagtttcaaggcacttctcggtataaactcgaccgtaatggcaaaatctatgagcataaagtcgataacttggccttcaatttccctcaacagctcaaacctgcagcttcggttttggatttggtgactgcttcccctgcaagcagtcctaatcctacgttctttttcagtcctgtggactcttattcatcttcatgggttaagttttatcaagcggtgagagggacattggagacagaggatatgtttgtaacaacagactgtttagtcacatgctcatagtggaagtagagttgcgatatagacactcaaggtcacacttctcaggtgtatatagtttttacattaaaggtttcatatatatgagtagatctggttgacttaattcttgggaaacctagaattgttatgttgttccaaaagctttatacaacgttatcaatacaatggagttttgtctttatgattatgtgaaacagtaatattactcagtggttaaacacacagaaaaaaaccaacacacctaatcaaagaatcaccattagcctgagttttcttaatatccggctagagtccatgtaaatgttgtatctccctgcaatttccgagtaaggatgaacaagatcagttcaatagagaaaacgaatagaaaacaagttttcagctcatgaacatatgtatatatatacacacctttagactggtcaggcttgccatgacttttgtatagttcaacttagagagggagtttatctaagggcttcaagactgcgacgttactgcgatctggatttatgtacttctcataagtgaccctcaggtttcctgttttagcagctttgtgaaaccttaagatcatgtcagaacagtccctgtgataagaaaattgtgtaagattagttaaagaatgtaactagtctaagtgatctacaaggaggagttattaatgagattttaacttacttcatctgggagacattgtagtgggtatggttgtttaggagcgaggtccaaactggagtcatatgcaaagtgcatctggcaacataaatggctgatgcacatagcagtgatggcttatacttcaaagcttcgtactcaaccaaacacaactcgataaggtagaaggcgagttgttcaagctgataatagaaataatactattcaatgtctacctattcaaacagaagaattttataggttattaaagcatacaatgcaggtttttcgcgtaccttcttattggattgagcagcttttaggaacctcaacatgaaaacatagggggtgggtgcattcaaacggaactttaactgtttaagcatacttctctcctgaaaatgaaaattaggataagttacaaggggaaatacgcaaatgacccgtattttttataaagaatagagaagtttgactataaacagagttcattatataccattcccaagatttgttctctggtgtatgattctgcggatatgctgatcaagtctttgatctgcacatggacaaagaaaatagattgtaaatgtctattttcaggagaggtattagctttcaggataaatgtctcttaccctaggatgccagtagtcctcatatttagatgccaataagagtgcagtaagacctatcaattgcatctcatttttatgtattggaacttgggagaggtaacggtctaataagtccattgtcaggtaaagagtctcatgcattagatcaaatttgaaatgaacctgcaaacaataagtaaaacctaagtttccacaagaagaagtagggataatatcaagttgaaatggaaccaaaaatatactgcactcacttcgataagccagttgatcaaaattccacgcgtaactggactgacttctgcatgagctgacaagtaatgtcccaaagctggatttaatgcctgcaacaatatttcacgttaagctactggaaagctaaaattcaatattcaaactgcaagtaaaattaccaaattagtaatattagagaaaaagaagttgatgtatgtggaagaaataagtggattacttctgcagtccaatagaactgatatatgtcatccacatattctgcaacttccagctgattggattcatcatcaatgcttggaagtttttctggctctgtggtttcaccatttttctcatcgaactgcaagtaaaattaccaaattagtaatattagagaaaaagaagtcacaagaaacaacacaactaataaattacgaacctttgatccattcactagtagagatgtgaaagactttctacgttttgattttggcttcgctgtaacatccaacacttttgttgttgggtctttgtttccactagatgaactctctccttgagtgtcttcttcaagacattttgtctcaaccttttccggaagtgacagtgttgaggcaactgcagaagaagggattgaagaaatagatcttgatttacttctacccactgggggcttcttaagagagctacggttttgtagcgaagtctttacagttgtctggatcttgagtaagagagaaagcttatcacatatttaataaacaaaaatcctcaatacgactgtaactattgcccgatgaaatgatcacgagcaagaaaacaaagatgaaagaagaatgatttagcagttcaatgatgataatagccaaggccaaatagtgtggctttaatggaaatgaatcacttgcatagatatgaaaggactaaggtgtataccttgatagatttccttacgaaacggacgttattcttactctgcttattgccgtccctaagcatgtaaagaaaataaacttagcaacttgggatataagttgctgcccacaaacgataaaagaaaaaaataatctgattctccaagatgtaaaaaagtcgtgcattgataatgaaaatgcaaacaaggattctgtgaatgtagacaatttgatagttggaagtagacatgtgtgatacgcaagagagaaacaacttcacttatttaatgatgatatcagaattaagcatatttacttacgattgtatagagccgacacttgttcgagttttccaagtataggttccggcactgcttagctgcgggacagcttggttgctggctttactggctgaaacaatgcaacatcaatcatatcagatactgaccaatcaagttacaattttaacatacacatttccatcagaagttagaaaagaaatccatgttacctagaccctgacccaattgtttcgaatttaagcctgagacattgaactgcgccaagatagtaaatacacaattagtaaactgtcctaaatgattagcctcacgagttgttgtacagccagttgtaagaaaaaaaaacaatctcaaattagattgataacaaccttttttaagctcttatctgtgaggcttgttctctttaaagttggtaaggactttctgcaagcacaaatcaatcaaggaagttaatcaatgaatgatgtaaatcattctcagcagatactaaagaaaatggctggtagattaataatgttttcgctatggtgaatgaacaacaggttacttgatgagagctttgacatattgataggtaatgtagggcataaacaagatatctattttttcttggaaaattcttcaaactagtctggaagcggataatctattatgcatgagattagcacgaaggtaccttgttccaccagccgttgatccaaggctcaaggttttgtttttgatgaatttctgacctaaaatatgatttaaaacaaagttaagataaatggcaaagatcaactaaagccatagccatgaaaacaaacataacatttaggaagtcacctgtcttgtaaaggttattgttcccaagttcggtggttcttttactcacattctcctatatcagaaaaaagaaacaatctagaatcaaggcttgcaagaaaaatgaaggaaatggccatcaagtagtttaactgatgaatctcatgctttaagacacaaagtttgtaatatttgctgtaactcatatgctgatgaattgtgatattctggttaatctcataactgcatctagtcatagtaatttgcaagtatacaacatgatatagtttgccaatacgcttgctataccttagtagactttttcactgagatattattagctctggttggaccaactgagaccctacacatggaaaggtcaattagcccagcatcatcaactcattttcaaacatcagatattatatacatggaactgtacggattcgttctgtaaaagctcatcaactgagatgaacgactaatcctaagtagagatgtaacgtattgcatgtatatgatgtgtatagcagcagctaacgattactgcataccttttcggatttgccatttttacacctttccatttcctgcattgttgcatgttcagtagaatagttttagaacagaatgcaaatcagtacaataaaaactaactaactgattaagaagtgaagaccatggcagttaataactcttttccatgagggataacaaaaaacccttaaaagttaagcaattttacatggtactgctgccacaaagcgttggaatccttagagtgttcccaccaagattacttaaatcagccaaagcttttcttgtgactttagtgtattcctctgaaaaggagacaaatatcggagttaactttcaaaactaggtcccaaaaatgtaatgaagatatactctcccttataaagcttaccccagttttcaatactgcttttgccctttcctgtgattctcgaattttccttctttttgaatcaaaacaaaagtgcattaacatgtgaataagtgcataacatccaacacttgtatgaactcagaaacagggaaaagggataaaccttcatattgtttgtgttagaagttgctcctaaaccattgctaattgttacagactttctcctaaacaatgtaaaagcagaagattaattcttacagattcgtaaagtcaatttcttcatgatcaagccaaaatatgcaccagtaaatacatcatgtaatggatggaagaaaacagaataattgtaaaaacagcaacacaaacctcaaaggaatacgagtcttcttctgtgaagtacctctgcagaaagaaataggtacagtttaatccagattaacaaatagcaacagtttaattcagattactgaaagatgaattgcaagaggatccacttacattgtactggctggatcagttttctgattatcggagaagattttgaaactcctagtactcactgtttaacatgtaaacatttttttagaactgaataaggttcaccaagtaactaacagaggataaaatagtctctcttacctcgatttccaagaatatcatctctacttagtcgtggtgcctacaaaagtaaatcaatcgtaagtgaaataagaagcaaggctttatcccctgtgattttaagatgaagttgatctaactaaccaaatctgagagtagtaagctactgaaaactcaagaatctaatcttgtgataaaagaagcagaaataggcaaataccataatatcttctatcttcgaaacaattcaagatccctaatcctaatctcgtttaaaataacaagccctcgctcgaatctcaaattcatctgcgatgaacgtagtaaccctaactcgttttttgaagaaattaggattttcacgtaccttcgcgaacgccattttcctcaaatctccagatcttctgctttgttcttcccagaaacccaattgcaagagagttctaccgttgcaaattcccaaaagtagcgacgccgcttctcaagtatttgaaattgagcctatctaatttacgattatgccccttctgttgctacgtattttctgcttttgtttgggctttgtttacccaagcccattttaatccaacctagagcttgtcagacccatcattctattattctgaaaaaataaaataaaagaacttcactgtttgcattttgttagtttgttcagtttctcagaggatactgtgcaagtgcaacaacataaatttcaagtccatagaaagaaaccatgcattatgtaaaaaaacttaaagaaaagactacaagatcaggtatagaaaaagtgctttatgttgacataaaaagtaatttaacttctaattgttgtttatttcttcaaaaataaaacaaacttagacatttgatatcatatcaggcaacatcagctactttgaatatacattagtcactgtggagagatgtgttttgccaaataatgcttattgctccgacaagattgaaatattatcaagaagatgtagttgcacccaaagtgacgtacggacctgcaaaatgcagaaaagaatcagcaaatgatgagaaaacaaacaaagagagttcaacatttctatcttgatttatcggtcactaacacaccctttgattctaatcacgataaggcgtgagatcgatttggaactgttgtttcccctttgtgacactctgcaaagatgttataagagccaatgttacaacaaaaggaaacagattaaatttttatgggataatgtaaagggcttaccgcgattgcaatgagctcttctagcagttcttctagatgacgcagaggctgaacgggaagaaaaacgatgatcaagaatgcattgtgttagactaatggatatggtctgaaaaaaagtaaaactcacccattgtgttggaccatcgaccggtgcatttaaaggatcatcatgcacctaattcaccggaaaatgaaccaagtttcataaccaaattggaacaaagattcagcgagatgacaaaacttgcgataaagttggatacctccatgaaaattccatcgacaccaacagctacggcggttcttgctatgcatggtattaattcgcgaaggccaccactagcaacacccccaccatctaactatataaacaaggtatgtttgagtttagaccaattctgatttagctttaaaacaccaagcattttcttaaattactcagagcatcgttctaatgaccataccttcttgcctgcaggttgttgtaatgaatgagttatatcagcaacctgaagccaataactaaattatattatacgagtgtcaaaacatcaaagtataaagccaaagccaagatataaactcccacaacaagaaaagaacaagaagcaatattaactcacaacgggacaatcagcttccctcatccattccaaatttcgtggatctactattaaatcatctgaggaacaaaattaaaatgtaaggacactcaggagttatatccagtgtcttttagtctattttagtctctatttgcaaaaaaattggtgaattctattgacacaaagaacagttaacttactgtatccaaacatggttcctctttcacaaaccatcacatttggattccctgcgagtctaaccttctcagccgagtttctcatgaccttaaaatggatatacatgaaatcagtcactacaatataccagggaacaaaagtttgtacagatcaaaaagataactcacagagtgaccacaaaattgtcctttctttatgttgataattttcccactttgggctgccgcgaccagaagatctgtctggagatataggcaatagttaaaaccctgaactctgtatataaatgataaattcaaacagtaaatgaaaatttgatagctaaaaaagagttgaagaaaagcatatgttagaatcttgcctgtcgacataagaacgccggtatctgaattatatctgcaaccttgccaactgcttcacactaataaaaacaaacgaagcattagaaaggaacaaagatttttcgaatcttgaatctctgatgtgactaaaactcaaaatacctgactcgactcatgaacgtcagtaacgattggtagatcaaatgctactttcaccttctcaagaatctgtcgagagaaacagaaaagttactacctgtagtatacttgtgcaggaactacacacaaaaaaatgaagccacatcaatactagtttccgtaaatgtaaatggttgcattatagccaggagctaaatgcaattgctggtgtcagctcatactgaaggttctaaaagacgtaagaatttatagatataagatcgctttgacatcaatatactcctgaaggttttcaaatgcgcagttctaagagcaccagataaagagtcatccatgcttgcaactcaaagaagagggaatgatttaccttgagcccctcagccatgccaggacctcggaaggactttgatgaagttctgttagctttatcgaaacttgacttgaaaaccagaggcaacccaagcctacaacattcacaatcaacatgaacatgcataactataactatataagtaaacaccttgctcaataagctaaaatgctcatgtgatgagaggatcaaggtctccactgtgttaaacatttttcccccttgtcaattattttaatagttccaacacagttgaacacaagatgtcacaacaagaaaaagagcttcaatggtgatggttacacatactttgtcgaaatatctttgatgcttttagccatacgaagaacatgctcttcggattcgatcacatttggaccagccaataagaaaaacggctcagcaacctgcaatgagtcattgtccgtacgataagataactcaattcaccggaagaaaataaaaaaaataacactgaacctagtaaaaaaaactcaaccttgagctgatcatacagtagtgacgctgaattcgccatttctatagtagagcttaagatcagataacaaaacctcaacttccaaaatcagaatctaaaattcacgaaagaacttatgataatttctctacattgatctgcatcgaagaaaatcacaaatcaaggatttaggattctgacctttaactggaagttgtagtgtgagtgaaggcagtgagatgccaaaatagaaattgccaatggccgagaggtgatgttcggatacgccaacagtactgtccctggcgtggataatcattatccggttttaattcaattcatagatcgttaaaccaatcggttaataaataaaattctatttgatttggtttaatttcttcggttccggttttatcttttcaccaacattttcgtttgtcatctttcgcacctaaaccttcacctactcctccactgaaccctagcttacactcactgttcatttctctctattggcatcgacgccattgttggactgaagatgtcaggattcgaagatggattttcagctgaaaagctattctcacaaggatactcatacacctacgacgatgtgatatttctaccacacttcatcgacttttccactgacgccgtctcgctatccacgcgtctcagcaagcgcgtcccactctcgatcccatgcgtcgcttcgccgatggacactgtctcggaatcccacatggctgctgcaatggctgctcttggaggaatcggaatcgtgcactataactgcgacatcgatactcaagcttccgttatccgtcacgctaaatcgcttcaagttccgattgcgtctgatgctgtttttaaatgcccagagcaccagattggttctgttgatgattttggtccttcttccttcgtttttgtctcgcagacgggtataatttcacaatcaatttcataccttttagctgaaagttagctactttcattttcaaaattgtgaaatagtttccatttgacaacttcgttgttgtttgtttgatgaatcaggaacattgacaccgaaattgttgggttatgtttcaaaatcggagtggtcgagtatgaaagatgaccaaaaggaggtgaagatatatgattacatgaagagttgtgagaacaaagattactatgtgccatgggatattgatcttgacaagattgaggcggttttggaagataagcagaaagggtttgttgttctggagaaggaaggtgagactgtgaacgtagtaacaaaagacgatgtggagagggttaaaggatatcccaagttagggtcaggaactgttggtgcagacaagaaatggatggttggtgctgctatagggacaagggaatcagacaaggagaggctagagcacttagtgaaagctggagctaatgttgtggtgttggatagttcgcaagggaactcgatttaccagcttgagatgatcaagtatgtgaagaatacgtatccggagttggatgtggtcggtgggaatgtggtgactatgtaccaggctgagaacttgatcaaagcaggagttgatgggttaagagttggtatgggatctggatctatatgcacaacacaagaggtttgtgccgttggacgaggacaggtaaatgaaaaagctttcatatttgaaataaagtgctaagttgattccatgaattgcaccttacaaagtcgggttcttttattttttgtgattggttctctcttaggctactgccgtgtacaaagtctcgacactagctgctcagcacggtgtacctgttatcgcagatggtggcatctcaaactcaggtcacattgtgaaggctctagttctgggagcatcaacggtgatgatgggaagcttcttggctggaagcaccgaggctcctggagcctatgaatatcgagtaattgcacacaccttcctactttggatattgattaaccaacttccttgatattttcctcaatatcttgctttgtttggtctgtttttatagaacggtaggagagtgaagaaatacagaggtatgggttcattagaagcaatgaccaaaggaagcgaccagagatacttgggagataccgcgaaactcaagattgcacaaggagtggttggagcggttgcagataaaggctcagtgttgaagtttataccatacacaatgcatgccgtgaagcaaggttttcaagatctcggtgcttcttctttgcagtctgctcacgagctattgagagataatacccttagactcgaggtatgtcgttaattctactccttggaaaactatcttaagctgcgatttccgctgttttgttgttagtatttacgttgatggttttgatgttgtgaataggctcgtaccggtgcagcacagatagaaggtggaatccatggactggtgtcttacgaaaagaaatcgttttagctttccccagtttactttcttatgttacaatgcactacagcacttgtagtgtcaacaataaggtcttgtctcacatgtaatcctgtaatagttgaatcgtgtttcttaatgctatttcactgccccatttcaatcatttgggattatggaattatgttatataacttttgttcgtgttttcagttttgtattaaacacaataaatatgaatcttgctggaccaaaatcaaaagaaattttgtattaaaatggcttgccagttgccactccatgcaagttgcaaccactcatgtccattttacatgattctgacatatcgattcctgacccagtgataccaacaaactttccaccttggtcgcagcgtttactttagttagttcccaacaaactatgggcctattttgcaaactaaagacagtctctatcaaacaaaaaaattatatatgatgtgatatagtcttatcataagagccgctctagtcttatgggttagtgtctatacatataatttctcataaacggtaaacatctattctcatagtgaatttatttaccaaaagaaggagaagtatgtgacagatcccaaatacaacaaacaagagcttaagagaatcctatcatcttccacctccagcacttctgttccatgacaagtacgatggatctcccagttgcctgaaacacatagataaatcgtaacataaatttttgtcattgctatatggactcttaaagtctcaaaaaccagtgcatctttctaacgaaatgtggcattgtagagaatgttataatataccttggttttgctagatacaagacggagaaggaaacagccaagaacaagcatatgctaccaacagtcaaatacgcaatcccaaggaaatcattccttccaccgagccagctagtggtagatagcacaagcttctttttcccattaaagctataagtgttgtaattattctgcaacaagacctttatcgtatctccagcttgaagatcagtgtctattttgccatacagctttctaaatgttggtaaagccgcggttcgcatccagacaattagatcttcttgctcactcaactatcagaaccatacatttttaaaaatgtttagatatcgattgatagcgagtagattggttcatctctcttatatatcactttagattattattttccttaaaagatgagatttcaatacatcaaaaagacttactggaatatcttgatcaagacttttaccgccgatgagagatcctttctggaaattttttgggaagacatttttaccaaactttgattctctatcactcttccacgagatgtctttcttattcactggaagtttttggttgtttctagtgaaatcataagtatcattgaacaaactccaagcaacaagaccacaaggaacaataggttgaccacctagtgtatcctccggggcacatgatttggtttcgtgttcatcttttggacttctcagttgtccatcttgtcgacttttcacatacctgcattttgaaaataaaaattggaatgcaccaatagcacatgctcaaagaggttctactagattccatgaaaaggtcgcaaaacacaagtacaatactaatagactattagtaatagtgagaagttaccgtcgatggttttggtaatagttctctagctgataatatacgtagaccggattcttcatagtttttgtcacctatcataacaaaaattcatcaaagaagattgtgaaagaaagttcaattaagaagaactgaagaagaatatagaaagaactaaagatgatatagatatctaccgttattgttctgttacacctcttatcttccaagccctgtatgtatcggactttgttatccctagaggataatggaatgcagtctgtgtcatatcgatcaacaatttcgatgacctgatcatgtatgtaataaaaaaaatcaaatcatatacacaaaatatatataattgtagctgaggaaagtgagaaaagacttaaaacatacaccctgagaagcaaatagacaaatcactcccagaggaataaagacaacacccgagacaagaaaagtcagaatcacctgcaaaacaagataaccaaaaaagagtttaactatattaaacgttggaaattttacttctgagactgttacatctttatgagttattgaagctttacccattttggagtaagaattggtttgcatgctggaagctcctgttgggtaaatcttgaatctgatgaagcaaagttagccaacaaattatgtttctttgttgacatattctaagaaacttatcttaagactagagaaatcaaaaggtatcacacattttaatttattgggagttacattagtccaacaacacaaaatgggtttcaactacacccttgttaaactttcacatgaaatggattactagaacataccaaacaaagaagaaaacgcaagtacccatttgtgtgtactagactaatattaataatcggaattttttcctatataatatatctgtatacacaatgtaaattttagtcatttgcattgataaagaaatcatagaatatgatgatcgagagactagcaacatctcaaagaaagaatctgagttcttaacattattttcaatacgttcataacatagaagaactgatccattacgaggtggaaattataaaggcattccagaaacactaggtacgatcccaaagtacagatttgtcaaatccgcaaaagaaacaaaaaaatcagaaaaataaccgcaaatgacaaaatgtaacaaaaattagggaataggttagagatcacattttggacgctttgaggtgtttttggcagcagaagcctcagcggatccaccccctaaggcaattgaggacgtcgcagaaaagctcattacgaaagaattgacaatgagaaaaaaaaaactaattttgttaattcgatatatcttttattctttagttttcaaaaatatgcgttaattgtttcgtatttgactttttcgtttatcaatcatttcactgattgttaaatttttgtttgagaaattttggctagtatcggattagaggttaggattatttaacttggtccatcgaattgattgataattttcaaagctcacaaaattaaaatgtcaccaatcaaacaagtatgtatgtgaactaatccgatcaatgtaaccctttcaaattaaataattattcctacaaatatagatgcggtcgacaaaaaaaactatagccttccttccccttttgtgacaaaagaagaaactttagttggtagacattcttgtcctatcctgtcgttcgaaagattcctcttcatcattcctattatatgagctggagaaggcatatagtagtgtaaccgattcattgtatttgacgccaaaaaaaagaaaggattatctgtcatggaagatgaccaacctatatttcctctatgcatataatttaataatgaaattaggtattaattctttttttttttttaactattataggtactgagtaataatagttacatgttaagtaaagttgagtttataaaattagataaagcaaatccacgactaatgagtatgaaccgtaatgaactgaattcatactttgacttcgtggacccaagcttcacatgaagcacgtttgaaatattataataacgcatattaaacacggaatgatttaataatttatatagatttgacattttcatttaatgataacacagattcagatttcagacttatatttatacagtagtttgataagaatgaattaatgagagtataccataataccaatagtcaaattcttcaaatacaccaaaacaaaaaagctttgaaactaaacgataatggctgatccaatatcagaaccattgttgtctcatctcaccgatgattctggagtcaacgaaaaaaccagattagaagcattgactttcgacaagatcgtcgaacaaagtctatcagatttcggattctggcaatttttccagatttccctcgttggactagctttgctcttcgacgctcagcagatattcatcaccgtgtacacagatgcttatcccacgtggcactgtcttaaccacacgatctgtgatccttcagcctccgacatctgcaagcttccaagatcagcttgggaatgggacggtggctcccagggcaaatccgtcatttccgaatttggcctcgagtgctcgagctctttactcagaggtatgcctagttctgctttctacatcggtgccattgttggagggttttttcttgctttgattccagacgattccttgggtcgcaagaaactagttttgttctcaacctttgcaatgtcaatcacttcaatctctgttatcttctcaaccaatgtatggatttatacattccttaagtttatcattggattttcgcgatcacagacctggtcatacgcgttggttctcatcagtgagcgagtctccaccagatggagaccgagagctacgatgattccatttaccctattcgttttagggtttatgtcgttgtctggaatcgctttccttgcacaagattcttcatggagatatctatatctatacacatcagttccagcggtattttactgtatcttcctctacctcttcgcactcgaatcgcctcggtggcttcacatgcaaggaaaggataaagaagccattgatgttctcacaaagatgtcaccgaaggaaaaagcttatttggaatcagtggtttctaagttacccctcaagcaagaaaactttgaacaagcgccaacttactcgattaaggacttcttcttccgaaaatgggcttttcgtaggattttagttgttatgatcataatgtttgggttgggaatatcgtattacggcgttcctttagcagctagagacatagacgtcaacatctacttgagtgaaaccctaaatgcattggtggagttgcctacttttgttatcactccgatcttattggagagattcaacagaagaagctctgttcttgtgaataccttactcggtggggcatcaggggtgctctgtttcgttctcagcattctcggcaaaacagagatcgcgtttgccttcgaactcggaacattcttctgcgctagaatcggatttaaccttatggcagtttttatggttgaaatgtttccaacttgtgtgagaagctcggcaacaatgatgtttagacaggctcttgtcgttggaggagcttgttgtccgctaattgcttcgattggaagatacataccctcagtatcgtttgcgatttttggaattgcaatgtctggtttaggaatgttcgttttgattctgcctgagacaaaaggtttgagtctctgcgattcgatggaagaacaagaaaagagagatcaagccgtaaataccagccatgtttgctgagagtttaagagtttgtttagctcaaacattctccattttcatatgttttctattatgtgatgtttgtcttgattttaagagtaaactattttaagttgtgtcaagtaaaaactaaagagtatttgctattcatctacaaagctatcaaatgagtttctatgtctttgaactactaatacagaagcatttacatccatatttgatgaagccaagaaatctccgaccgttcctaattccggacactcttcccaatcattcattcctgaagtcattggacaatctcctctgttttttcctaccacaaacagtgaatacatctccccgatctctcttagaattgtcagcgtctgcattccgttgctcactcgcttctctatgaatccaacttgccccgtcgtcacaaatctgtcaagacaaataaaaaccatctctataaatgaaaaaacagagtaacggaaacagagtatgtgtgtaggaacatagaaacagagtactagtcatgccaaaaacagagtatttgcaggagcagagtatttgtaaggtacctgtgatagaattcttctaagaagattcgatctgtttcgttttcggtttgatcttcactaacaatctccaagaatacttcgttgttttccttggtcaccgcgtctccgacaattttctctgtctttgagtcatccgccacaaactgtatgacagtgaggtgaatctgagagttattggtaagccacttgcacaaggacagagcctcacgatcatcaggaccaccgaagaacaatgcagcaacgtgttgtaccgaatcagacccgtgaagctggtgaaaccctgttatgtttctatccacaaagataccaatcgaacattgagcttgctttagaaccttccggttcatatgtcgaaaaacttccccgtcattcgtggttttcccgtcgatcctctggtgtttatggaaaggtagaaacacgatcgatacacgaagatcttcagtggcgttacagatctcttcgtgcatattctccatcggcgccacaagtttcacctgccggaccattatttttctgtctctagtaaacgaatcgatcgagtcattgatctctagtccttcattagtcccgaactcatcgtctccgccgttggaatttcctgcatcttcgtctaattcgtggtacaacaattcagttttccgcttcttcgggagcggtatgaggtgcataaggtaaggcgtgaacggcgaagaagaagttccaggagaaaagccacttagagcagagactaaagagatcgatccacgagcatgacgaacgccatagacgcacgtcaacactcgtagctcctcggtagtgtcaaataactcaagtgatgtttttatatgtgcgaaactcttttcttgacttctaagcaacaaagatgttataactccgcttaacaaagtcatgatcactagagccgcaacgaacatatcatgaactaccggagtaaaccatttctacaaagagaaaatcaataacacggagatgaagattatcaaccgacttgaaacctaaattaacgagaagtcgtaatttgttgtaataccttgtacatcaagttagagtcgagaagaacaagacctatatgacctttgacggaaagcatggttgacaagaaaagccaatactgctttgggatcttcaagaatgaacaagcgaataaaactcctagaagcttccccagtaggcttaaagccacagtcataccaaggacgaggtagtggcgtttggttaacgaattgacgctgaatctaaatccgatgtaaccaaagtaaaccggaaggacaaactcgtgaatcgggtaactcaaccgttggatcaacgttctgtaagtttttccttctcttggaaacattaatccgatgataaacacaaaaagcgttgagtttaagttgctggattcgatggttaacgcgatgattagaataaggatgatgaaagcaagcgtttcagctttggagagatatttctctttagggtttctttttgggagccatgaagctaagaatctattagtcaagattataactcctgtggcaaatgagtagataaaaatatcagcagtcatagtcccggagatgaaagaaaggacgatagtgtagataaatatgttggttatctctatgaacaatccgcatgagattgctagccgtccgatctcagatgtgtgcagtttccaatcgatgatcgaacggatgacgacaggagctgccgtgttggacaaggtaatgaggaaggctaagtaaaatgttaagaaatcgcctttgatctgcatgaaacggatgagaaaccagaggaaagggagccagatgatgccagaaatgactaaggagcccaaagttatgacaatggagttcttcaagtttcgtttcatgaagtcaagatcgatctcgagaccgatcaagaacacaaaggctgttcgtaaaaggaatgagaaaaagatgtaatagcttgctgaatctttctggaggaaaaattcgtggactttgcggattattgtgagcaaactcaacacaatcccagcctgagcaaaaatgattaaaacgtcagttttttctgaatgttataatatgtcaattttcctgaaacgaaaccttattaacattcttgcacaacaggctactcttagggtttaagtgcacactcgtaaagttcagggagtaaattttgtaaaaaaaatagaaatcatggatactataataaaacgtcaatttatgagtactataataacgattttgtgcatgaattttacttgggtttgggtttcactatcatagagtttaggagtcaaattgcgaaaactttaaaacaaaaaaaaaagtgtttagaaagtattttttaacaaaacttacgagaatctgggcaacgggaccggcttggccacagggttttaggaataggtagaagaattgagagaagacgagaatgcaagccatttgaataaacattgtattgagtggattaaacaatgcatctccttctggcaaacaaaacaacatctttggatccattttcttgattcgattttgagcattcttcaaagttcaatgcgggaaaaataaaatgtgaaagaaacttcaatttctcctaaaaagaagaatatatatttttcaggttttttaagtattaatttatcttggttggagtttaaggggtttacatttacctgattatccttcgattactccatgcctctgttttacgccatttatttttcttgtcgacacatttaattttccccattaaaagcggatatacttactataatcggaaaatgcatgaattattggagtaggtttaaaggagtaagtttttgtttttgtaagataatagaaaagtgtcgatttcagcaagaaaactatgtagacttaatattttcaaaagtattaattaacattgcatccaacggaaaaaaaaaaaaaagcaataattttttgtcaaggaaaaagtatagcttttatgtatgtaaaattgtattgtactaaatgtatgaattaaattaacaggtatacgtcaaattatcattacaacttgtatctaattgttacttcaaaattttctattataccttttgaaaatgttatattcatattcttatgatgaaatgaatttatattatgccgcataaaaatatcaaatatactgatataacctgcatgaaaaagagagcatccatctaaatgttttattagactttcagtgacattccagtgttttgtatcaaacaaaactatgcctccacaaatttgtatattttatttaagttctcttgcatgcataaggctacgtacaagcttccaaatgaccaaagacattcgaattaaagacatctcccatgccctggaaagcaattacgcttatcttgtccaactgcaacaaccagtgcaacttgatcattattgaaacagatttattatagcgttttacagcatctattgattgtaattttgtacttatcttacaataagatatatataaatatatttttttcctcacaataagattcaatctaagaatatgaatttattgacgaagatgtaaaataaatgaaactggctttttttatgaagatgtatatcaagaaatgataataattcatagaagaaaaaatgataattataaagaagtagaccctaaaataaatagttaaccccaaagtggttgagtgggggatcacatgcagcaaattaacggcggtggggaagaaggtctgagaaattaaccaagagatggctcatcctcagccattcacttagccatcgagagatctcaaacccattaatcatttaacttactgaacatatctaataaatgtgtgtttatatatgtaatgagttagacgccaaaaataaattatagactagagacatgtcctgctagctggatcctagtcatcacggtctcacgagcagtattgcatccaattttcgatcacaatatttacaaaaaattcccaccactctaaagttgtagtttattctctatatatagagtaacataaattgattggacatgcaaatcaagtcaaacataaaagtaaacaaaaccctatctcttcctatatatggccgactcgactcggccgcttctctcagatttcaactcgtccgagtcaaatcttccgccaccaagatcccttgaggagacgatagagcgatgcattggagacttcgggtgggcacagtttctccaagccgctttagtctcattcgcttggttcttcgacgctcaacaaacattcatcaccgtcttcaccgactcacaacccatgtggcactgtgacaactcggaccgagtcgactcagtatgcaacacatcctcctccaacctctgcaccttacccaaccaaacctggtcttgggacttgaacccacacgtttcaatcatttccgagtgggggctacaatgcgccggctcgttcctcaagggatttcctgcaagctcattcttcctcggctgtctaatcggcggcttagctctctctacactcgccgactcatcgctcggtcgtaagaacatgctcttgttgtcgtgtctcataatgtctctctcttccatgttaacagctttctcaacgagcatttgggtttatgcgtttttgagattcttgaacgggtgtggccgagccacgatcgggacttgcgcgcttgttctatcaacggagttagtcggtaaaaaatggcgaggacaagttggagcgatgggtttcttttgcttcacgctagggtttttatcgcttccgatgttaggttacattaatgaagggaattcttggaggaatctgtatgtttggacatcgataccgactttaatctattgctgtttagttcggagtttcgtccgggaatctcctagatggcttatcgtaaagggtcgtaaagaagaagccgtctcaattctccaaagcattgcttctaatgcaatcactatgagcttcacaaacttatgttttgaagtagaaaatgatcaatccaagtcaaatcctgatgtttatgatgcgttaaagatcttggtgaggaaaagttggtcgtttagaagattattagcggcaatggtggttggattcggtatcggtatggtttattatggaatgccattagctttaacgaatctaaacttcaatctttacttaggggttgtgttcaacgccttgtctgagttcccagcttttctgataacgtttttcttcattgataaaatcaataggagagatgcgttgatcggatttacagctctaagtggaatctctagcgctctaatcgcggtgttaggacaacaactagggtcattacagattgtgttagagctcgtttcgtttttcagcgcatgcaccgcatttaacatgacgcttatttacacaattgaaatgtttccgacatgtgtgaggaactcggcgatttcgatggtgaggcaagcattggtgtttggcggcgtgtttagtccagtgatggttgctgctggtcgggaaaatcagttttggtcgtatgggttgtttggtttgatcataggattgtgtggattgtttgtgtttggattgccggagactagaggaagtgttttatgcgacactatggacgaggaggagtataagactttggcaaaaagacaatttattggttgatacttgatactgttgtcttttgttgtaatggttaaaaagtttgcaggcttaaaccagttcggtattgattcaaatcaattctgattttaatacttataaaccacgggttaactccttacattataagtgactgtctcatctgtaccggaccataaaccaaattcaaccaaccataatccccctttcaattttgatctattcaacaatgactcatgcatactttatttcccttatctcatttccatattcgaaatgtaagctctaaaatggtactcttaactgaaactaaaatatatataaaaaaaaaaaaatctacatttcttgaagaaacatttttaaaattaactatagttgctaaattactattttagattgacatatatatatatgtagaccaactaattaacccactgaaatgcaaagagatggtctgaaaatcaaaacagacatctaaacgtggttacctacccaagagctcaccagcctatagtatcccattccctttatattgaatcactttagattatcttttctctttcatctttccaattccactctatattaaagaaatattattttaagaataaacaggatcgtattttcatcatatgccaatatgttatttggatttaagattgttttcgaatctataaatactaattaacacaacaaacaatttccaaatatcgtagtgttcataacgaaacgagcacacaactcactaaacactcaaacaaaaatacaaacattaagatgatgatgaagattagctttaacacatgctttcaaatcttactaggatttatcgtcttcatcgcatcaatcactttactaggtcgaatattctcaaggccttccaaaaccaaagaccggtgtcgccagcttcctcctggccgaccaggatggcccatcctcggcaatctacccgaactaatcatgactcgtcctaggtccaaatatttccaccttgccatgaaagagctaaaaacggatatcgcatgtttcaactttgccggaacccacaccatcaccataaactccgacgagatcgctagagaagcttttagagagcgagacgcagatttggcagaccggcctcaactttccatcgtagagtccattggagacaattacaaaacaatgggaacctcatcgtacggtgaacatttcatgaagatgaaaaaagtgatcacaacggaaattatgtccgttaaaacgttgaatatgttggaagctgcgagaaccatcgaagcggataatctcattgcttacattcactcgatgtatcaacggtcggagacggtcgacgttagagaactttcgagagtttatggttacgcagtgaccatgagaatgttgtttggaaggagacatgtcacgaaagaaaacatgttttcggatgatgggagactaggaaaagccgaaaaacatcatcttgaggtgattttcaacactctaaactgtttgccaggttttagtcccgtggattacgtggaccgatggttaggtggttggaatattgatggtgaagaggagagagcgaaagtgaatgttaatcttgttcgtagttacaacaatcccataatagacgagagggtcgaaatttggagggaaaaaggtggtaaggctgctgtggaagattggcttgatacgttcattacgctaaaagatcaaaacggaaactacttggttacgccagacgaaatcaaagctcaatgcgtcgtaagtaaaatgtaacttttataaaagagtgtatgttatacacagaaattgtacactaaataagccaaacagaaaaaaaaaaaattatgttgaatactatatattgactaaattgcgagatctacacatatataatctaagtatattaattatttgttattctggtgttttttacaggaattttgtatagcagcgatcgataatccggcaaataacatggagtggacacttggggaaatgttaaagaacccggagattcttagaaaagctctgaaggagttggatgaagtagttggaaaagacaggcttgtgcaagaatcagacatacgaaatctaaactacttaaaagcttgttgcagagaaacattcaggattcacccaagcgctcattatgtcccacctcatgttgcccgtcaagataccacccttgggggttattttattcccaaaggtaaaacatatagggaatacatatgttttttatttacataagatttaacgtttatagctagtaagtttatgcatgagcttcgttaacaaaataaaacacatggttttggtttgtggctacatatgatacaacctaaatttttttgtaatacttttttgtttaaaataccaggacaactagtaaatttatacataggtttccttaacaaaatctcgatacaattttgcattatatattaagaaatattgatgattggacaggtagccacattcatgtatgccgccctgggctaggccggaaccctaaaatatggaaagatccattagcatacgaaccggagcgtcacctccaaggagacggaatcacaaaagaggttactctggtcgaaacagagatgcgttttgtctcatttagcactggtagacgtggctgcgtcggtgtcaaagtcgggacaattatgatggctatgatgttggctaggtttcttcaaggttttaactggaaactccatcgagatttcggaccgttaagcctcgaggaagatgatgcatcattgcttatggctaagcctcttcttttgtctgttgagccacgcttggcatcaaacctttatccaaaattccgtccttaaaaacaagacgccttgttttttctctgtgatgtgtttcgacgctttgtcgtttctgtattacttgacgtactgttgtttttagactatccattgcccgaaaacgctatattgttaaaatcgtgtgtcttgtttattcttttgtatctccgtaacttaatcatgaatatcaatcaataccatatgaggttaatgattaccgtgtttaattgaaatggtgtgaagaattaggttaactataccatatgaggttaatgattaccgtgtttataaattgaaatggcgtgaagaattagactacatgacaccaacaagaatgttttcctttatcaggataaacgtgttcacctacccaaggtattatttatttattcaaataatagatattggttatgtttcgcacacacacaacaacaacaaaaattagatgtagaaatatttcactggaattcacctttcaatgttttattgatgaaattgatagagcggagagtattcaaaactttaaaagaatagtttttttaaacagaaaatagataaaaatccaaaagaatagttataagttaaaaaaataattgaaccatagttgatgattttttttccccggatttttggaaatcaaaaatgaattgaagtgaatcaaagttgatgataacaagtgaagaccagtttaagacaaaacaatcggattctttggttaactccgattcatgatccagtttgctgctaagctaagagaaagatcaaaaatgaaattttcgggagtaactggtaggagaatgggagatggaaagccaaaggttggataagtgtataaaaagagagagtcggatgttcataaattttgtaataaagaactgcggttaaaatcttggatccctccactccacggctccactgtgtagagtaaattcttgacgcatgttcatagacatagtaatacgtgaaatgttgtgattcgctttttttcctttggagggaaaatcccccttgtatttgggatctctcatgttccattaaccttatccagattccaatattgaaatatcgaatatatatagtcgtgtatattagtgattaaacatatatcacaacaccactttacagtcacatatacatatatatttgaattaagtgttcaagtttgtaatatgagttttgtggatctagcaaataaaattgaaaggaattatatggataaatttattttgttaattcaatatattttttatggataattaattttaaaaattttactctctttttttttacggctaaaagacgtttacattcaaaatacaaaacaaactgtttttgtgacaaaactaaatcccttgaaatagcagtatagacgtagtagacattaaaaaatctatagagcttttactatcgctactcatcaaactagatataaaatatatataaacgtgattaccgtagtacctacccaaaagcccaaaccctacgtgagcatcacatgcatgatatcgattctataaataatccacacaacaaacactttccagatatcgctagtgttcatttctaacaaatgcacacctcactacacgcatacatacatcatgatgagctttaccacatcattaccatacccttttcacatcctactagtctttatcctctccatggcatcaatcactctactgggtcgaatactctcaaggcccaccaaaaccaaagaccgatcttgccagcttcctcctggcccaccaggatggcccatcctcggcaatctacccgaactattcatgactcgtcctaggtccaaatatttccgccttgccatgaaagagctaaaaacagatatagcatgtttcaactttgccggcatccgtgccatcaccataaactccgacgagatcgctagagaagcgtttagagagcgagacgcagatttggcagaccggcctcaacttttcatcatggagacaatcggagacaattacaaatcaatgggaatttcaccgtacggtgaacaattcatgaagatgaaaagagtgatcacaacggaaattatgtccgttaagacgttgaaaatgttggaggctgcaagaaccatcgaagcggataatctcatagcttacgttcactccatgtatcaacggtccgagacggtcgatgttagagagctctcgagggtttatggttacgcagtgaccatgcgaatgttgtttggaaggagacatgttacgaaagaaaacgtgttttctgatgatggaagactaggaaacgccgaaaaacatcatcttgaggtgattttcaacactcttaactgtttaccgagttttagtccagcggattacgtggaacgatggttgagaggttggaatgttgatggtcaagagaagagggtgacagagaactgtaacattgttcgtagttacaacaatcccataatcgacgagagggtccagttgtggagggaagaaggtggtaaggctgctgttgaagattggcttgatacgttcattaccctaaaagatcaaaacggaaagtacttggtcacaccagacgaaatcaaagctcaatgcgtagtaagtaaaatattacttttataaaagagtgtatgcatatatatatatatatatatatacaaaaatagacgtgtacactaaataagatgatcatgtgatgttttgtcacaggaattttgtatagcagcgattgataatccggcaaataacatggagtggacacttggggaaatgttaaagaacccggagattcttagaaaagctctgaaggagttggatgaagtagttggaagagacaggcttgtgcaagaatcagacataccaaatctaaactacttaaaagcttgttgtagagaaacattcagaattcacccaagtgctcattatgtcccttcccatcttgcgcgtcaagataccacccttgggggttatttcattcccaaaggtaagaaaaaaaagaagaagagataatttaggcatgcattggtttcgttaagaaacaaacaaatgatgcatggttattatacgtacaacatgtaaattctgtcgtacgtttttaccgatagaatcaataatggtatacccataaatagaacgttttcatcccctacctccaattaattttatgtttggtacttttatttatatatatagcctaaatattaggctaactagctatatttattttactttaattgtcaattactatgttaatatattattattattttgaaaaaactagctatatagttcttatatgttttgattttctagtttctcagttaaatttaatttttgcatcatattcatacctaaccttaagcaggttcacagagtagtctttgattatgtttgtggtgattccacaaaacgtattcgagtttgaatccagtcacgtttatatatcaaacatctaatagcatcttaatatgatatgcgttatctcataagaaaattgctgattttttggacaggtagccacattcatgtatgccgccctggactaggtcgtaaccctaaaatatggaaagatccattggtatacaaaccggagcgtcacctccaaggagacggaatcacaaaagaggttactctggtggaaacagagatgcgttttgtctcgtttagcaccggtcgacgtggctgcatcggtgttaaagtcgggacgatcatgatggttatgttgttggctaggtttcttcaagggtttaactggaaactccatcaagattttggaccgttaagcctcgaggaagatgatgcatcattgcttatggctaaacctcttcacttgtccgttgagccacgcttggcaccaaacctttatccaaagttccgtccttaagaagaagaaaacaagatggtgtctaaaaaaaaaaaacgccttgtttctttctctgttatcttcttcaacgcttagtcgtttctatgttatgttactactcttagtcgtttatgttttttaacttttacttgacgtactgtcgtttgttgttgtccttttcttttgaatctccgtcacttcataataaacaccgatcaaacattcggagtagcatacttaattagttatatgatggtcgtgtatactcgtgtttaattggaatgttgtttaggactagagtactaaacggtgaatccttaacaaaaaataaaaaataaaaaaaaatccttatgtagataggaatatagcgatagtgatctttattttcccagtaaagagaagaaatggagctagaattatatctatagcagtgagtctccatcaccgtaatcggatgcgacactttcaatgccaatgtatatcatgattcatatctggcacatcaaattatataacacaaaaaagcattataatataaacgtggttaccaacccagaagccagaggcatctcaaatccatttgacatgagtatcacactaatgaccgtttaccatcatcactcgttctcacaactattattacaccaatcaagattcctattcacgttatcatcatcaccgatctaaacatattcgtccaggcccacaaggtcaaaacggattaatttaccgaggagatcgccttgagaagcgttttaaggagaaggacgcctgacctgacattccctaccggtctgttcttgtccatctcgctaacaacaatgtttggtccgtgttttttgtttttctttggcttagctcattgtttttctttgacttagctcattgtcaactatacataacatttgggtggtcttgcataatagttgttatttaattagaggtcagcacgtcaccgttataaacatactgtatatatattccatatctctagtattgaaataatcgttgtgactaagttgttatttttttccattaatcctacctatataaaataaaactgtatattacttgaatcacaagtcactgagagacggtcaaatctacccatttgtttttttaatctacataaaaatcttaaatcacaaaaagaaataacttcaaatgcaccatcaaacaaaactttccagatgaacttcttgtgttttagtagcatataaatggtttatcaacaaaacggtcatgacaatacaagcctggtcgttgactatacccccgtttcttgagaaacactctagcttcggaaaccaattctttgttcgtaatcttcttcttatcctttctcggcgcggacaatatcatctgaatcgcatcactgaatgctccataagcttttccagttcttgtcacataaacatcctctgatctctgatctgtttgacatccacttaatagaatcccattgtcggtaacggcattcaatcttgaagctccagaatcacctgcatcaacctcgcagtttcctaggtcacttaaacctctctgacgattcgggcttgggtcttcaccgaataatttgagaagtgtctgtctaattctcacaggttcgatattggtttgcccggtttgttccttgagaagacttaagtagctttcgaaaggtagatatcttgtttttatatcaagcgtttcgtctttctctaattctatctctcctctaaagctttcttcgccacctccacggtctctctgagattttgagactccacaagtcgctaacaaattcatcacaatgttaaggaagtaactagcaatcccgagttttggctgcttcatatggctttcctcgatctgctccttaactttatcgaccggcttcatatggctttcaccgatctgctcctttacttcctggatgagaccaccactatgacaagagtccgagattatcgtcaactgacaaccttcttttacacgtgacaccatttctctaaattgctggtctacaaacacatttgtgcaaaaaaaaaaaaaaaaaaaagattagaaaaaacaaaaaaataatcgtaaacactaaaattcataatatcgatgtaaaaccagtggtaacacaaaaacgaccaagacttgttattttcaaactctatgaacttatccaaaaacgcaaaagatttgaggtaaatcgaaattgcgatcaaaaacgtattgctctgtttcaagaaacagagcgctctgttttctttatgcagctgagggctatgttttaaccaagaattttgtttggatgaatgcgtatgtactcgaagaaagaaacatgaaacaataaaaaaaaaaaaaaaagacgtcaaacccatacaaaaagggattacttttgatctcataccctttattagattcatatcgcacggagtgatacactcgtcaaaccctgtagggtcttctgagtcttctatcccaggagggattctcgtgccatgtccactgtaatgaaagaccagaaaatcgccagattgccctgatgcgatgagattatccagttcgtcgcagatattcttgcccgtaggttgtatacatgatttgtctgtgtctatcattatgacgatgtccttgttggcgaacccgtaaagctcgattaggcatttctgcatccggtggacgtcgttgacacagccacgtaactccaccgcggttcctgggtagttgattcctatcaaaagtgctttcttcgccattgacgaatgaatgaattatacctttgttttttctttatgaattgcatttatttttcactttatttataaacgaaagacttagcatttaaactaccacgaaaggtctgaagacggaccaacatgcttgactgttattttgcctcttctcctaagagaaactttgtgtggtttgctgttattggccttttacgtctcatttttaattttttccttggtctttcttttttgagtggcggctatttccattgtcgtttttattatcaaatgttaatataactctcatgttactcttaataaaaagaaagtgttaatggactatggtctattattaaggaaaaaaacatgagtgtcattaagttaatcgtctggaatagtctacgggtggccaaaaaggaattatatgagtaggtttcattcattttaaaagagttggcattagcttgttgacaaagaaaaaataataaaaaggctggcattttctttactaattattccacatgcggttgtgaatctaagatccataaattaattcctattttaggaaactaaaattatgctcttgacttttgaatttctgtttgggtcgcacttagctgatccaaaaatgaaaaattcaccaattatcaaagtgagacaaaaacaaaacggtagtccgtagtaaatagcaaacacaatcggaatatgtaaggtccaatagtcaatattagctcaatagttaaggcccaatagtacttttaggccttttgtgtctgtaccactaaagcctccataggttcccttcgtttctgtgtaaagggcatgaatgatgaacaaaggcggtggttccggtggaggaagcggaccaacagctgctgcggcagccgctgcgttacagaagcaaaaggcgttgttgcagagagttgatactgacatcacatctgtcgtcgataacttcaatcaaatcgtcaatgtcgcaagggtaagtgattttaatttcgcttcgtctttggaaatttgtttacaattttttcgaattttgtgaacatctgtgggtttttttttttgtaggtgagtgatccgccaatgaagaactctcaggaagcatacatgatggagatgcgagcatcaagattggtaatttgatatcttcaatcaatcaaattagaatgattatcaaaattaggcagatgcaattagggtttagggtttaggacagcatatgctcacagatatgaaatgtctggatatttgaaacattcactaatgagtctccaaaatctaatctttttacttttggttcaattgggtttgttttgctagcttttatgtaactgagttctatattaatggtgtggcaggttcaagcagctgattctcttttgaaacttgtatcagagctgaagcaaaccgcgattttttcaggatttgcatcattaaacgatcatgtagaacaaagaattgcagagtttgatcaagaggccgagaagacgaatcgattgttggctagaattgctgatgatgcatctgctagtcttaaagagcttgagtctcactattactcttctgctcagagatcgactctagactaaatccaagaatctagcatttgtaggtttttcttctaattcctatagccaaatattttaggctactttgtctgtgaacaaaatttgatatgaatgagcatttaattttgaagctacttttaatccaaaacctttacttccttccaccatccccactttctttggatttcataaaaaaatacttgtctccagtcattgttaccttatttttcaccttaattcttaattccaagatttctcttttgttcccaaaaaaacaatgtacgacgtgcacacctatcttggtagacaatgaagattttgttatgttcgtgataacaagtatgtcggaatttaaatgattaaagatagtcaactcaaaattgttgctttaagacaagatatttgttttcatatcctctacgtggaaaacaggccactcttgatcaagctttactcagccggcgatgttattgaaacccggaaataagcttgtctcgccggaggtaatttcttcttaaagaaagtgctaggatacctattgagataaggattaggaatagatttgtgattaagtttatgattatctatattctacttctcttgaaccgtgtatatatgtgtttcggtgatgtaacctaataacacgagagttttcttcaattcgttctactttgacagaaacgtgtaaagttcataatcccattgtcttttgttcatgtgcagacgagtcatcatcgtgactctgcctcaaactcatcaaaccataaatgtcaacaacaaaaaccgcgtaaagataagcagaagcaagttgagcaaaacacaaagaagattgaagaacatcaaataaaatcagagtcgactctgttaatcagcaatcacaacgttaacatgagctcccaaagcaacaacagcgaaagcacatccactaataattcctctaagcctcacacgggaggagatattaggtgggacgcagtgaattccttgaaatctagaggaatcaagcttggaatcagcgattttcgtgttttgaaacggctaggctacggagatatcggtagtgtttatcttgttgaactcaaaggggcaaatcccacgacgtatttcgcgatgaaagtgatggacaaggcttctcttgtgagcaggaacaagctgttgagagctcagactgaaagagagatcttgtctcagcttgatcatcctttcttgcctactctttactctcacttcgaaactgataaattctattgcttggtgatggagttttgtagtggtggaaatctctattccttgagacagaagcaacccaacaagtgtttcacagaagacgctgcaaggttagtatacaaacagagtctttagaaacagaggaaaagtacatcttaagggtttgtttttttggcttataggttctttgcatcagaagtgttattagcattagagtacttacatatgctcggaatcgtataccgagatttaaagccagagaacgttctggttcgagacgacggtcacattatgctctccgatttcgatttatccctccgatgttcagtcaacccaacacttgtcaaatctttcaacggcggtggaaccaccggaatcattgacgacaatgcggcggtacaaggatgttaccaaccatccgcattcttcccacgaatgctccaatcctcgaagaaaaaccgtaaatccaaatccgatttcgatggatcgttaccagaactcatggcagagccgacaaacgtgaaatcaatgtcttttgtcggaacacacgagtatttagcgccggagattatcaaaaacgaaggtcacggaagcgccgtcgattggtggacgttcgggatattcatctacgagcttcttcatggagcaacaccatttaaaggacaaggaaacaaagccacgctttataatgtaatcggacaacctcttagattcccggaatattctcaggttagctcgacggcgaaggatttgatcaaaggtttattggtaaaagagccgcaaaacagaattgcgtataagcgaggcgcgacggagatcaagcaacatccattttttgaaggtgtgaattgggcgttgattcgtggagaaacaccgccacatttgccggagccggtggatttctcgtgttatgtgaagaaggagaaggagtctttgccgccggcggcaacggaaaagaagagcaagatgtttgatgaagctaataagagcggtagtgatcctgattacattgtttttgaatatttttagccataatcaccattatatagttgtaacacgaaacgtcgtcgtgctttttctttttctttgagatataactattgggccgaagataaagcccaatatgattctgtaaggtttttttagacccaagtgtaagaaaacattttattaagagcagatcgaagctttgtttaaaaactcagcaatggcggctgggttctttcaagcagagatgtcaattttatcctctacgttggcgcgctcatactcgttacctatccgcaaaacgcttatgaccttcgattttcgaattgcaatgcaacgaaacccttgtctcagaattcgacgttcttgtgtagctgcttttagctcgactccttcgcattcacgaaattttccaattcgaggtgaaattatttgacatttagctacccaaaactgttattagaaaggaattgagttagacacggagcttctgaatcttaattatcgtttatttgcttaaagttcagttttttacttttttcctcgtttcaggactagaggatgtttttgttggttatctatttgggaggaagaaggcaacggaagtagctcatgtgtgagtactttcaacccaaactttaaattaataacaaaaaaaatgacttcttatacgtcttcacatttaaagcttttagactttatgtatctcaatagcttaaccttggagcttactatctcttgattaaagaaaattgaagctttggatcttagtgttatggagaatgttgatgctttaaagctacataaaaacttgcttacgacatcactgctgattatcctttcagtgtgtgggagcaggtaatccaaaagggggatacggtcattgatgctacctgtggaaacgggaacgatactttagcaatgttgaagatggttatgcatgattctgttggttgtggtggttatgtctatgctatggacattcaaaaagatgccattgaaagcacttcatctttgctcgatcaagccgttggttcaaaagaggttagatgattaccagagcttgcttcctatagcagtgtggttcttactaatatcgagccttgttccatttctgctgaagaaatacagaaggaatgcgtcaaactttttaacctctgtcatagtaaaatgggagagattgtccctgaaaacgcccgagtgaggtacagtgtaaattcattgactcgatgccacattgttgatgaacccctggcaaaaatttcctcactttgcacactgctttaggttttcgctaatcttcatatgatgatctcaggatggttgcattcaatctggggtatcttccaggaggcaacaagtcgataatcactctctcggatacaacattatcggcattgaaagctgctgagagaatcttaaagcccggtggtctcatcagtttggtggtttacattggccatcctggtggaaggtaataaaaaaatgctagcaaaatttctctgattatctaatgagatatgaactttcctaacatactttgctccatgtttcttgttgttgtgaattggttcggtcttcagagaagagttagaagtggttgaagcttttgggtcgggtttaccggtcagtgattggatctgctgcaaattccaaatgttgaaccgaccgttagctccagttcttgttttcatgttcaagagagaaaactgaaaagtgatttattttgatccaccagaagctttgtctgcatctgccgaaccattcactattgtatatccaatctatattacctttgttgatgacagttttcaaaatctgtttatacgcggaggagaagaggtttatgaaaaaagtaaattgataacataaataaaaaacgaccacggtgggactcgaacccacaatctcccgctccggaggcgagcgccttatccattaggccacgcggtccttttgatagtcaactacaattacatcaatatatctatttatcttaatcacaatccatgtaatctagtaaatgatatgcaacacagaattgtcaattgtgtaacaaacaacaagaacattaagacttttaatcaatctccacaaagatgagaccaaactcaagaatcctgaatactgatgtataatactaatacaaccctcccagcaatttgttaaagtttaacacagaaatggattgaaccaagctaagcttataaatatatatccactggcttgtgatcttgtagctttttcttggactttcttatgaagaagaacccactatgggcaagtttggtgcagttgcccattcagtccaagacccatcatagattgccacattagtttttcccagacgataaagtccctgaccagtaaaataaagaggaatcagtctttagtttttatcatatgatcacagtaaatgaatgaattctagatcatcatttagttaccaatgccaaaatacaagctgttacaccggttccacatgaggccgcaatcggactgtccagagatatgtctgcagataaacggataagtaattgcataaaacaactacttgagacttcattttgttttaccttcctgttcaaactgcttcttcagctcctctgctggtaacagtgtttgagaggaatcaaacatctacataagaatatgttatcatatatctggtttcaaagagcagatataacggtaagcccttcaagttagacggtggcttactaggggaaaagggacacacttgctaccgggtatatgaccactcggtaaacccttccaaggttctggagcaataccgtcaaatctgtgaaacagagtaaattctatatcagatcctatgagcggaatcaacttaaaaccattagcatattatagtgaaattacaatccagaacaagcaataattttggcatgatacctagcctttgaacgcgcatcgatgtgctgataagtcttatcctcgatgttttccttcacctgtcaattatccagttagctcccctagtttactagcaactatgtataaacttcatttaagaaacggtaacctgatcaagtgccaatacaagatgtggccggaacttcgtctgaaaagttattgggctaatctgtgcaaatggcaaagatgtgaataaaccatatgtagcaggtaaaccaactaaatatgcaattttcagatacatcagattggcaaaaacttttcgatgaatgaatcaacttactgtttgtccttgatagatcttctctatagcctcagttgctgcactggctttcaaaatggcatcatttgaaacactggattcaacgtcatagcctgaagcacgccatttcggcaagcctccatcaagtacccatactttgtcatgtccaaagactctaaacatcctgttttaacaaaaggaggactcatcgatttgataataccagagaaaacatattgaggaatgataaaaaggctaatggacatgagattcataactcaccaccatacacgagctgcactaaagagccccattccatcatacacaaccactccatcgttgttctcgattccaagagcagaacaaccagcagcaaaagcttcctcagatggtagcatgtgtcgtaactgcacatgtaattcaaataatatacaatactttttggttgttgcgcatacagacacatagaagctcacagccagaaggcttgccaaagctattaatgggaatctctgaacagaaaagagtccagatttttgcgtcaaagaaacaacaatatgttcaaatgactgcaatgaagaatagttactgataatatttcatttatacatataagcgatggcagtgtaaactgtaaagtcaataagttagaaataaacaacacaataacatcttctcaagaaaaaagacagtgattctcacatttgtttttcgatctgctattccattcaaatcaaagaagagagcacctggaatatgagcaacctgtagacgaggacaacatacaagtcaatcaacattcagtcgtgtagtgaccctgatgaaaagtttcatagcgctcattcagaacaaaggcttatagcttatttacgtagttatttacaaaagtgtaaatcttctcacttgatactcttggattggatttctttgctcatgtgccatgtaccatgaggcatccaaaacctgaccatgaaacaaacaagttacataagaatcatggcagaaaaaggctacaatctcaacaagtgcaaactataagcattctgagacgaaaataaacacagcaagaacgtcaggttacctttatatcagcatctccaagattagagtggagccaatcaacagacacaacaggttcattggtagatatgggtgcgtaattagcttttgcctcagatccagaagaagccatgactcgaccaaagtgagtagatttagaagctggataggcagagcgtaactgtgagctgaatgctctcttctgcaagtaatcatttacaatctcggaattacaaaacagaagatataaaaaaatcgaaactttgaacacaattcagtagagtgaattatacaagagaaagttaaactcagatttgaatcatgtgactcagatattatcggatatctacacacagctaactataactcccaatgtgaaacctttctaaactcgaaagcccactactagtagtacccaaattatacaaacaatttaaacagtaactagaagtgaatatctaagctcagagaaggtcgaaatcgaattaagaaacaacttaaattcaaaaaggttgcgcaattacgagtcttgtgatgaggaacagcagatagagagggattaatctggcagtgaccagaaaccaataaagttgttgagaaaagtgtcgaagccaaatcacctcaaaataccatgtacagaacaaattgctgagttaaagccgccaaattttgctacttccagattctctgagctcgcaactttttcaagcttcttcgttctcaacgatgctgcttctgccacctagatgattaatagattatcactgatcactagtgatcaggataagtgacgcgactaacgcatgtttaattatataaaattcacgtttgccttctctttgatataattcgcgttcgcgttctctttattaaaaatcgcgtttctgataaaacgcagtcgtttggttttacttcccttttcttcttccagaaaagaattcgtaaaatctcacttcaaccttctcttctctgcaagaaacctaaaagcctatttatttcacctctctctctctctctctgcaactaatcacttgttcgatctcgaagctgaagctaaaggtaagctattctcttcacagcgctagttcttttccgaagattcgtgtcgatctcaaaaatcccattctatcaaattgtttttaagactctaatgatttaaccaaaccaaaacctgaatcgtttgatcccggtgacgttgaaaccctgaattccggggaaattgatcctactcgtttgtgttgttcacagctttcgctaatttgcttaaggagctatgggagatagtcagtactcgttttctctcaccactttcaggtacgaacttggttaatcatagtgagtattttggttagtttttgctgcgactaatttgttgtactgtgtctgaaacagcccatctggtaagctggtgcagatagaacatgcccttacagctgttggatctggccaaacatctttagggattaaaggtttgtcaatgtcatgatgaaattgtttatagatcaatgaaaaatttgtagatttcttctgataacttggtttcttactgcagcttctaatggagttgtcattgcaactgaaaagaagttgccttctattctggttgatgaagcatctgtaagttgataatcaacaagaatattcgtatcattaccatatagccatgctctgtgatgctttcttcgattgtgtaatttagtcaacatctctgacattagttttctcttttgcctgtttcaggttcaaaaaattcagcatttgactcctaatattggagttgtttacaggtttgctcatcatttattttaagtttttagttgtttttgtttttgatgttatagcttaaggactaactttttctgcattttcttctatgaagtggcatgggtcctgattttcgagttcttgttaggaagagtaggaaacaggctgagcaatatcttcgtctgtacaaagtaatcctttctctctcttttctcaaatttgcttgaaatacttgctaatgtgatatggtttcacctaaggaagctttattgttacaggaacccatccctgttacccaacttgtaagggaaaccgctactgttatgcaagagtttactcaatcggggtgagtgctatatttaactgtaaattcaacctcatctgtcatatttttacttcctcccatagtcctaatatgtttgaattgaactgaactatttcttcagcaaaagtaactgtcgagtggtagcttttcacttgcaatttgagatttgaaaattgacttggcgtaaattttgttgctttagcaaatttgtacccattgtaaatcctgtttctaatttgtattacttctctgaaataattttgctttagcaaatttgtacccattgtatatcctgtttctaattttggttactgtctcttgtttatagaggtgttaggcctttcggggtttccttgctggtggctggatatgatgacaagggtccacaattgtatcaggtttttcctccttaggatatgtgttagttgattgagcacaatcgagtctcccaatcttcttagctcaatttccattcttttcagcgctgaaatactaaactttagcaaaacttgtagcagagtatttacctttctgttctatcatgttacaatagttaccaccttatgtttctgtctaaactgaattaccatctcatcttgagaatataacctgagaattaaaactttgcttttgaatttccttactcggggtttaattcaaatcattttgtttttgcactaggtggatccatctggctcttatttctcctggaaagcttcagccatggggaagaacgtttctaatgcaaaaaccttccttgagaaaaggtaatactgtttacaatttgttgatatccaaagatatataaccagtatactgattttgaaaattttcttttactactcaaatttcgataatataggctcctgtcataacaatatgaaaccactcttcgtcgctgacaaaccttaaccaattacgatttccttgcaggtacacagaagacatggaacttgacgatgccattcacacagcgatactgacattgaaagaagggtaagtacaaatctacattattattagaaagtagttcgcctgataatcagagttcacttcatattcatagatcacactctcagtgtgactgatagattaccaaacccatagcactgtcttttataatgaaagcacagggttttaaaacgtttgtattcttgtggtaaaccttaagctgtttctgatgatggtgtacacacacacacacacatacatacatgtgtaactttagtcttcatacactgtgccgaaaagccttcacctcatttgtcttttgttttttgtttgtgatagctttgagggagagatctcaagcaaaaatattgaaattggcaaaatcggtgctgacaaagttttcaggtaccctttttctttgaaacaaagaatcttttttgctgctgatgatgtttgaatagaatgttgttgatactcaattggttttttgggattaatgcagggtactaacaccagcagagatcgatgattaccttgctgaagtcgagtaactcccagcatagtctagcaacaaagtttaagaccggaatttcgtggcatttacagtcttaaagagttgttttttctgtaaaactttggatctttaaatagtttgttgctgaacacaagctgagtgtctctcaataactaatgaaatctgtttctttttttctcactcagtgaaggtttcagagaaatcttatagtagtctcgtcttatcagtctttaaattggtcgcatgtccactcacctccaatcgagaaattgcaaattctaaaaccaattttatttaattctttacaacacaataaaatcatggagtaatgtcccaaaactgttgaaacccagaacctttaccaaacaatcctataatgaaaactttgtcagctagctactgtacagacttctcttctttcaccagtaatccttacaagaacacaaacctctctcaaaatggtgaaaccgatactgatctctcaacacgattctacgtccgatgactctactaacaaacttataaacagagtgacaatcactgcatatgcgaaggtttttaaagattctaaccgtagaaccttcaggagtactcatcagtgcataagcaagagcgagtctttcgctgtggttccaaagattgtgctctttttgttcttcatctgtgtcttgcaaagcctgactagtatctgcgacatacccagattctttgatcagcttcttgatgtcttctagctttgcgtatatctccattgtttgtggatgagttctgtctccaataccaaacgaactcactttgtcttttagtttcacccaactgcaagcttgtttcttcttgatgttcttgaaacccatttgctttctcacattctctacatcttcccatctacctgtagttgcgaacatatttgaggacaagacataaacagaatcatcctctggttctagcttcgagagattttccgctgcttttcttccgcggtctaaattcccgtggattttgcaggaagctaacaaactacgccacacgaggtcgtttggtttcattggcatcttagatataaaggtttcagcttcagctaacctccctgatcttccaagaagatcaattacacagatgcaatgttcaatcgccggttctaatccaaaatctctagcaatcatgtcgtaatacgcaaggcctttgtctactaatcccccgtggctgcatgctgtaagaagagagacaaatgtgacatggcccggcttgattcccatttcaagcatctcatggaaagtcgcacaaacttcctcgaaatacccgtgtcttcccaaagctgatattagtatgttccatgaggggagtgatcgattgactgatggaggaagcattttcaccacttcacctatttccccgcatttgctatacatgtctgcagcagcgttaaagataaaagaatcatgttcaaacccgagttttacagctaagccatgaagttgttggccttcctctaggacggctagcttcgcagcggcagaaagtccctcagagaaactaaactggtctagactcaccccaaagcttctcatctttgatacaagttttagcacctcttctccatgaccgtggtgagcatttgccgcaagcatagcattccacgtgatgatattcctattatctaatccgttaaataggtcctgactcgagcttaaatcaccacatttggcgtacatagtgataagcgaatttttcacgtgttcatctgattcaaacccagcagaaactatataggcgtgtaatggtttcccccgttcaagtaaatcacccggcaataagcaagcactaagaacacttaccactgtgatataatttgaagaaacaccttccactcgcatagtttgaaaagccgccagggccttgtcgggatcttcgtcctcagcatagccaccaataagagcattccaagctactacatctcgtctaggcatctgtaatagtacccgtctcgattcgctcatctcacctatctttccgtacatggaaaccaatgcattaccaataatctgattgtaaaataaaccgctgaccactacaagtccatgaaggatcctacccttctcaaaaaaatcaggagtaaagcaggcagccaatgcgcttgtaaaagtcacatagttcactgattttccggaacttatcattgaacaaagaagtcctaacgcatctaagctcctcccatcgttgacaaaagaagccatcaaggagttccatgagatcaaatctttagtgggcatttgtttgaacactaaatttgcctctactgatcttccagcgcctgcatacattctcaaaagagtattgcacacacaaacaaccgaatcaaaccccattttaaccactaaaccatgaattcctctaccccatttttggtgatctacatgacccaaaactgataacagagtagacacagtggtggagttcacttcatcatgaaaacgacgcatcaaactgaaaatcctaaatgattcctcgatatgaccattttgtgcatatgccgcagcaatcgaattccatgaaattgtgtcacgttcagacatttgatcaaaaatataatttgcatagtctacatttcccatactacctaacatggatatgagcgaattctccactgccagcttactctccagtcccgatttgacaacctgtccgataatttgacgacccaaagattcatctttaagcaatccgcagaactgattaccaaagacatggaattttcgttacacccaactccttctcctctcatacctttatagatatcaattacttcctctggctcacccttatccgagtaaccaaccatcagtgaagtccaagacaccacgtttcggtcaggcatctcctcaaaaaccttccttgaacacgaaaccaatccataaaccccatagagatgcaagatagcagtactaacgtaaacatcagacaacaaaccagacttagccacaaagccgtgaacttgaaccccttctctgaacatagaaccagaccgaccacaagctgttactaaactagcaatcacaaagctacttggcttaataccaagatcacacatcttccgaaaaaattccattccttccaaatacaatccaacacggactatccccgacatcatggtattccaagagacttcgtttctcacaggcattatatcgaacaggtggcgcgcaggtttgactcggccaaacttggtgtacatgttaatcaaagtgttggtgtgcaacacactcagacgaactaatcccttgacacaaagcgcatgcacagctctccccgtagtctctatagtgatttgagagaaaccaatttgatcgaaacaagatatttccgggttccaatggtctgagagcgagaaacatccactcaatctggtaactttttttccttccactcttttcaaacattgcaatgtcgagattcgtcgcgtcttgaactggcgggagacagatccactgagcaaacgagaatcgccgccctgaaaaaacaggactttgcgtcgccagctggccagctctaattcgtcggtgttcaacggtggttcccggaaagatcaacgatttgaaaccaacctagaaagcaaaaaagactgctcttttaaatcaaaaaccaaaataaccggaaaggcgtaccagaaaccggaatcactggactatataaaaccgttttgtaccggatcttaaaaacaataattgcaatataaaccctgtattattattttattacttattttaccccaagtgttttctcctacaccatttgaaccctctgcaagtctcacagtgtttctaggtctcgcaacgacaaatggacgaagaaagattggaaaattgatcggattttttcgggtaagttctctgaatcgtttgtattctacttcaccttccacatggttgagaactcagatgtagcgtaagtgaatctaatatctacagaaacaaacaaaagcaaaacaaaaaaaaatgattcctttgaaattcagcatttgcaattgaaactgtgtgaatgattcaatcgatgtattcatcagaatctgtgaaagctaaaacattttcgttcttcaagttttactctcttggctgaagatatatctattttggaagagaagtctatgtttgttcttatgtagaaactgttaggtgatgaatcaattttcatctgtcagctttccaaatctaggtggttgttacttgttagcttgtgataacttgatttcactacaaagcaatcatttgcaaaatacaatctttcaactctgtaatatctacattttgtctacaattcgacgtttcttcgttgttgctactacatgcgcctatctgatcttgcttatatactaataatgccaataagttagctaataattccattttcaaggtgaaaatgacttgctttatggcttcattaatgtatgaggagctcgtaactctccaagagtgatgatgaatgttcatcttctgttccctgtttatgctgttgttgttgttgttggttatcgttttcttctaacccgagttcgctttccaggtgcttaaaccatttatcaacttcatcttcttcagactcttgaagagctctgttctctggttgttggaatgagtctgaaccatctatgaaactccaaatgtcaggatctaaatcaaaaggcatctccagcagctctggtttgtctacctcttgtaacatccccgtaaactcgctataagttagaatgtgctcaaacatttgacttatctgtgcatcatcgtctttgcttgaaatgttggaaccagcaaaagacattgaagcatttggagatgactcttgagagttctcttcttcattcaaagaaccttttgaacccgcttcatcggcattaaggttagtttccgagctcaatcttttcttgagatgtgtatgccacacattcttgatctcattgtctgttcttccaggcagcttagaagcaatcttcgaccacctgaatccaaaatgcagaaaagctattgtcaaaatcaaaactttgagcccacaacaagacattaacaagataacacatacttgttaccaaagctctggtgaagtttgatgatggtgtcttcttcctctgcactgaaattgccacgtttcacatcaggtctgaggtaattaatccatcgcagacgacaactcttgccacacctcaacaatccttcattgcatgcatagatagaatcagaaccagaagactagaaaagctaaagaaagaggcttttaaagatcatagacataccagcttgctttgggagagatctccaattctcatgaccattcttgtgaatgaaagagatgagtttcaagtcttcatcatggctccatggtcctctcttcactttggttttgtcacaacatggtgctcttcctttgcccatattctctctctcctctctcacagacacacacttttgagattccctcttaccaaatccaattgcttttatgtgtatttatacatgagaagtggtgtgtgtgatcctgacattgagaaacatgttataaaccacagacattgacaaatgtcacatcagatttgttgaggttaaaaacttgtctatattgtggatgagtatctggcaaaattcacatcttttttataattgtatagttcgcatttctatatgtcattaataaactattatgaaaatgtaatcaactaaacacagatgaaacatgtttgaaacttagatactgagtctcatattttttattcaatcatgaaacctataaagattgcctctgaccaatctataagttgaatccatctttatgatgtcaaaagaaaggaaaaaaaaaaatacctgttcctgtgattagtgctgttatcctaaattattttgactaattttgttgtactgctgcaaaatgcgcaactcgttagttaatattagctaattttgagatttgactaattagggtgtctgagtcaaatcagataggattgtaataatttttttctgtctatggctataccaacttttgaaaaacggttttaaattttaacaaaatgagaaagtttgataagtggaaatttcatgaataaaacttgacttagtaatctaccaaacaagacgtaaggatgctatcaccttccgattggcactcatatttataaggaagaaaaaattgactggttagggttaagaatcgtggaaggctgaataaaattctaatctataaccatattatacatataaaatcatgcttaagaacagtaagaaaaaatatgtacatcagtccatagtggatttattttaaagaaaatgggtcctataaccctgtaacatgtgtatacttttttgttttcttcgaatacaatgatcaaattagctttcctttactttatacacacacaacatttctcgacgttctatctttttctcctcttttttttagtctccatccctctcatcatgactcttttaaataattttaatcatgtcgtctatatatttctcatatatatttggatttaaataacatacacaaattatttggtcaagtcataaatattataaacgaaacatatatgacatatgtttaaaatgttatagaacaatatggttatccaaaacctctaacatttatatatcttttactttttgaaaattgttataaaacaatatcgtaagcttttaccactactttaactttagtttatggtactcaatttagtcattttggccataatatactaacctaaattctaaagatacaatgtatatccactactgattaatattacgttcatcaatctaaagaaacatacatatcagcatcaatcgcttacttaataggaagttaagttaaagattccaaatcaatagtatgatttatattccatatgccaaacaagatatgacgaaacacatcatgcttacgttaaattatatgacgaaaattaaagttgacatggtgttattttggcaacataaataaaactcaactagcaactacaacaacaacaatttttgttctcacatgcatgtcctgtatagttttgtctttaaatcaaaacatataaccaaaaatcaattagtatattgatggatcttctaacataataaagaaacttttttggagaagatataagtatttattcgacaatagcattattgtgcatgcatctctagtaaagttataatcatatgttcctttgtttggtgaacaacttacgaaaatgttattttaactagaaccaattaggttcgcactggaaaaagaaaagtttagtaaactaggttgaaaaaatggaagaaagttgaaatatcccaatttgcatgacgaaagcaaacgtgttgctattggcacgcctctgtctctagtctttgatttggttcggccgcccgttttcgtaaataaaataccacaagtacaatgaaatgaatccgtagtacattttctgtttactaaggtgtgaataatagttgaatttgccttttaatatttgtaccgctaactagctagcaacgaagagtggtgaacgtatgttacaatataagaaatttggtctatatcttattgcggttggactgcataaatgtggtacaacaaattaataattctatgttaaaatgtataaaattatactttggactagtactggtgagcgtcatatattatccctttaaaggagagatggctccctaattcaactattcggtctcaaacgtattaaaatgtataaaactgaaatgagctcaactgtttaacaatataattctctctattctatagttgtttcatgtttgaatagagaaccatatttttaattgattgcaacgtttgttcttttttctacaacaaaagttacaaaacaaaaatactaaatagaggatgtatatatgtttggtgacagtatgtatgtacaatataatgtatttgtttggtgaaacaccaaagttttttactaatagaaagatgtttttattaatagatttgattatgcatttgattggtgactggtgtgatactaatggtcatactcatacgtcggtagcagttgagcaagatcttgtttgccaaacaaattaattaggattatatgtatatttcttggcaaaaacaaaagagatttatattttctttgccttatgtgcaatgaaattcagaaatgcatccctactgcaattcgatttggtcaaaatcattcaacgtcaagatcatattcactgactttttgtttataacaatggtctaatagaacaagttatgtatatataatagtgtgttcacatcataaaccaactataaactatttgaattagaaattataatatatgtctatttattgatgttgttgtaataatagttttttttttttttttttttttttttttactaaaacttaccttcattaaatgggaaaagttacaaagtgcctccagatcgagtaacacctattaggaaacaaacatacaacaaccacaacaagagcacattatcaatcaaagagaccaaaccaagtggcgaggaagtttgtaataatagtttaagaatgcatgcacgcattgtttgatatattttggcctctcgcgtttaatttttataatttaaaaataatttaagaaatacatatatcacaagttacacacaaaaatatagttgattgtaatggatgaactttttcatgttttggagtttctgagtttataaataacaacttacatctcaacaattaatatgtaatgataatacattatacatctggcaagtgattaattcagaataatggaagtttagaatatgatatgctgagtcatgtcttcctatgtttttttttctacagattctcatgtcttcctatgttaattgaacaaaaatatagttgattaaaattacctaatcattacatgcatgacgtgtgttccataacttgaaaaatgaaaacattggtcgatcgaataattataaagtaactccagtgtggcacctaatcttggaaaatatataaataaaacttttacaattataggagttggttggtagaggatttgcttaaatagtgatgacatttttcataagttatgactacctaactaatcactcataaggtccaaacacaggactcataaatttatatataattcaaaaaaaaaaaaacgcataatgtaagaaacaaaacaagtacgtgatggattgagaaaaagagagacgatcacattacatatgcatgacgcatcgttaattattattattttattaaaaaattttatcaattatgaagaacctttgacaaaaaaaattcttgttatcaatttttaaggaaagctcatacataaatactaaaaattgaaataaacaatgttattagtacagattttatgctgtacagcatgctcggaaaaaataagatttaacgacataaattctacgaaacaaatatttatttaggttaattacaaaagtaatactgataatagaaaagaatattaataaaactaaaatattatgtaaaaacctaacttatttatacgtttaagtatatataacttaaacaaagaaatgttttctcgttattatatacatatagagttttctatcatcatacatgcaaaataaatgcatttgctgatgttaaaaaacaaatctgaataatatggttttgaaacatttgtagctttacatttatatgggcttaagatatgatagatatatgggcttttaaagtctttaagcccaatcctctaaaactataagtgattttcattttcgaattttcagccaatgtaagtttgatagtggtgcggcggtgaatgcgaccgagatgattgtaatttttaataatgtttgtttgattaggctaatgcgtgaatcgtgatttgcatggaagattatacgtaggatcaaaagtgacgactacattgccttgtaaattgtaaccgtgatttccctggagtttgcatctacaattagtaaattactgtctgttgattcatgtctttgtacagatgacatgtcatttcttttacgttatcacctttgatataaaaatataagcctaacaggctaacacctgtttaataattttacaatacttaatataatcttaaactaaaggtaaatactagggtaaacatagtgtatttgtatataaaatatacaaatattgttaactgaatactccctccaaaatttggttatgtaacaaataaagccaacttgaaacagactccatattccagacactaaaaggtcaacaaaattttggtaaaaggaacattgaaccatttgtacattggaagcaaacaaaaaaatactaagaaatattgaaaaagttggttggtggtggaaaatccgatctcagactgctgcaacttccttatggcctcggaatttaaggttttcagatgcattttttaacaattaaagtgaacataaaaggtgagtgccatttaatttttgtattaaaaacccttaccgatctcgcctttaaatgcattcaaatcccaagaccagtctcgctaccattaataaatatatgtccaatttaattcatactattactatatgtgtctccctgtatacatttagggcttagccgtctagttaggagtaactcgcatatattgatttctgctagaaatatagacaaaataaataaataaatttttgtttggtacaatactttatttgttccaaccaactactccaaattaaaaactctttccgtttcgtgaagaaaatctttaaaacccatggagattaatttttcagtttttatgtactattacgttaacaaaatatgacgagagatgtttaaatagcatgaattactactggttcatgattatgggaatcaagtgtttagtgtgagctaggaatagtgcatttataattattttaattatataacgtaatcactatttttttatttaatatgtgtaaaaattgaaaaattaagaacgttgtgtccatctatattgcccgcttacttattaaatttgatacatgttataatttatgaaaaataaaaggtacgtgcatgtattttgaacagtattgtgtgtgttgaaaattaaagtgttttattaattgtgctggtgtcatgagaatatcgcccgtgagcatcatcacttcctcacctttttacttgtactataaggaaatagaaatttatgtttatcataacgttttcaacgttattatttaaagctcttaaatgcacaccttccttattttcctagaaactccatttaactagttgtcccaccaatatacatttttgcaatttttttgcttattatcggatactagcaaataaaccatacgcatttggtagtaattagcacttaaatttcgagtatgtgttgtttctaccaatgtaaagaaggaccgtcattaattcagtttgcatgttgagcacattttccgattaattaaaaaaaaaaagagagagaaagtaaatactttaaatgcgttgattatcaaagattcaaaaacacataaaattgtgtacgaaaagagtgaaagaaaaaagttagataattgccttattggattagttggatgaacggaaaagttcgttgccacctccgacggaaagatacgtcaaacgtggtcaagagcccatgcaacaatctagcctaaaaaatattttaaaataataataataataataatcaaaccttttccttataaatttaattaataaaaattaattggtaaattgctgatttatgttgatattatttatatatattgtagattataaatataaatgatattcttatattttaaaaagacaatagaacgttacaagtttgaataataaattttgaccggtaaattgatggtttgtgttgatatcattacgtattatatattattgacaaaaaacataaatactgatatttttagattttaaaatttgaaaatagaacgttataaattttaactagtaagttggttgtttgtgttaatatcgtttgtattatataaaatcgacaaaaaaataaacgatattttaatttttcaaaaggtaatagaacgttgtaagtttaaataataaatttgactgataaattagcagtttgtgttaatatcattgtatagattatatattattgacaaaaaacgtatatgacattttggatttttaaaaagataatagaacattataaattttaatggtaatatcgttgtccatattatatattatcgacaaaggttctaaaaaagacaatacaatcttgaaaagtttttttctaacgccttataacggttactttatttaatttagttctctataattttatattaaatgaatattatcaaataatttaaatttatatcaaattataacaatagtagtataattttttttgtttcagttaacttgaaatccttaactctaaatttcaaacgttaaattcttagaaaatataccatgaatataaaagttgaaattctaaactcataaatcataaaatttaactcacaacaaaaatatattttactctaaaatataaactaattcaccatagtcgaatataggtatgcaacaacagaaagaatataggtatagacagactgaatagtggctgaaattattggggacataaaaaacatatccaacctatggccttaatatgtgtaagagtttggttctaataagatttcgaaaagtcaagaaatatatgaaggatatgttcttgttttatcttttttgctaaagggatatagattggtgttaaacacataatactaatggtggtttactctaaataccacattcgtaccaatacctacttcattaaatatctttgacgtgcccaataaaaaagagaagacgaagtgcattaaatacatggttcatcaatgcgtgtagttaattgagtaattaattgaatttgaacgtaagactaagaaaaatttgaaaattatgattacaacaagtagagagagaggagtatgacaaggggtaaaatatgtaatttaatggatagaagcttgaatctacttgtagtttccatgcatttaatgcgttttattttcttagcatttattacactttgtgtctgcttcctccttgaattcctccctccacaccttttctttggcctttttgctgttaatttgttactcttatttatttattcatttaatacttatgttggcaacaacaaaaaaaagagtttgaaagtttagttcgtcgatgaaaaagatgattcataaagttctgaattatgggtttgatgatatttaccttagcctttttccacttaggcatgaatggaatgggtacaatctccagtttataaacgtatgacaaaaatatgaaatatgaaatgattcatatactatctttcacagattgtaaggtgtagaatacaaaattacacatgaaattaaatctttcacggtagacaaaagatggtacaacaataaagaatttccatgcaaacaaaagtatcctagtatattcacaataaatgaaagaaattaattggctataaatttactacttataaccgtcctcgtaattaactttgagagtagaaggctctgtttttcttacaatggccccatctatataactctctctctgcctaacagaccccataactgacctcccctctctctctctctttctctctgctttcttggtatggctgctgacgtcagctctctcgtacggatactgagtaggttcaaggatgatcggacggttgtaaaagattccaccggaccaagatccacggtggcgctcatgacacgcgatctcctcggaatcggcggttgtgtgggtggaggaggaggaggagacgaacagtcgctggagcttgaccttgacgtccaagtccctaacggatgggaaaaacgtctcgacttaaaggttcgtcgctattttctttcttcttgatttttgtagtttcgtgttctcgagagaatttggagataagaaactaacaaaacagagaggtttccaaagatttgaatgatttatagattcgttgtgatttttttgaacagtcagggaaagtgtatctgcaacaacaatgcaattcaacgagctcgtcatcatcgtctcatcatcatcatcatcatcacgaagaccaaaccaaccaaacagttccaagatttcaagatttgaatgtgccaccgatttccgataagtttccggcgaaaccattgttaagcctcttcgacgatgacgacgacacaagccttgaactgaagctagttccgtcttctatctctcgtcctcttcctcctcctctgtcttctttttctccaaatcagtctctctcgtatctatcgagtgtttgcacactagataaggtgaaattggctttggaaagggcggagaaagatacaaagaaacgccaatctcctgaagatgacggcgtttacgatggaaccgcttctgccaccgtcgcggcgtctcaggtggcggctggatgtccagggtgcttatcgtacgtgtttgtggcaaagaacaatccgaaatgcccgaggtgtcattcgtttgttcctttgcctgccatgaagaagcctaagattgatcttaacatttcgatgtgaaaaaaactttgggggatagaattgaatggttttattttgtaggttcgatttctgtaaatgatagataaaatcagggggtttcattgaaaagaaattaaatgcagaaaggaagagatggatgttattttgtaaattgttatgtaatggattttctctgatgaatgaatagttgatctttaattatttgaaaaacgctctaattaattagatactactagagagtaagaggtaaccaaattatactcttatattatttggtcaacatatttcattatatttacttcaactgtactggtatttattccgcatcttaaagaacccaatgtttttatttgtcatattaaggaagcaacttaagtcacgggttagttcaaagttagttggagaaatttatataagttactttattattctctctgtttcgagatatattttagtatatgtttagtttttatacatgatgtatactgtataaaaacttatttgcaattacaaagtgtataccattgtttgtatattcatattatttagaaaatttctttagtattaaattaggtgtaaactaaaaggtaaaataaaaaacattcaatgaaaaaaaaaatctaatttctgaaacgagaagaaatattccacaacatctagtatttgaaacggatggagtattttgaaaatcatattcttatacaaaatgcacacgcttgcagccttaaacaatctggcttgattcttttattttagtgtaacggaatatttacattaaggtaatctaatgacgtttcagtattttcaagtatcttttgttcccaatgacattaagtggagtatgacgaattcaccgtagacatagagtactggtaaggctacttaatacattgattaaaccgacgaaaaatgagaatttaagtggaataatgagtcattaaagtttgctgacctaactccacttccatagggtaacgatgcatgttaatgcacacgcatataccgtataaaaatatttttcgaaacaagtaatcttctcaaaacaatattcatggattaaaaaaaaaatcactataagaaattgctaattttattcaagtgagtacactgctattacaacaatagaagaagtgtttaataattgtttcagtaggaccttaagtaattaaaatatctcgtggaataacttttccatttaacacattcctgatggagtacggatatacgctttggttggtatttgtctttatcaaatattgaaaacgtttaagtgtatttatgagtcaaccgttacaaactttggtccaaatcaatacattattttaaaactcatatcacaccaatatctgaagtaaataagtcactttaaacatcaacaacttattggtaaaaatgccagaattcgaagtttttttgtgtgtgtatgtaagaaagtgttcctcaaagggccatcggtattcctaaagagatttaccatatggtaaaagataaaatggattggggttgaagtctttgttttgttaactaaacaaaaaaaaagggagagaaagagagcatggaaagtcatgctagtgaaaacaaagtcagttaattggatagcgacctctactaataaataccaattaatgctcttaaaacaattttgagttattattttttagctttaaggaaaagtctaaaatcttcgagtcagcatctacattaaattatgctggcacttagtattgcttcaaaggcaatcccgaaaaggaagaaatacaatttctgattgtaaataatattccacgccattatatcgcacgtcactattcatttgcagatacaaaaatcgtaattaagtaaagggacgtgaatctgtctttaaaacaacgaaaattcaacttccgatccctactttatacagtacttttctttatttaaaaaaaactcctcaatatttccaaaaaatcattgaccagaacatacattttatacgtagacatttttttcaatatctttatcagaattttcgttttcaaaaatttaaaaaattgtaaaaacaaataccgctcattatagaaaataaatttggtaaaagaatataagtagatttatgattgctgaaaaatatttgttagtcaccttaaattttgttgtttcagaaattgcttccatttttttcacacaatatgtttgttttcgtctgcccgtgactatgcaatagtgaatagtcccgtcttaagtcttcggccttctcttgatacgaccttgtttaatcagctagaaatttttaaaaggtgtggtgttctggtgccttctcttaatacgttactgttattgagtttcactaagttataggcttatagcttacatagctttttaagaagttagcttacaaagtaatctaggcccatataaaagttagtatgctcaggcccaatacgatgattgcttttgtatgctctgtcgagaaaaagcctagacctataaatttattttctaaaaaatttcagtcaccgatgattccatgggaactacggggaaaataagcatacgaatttattttgtctgtttagtatttcaattaatacatgtaatatactcagttacttacacgactatgaatacatatggttgtggttattgatctagggatgtttcctaaaaccttctatatattgcgtcttctagaattcttagttcgaatcttatctagacaaaatttaggttatgatagggagatatataagtctcaaaccttttgaaaaaaaaaagttgtacattcatgaaagtacatatacaaaagttggtcgttggtgtacgcctgtacggatttaaggttgcccagctgcaactcatgcttttattttattttttcactatatacatatgcgtacttgttagctttagcttttttacttaagtttccccaacttcgtacgaaatagaagcacacatgtgcaataagatttgccaaatcaaccttctaggcttctagccaatagttgactgccacatcactaattctgcagattcgtggatattataaaatttgtagatctcaatattccggcaaatagtccaacaccgtaccgtaccatcccgattcatgattttcatcttcttaaataattgtagtttcatacactggatatttcttgctctggtttaattaagacgaactttggtttgactgttacaatgttgaagaaaaagtgcttctatattttccatctaattatttgaatgaatgcagatccactaatcggtttgactttaatagttacataaaacaccaaaaaatatttatgtatatcacatttcttttttttgttctcttgcaaaacttgtcgttgctgttttgctcaacaaaaaaagacttcttgttgttgtaatttattctttcctctaatggacaacctgcatatacgactaaataaaccgctatactaacgtcgttgtactagtttttctctgttttaccaaaatttacaatgtaagtaaatatgaaataggtaagacaaattccttttaatttgtttgacaatgatttcttaagatatacaaatagaatttgtcctagtactagtggattctccactcaaatgtagtgacatctacgttataaaattagaattttcggtgtcaaagagctttaaggttaggttatttaagggcaaaaaaactcaaaccaatttgtgagtttatagtttgacctaagaccgaaatatatacatacatacgtgatatatccctgttattaattagatgcaactaataaacatctaatcaatacaatccaacgaaaatgtcggcagctttacaatattaacaagaagttaaaagagtacataaccaattcgcaactttgataaaaataattaaaaaaattaaacaaattatataaaacgtaaacaccaaaaagtgtacgccaaaaacaaggtgcatgtcgactgtacctgtgcaaaatccaaataaaaattaaaaaaatcaaaattttcttaatggatctttctgtatctaattgtttaaaaatttaaatttcaagtgatcttgcaactatcatcggtacgttatctggtggatccgtacggtcctcacaaatccatactctttctttgaaaatgacgatacaaactcggtgcttgtccgttaattaccatttcgtcctcttaaagacattgatggtctttccttctttggaatattttcatttcttggtggatgcagaatcctttgtagacttgtagtataactttattagtactaaaaaaactaatgaaacaaatcaactcatagatatactgtataaaccatacaaagttcaataagttttccgttcgtggtgatgtctcattagttttggagttttggtataaaaagatttccaactatcgttaaaaacttacaagcttaatcactagaccaaattgtcccaacacatacgtttcttggtaaaggtttgtataattatgacttatataaccaaaacgtgcagtttcgaaattgagctaatctgattcttaaaccaaatggtacatgaaacgtccagtgctattttactttttaatttaattggccgccaaaaaccgcgtttcaatttctgcagtttcaaattcgattttatttgatttattatacgtaaattatgtttcttgatcggctataaaagagattaacgtgagcaaaatagaagttaaaaaaaaaaactggtgtatatataattatatatttacaaaatcgagaaagtaaaaaaacggaaaattgaaagaaaacagagaaaacagagaaaatatcaaatcgccgatttggattcttcttcaaaagctactctgtagtttcaggtatcaactcatcaccggagagcaacgaagccacaagattctctagatcaccggacccttcaaaccctcccaaccggagcgtttccaccacgcgctcaaacacgatgacgtggcaagggatatgaagaactcctttctgagcgtaaccgtattcttgagcggatcggtttagcaaaccaacgaagatcgggtggttcataagctctgcgctaaccacgaacctctccatctcctcgccgacgtagacaggtacgtgaccagcggggacggtgttgactcttctagctggacatattgaccacggaggcggcggcgcgtggagacgatggtgaccgcgacggttgcggaaggaggaggtggaacggcggatggagaattcggaggatgagtcggcgactctagagaggcggcggatgagatgcttcattttttgttctccggcggtttaaactaatgatagataaatttaaaattagagagagtgagaaagagttaagtaatatatatagagagaagaagacatggaaagattatgacgagagcattgaggagagagtacacatatggtgtacttgccaggtacaacagcccgataaattttacatttattttagtatacaaatcaaatactatgttacactacaattaaaaaatattagtatcatatactataaaaaattaaacatggacaagagaatttatcaagtgaacgaaaactacgagattattatttgccatttttctttaattatatattaccaataatttttttttatacttaaacctatgtctttaaactttataaaaaaatgtctttaaaatattttatttcatgatgtatattaatattgactatagtatatttagctagtggagtttgaaccaatcaattgaaatagtccgtgagtttgattaaaaccaaaatcgagtatgattaaaacaagttgtccttacatcattgtggtcaaagatgaaagaaacaggaaatgttttgcaaaccttctacatatatgtggttggtggttcagtagacttgataagtttattcaaagtattttacatatagtactaataaattaggagttttgtttgtttttgtagtaaattggtcaataggttacagatggttggatgaaatctctgcggctaatttaagttcaatattcttgaagattacacgaccaagaagtcaaatagaatagtacaggaatgatatatcaatcgagtacagcgcgggcccttcgtttttgtcgattatttcattataatgaatttctttccatgataactttatgttttgttatctgtttaacgtattttttgttgataaaaacgtttttttttttacgttattaatttttatagtttatctgcccgacaagaattgtaagttcctcaacattacaaataaattttggttagtttaaatgttttaagcacttcttgtctcctaaacgttatccgcatgtttcaaacgtacaatataattccttcttagaaaaaaaaaatcaaatagatacaaggatataaaagacatcgaggcagaaacaaaacatcgaccaatttcggagtcacactagacaagttgttcacgacacacttgtccccatgcgtttttggatatttctaattcgtttttaattaatgaaaatgttacattaactaaacggcatgtttacagaaaaaaaaaaacaaaataaaacgacatacttatttaataattttattaatgttcttcagtacgactttccaactatttccatatttttctatataaataaatacacacaaaaattagcgatatttatagaaaagagaacagacaagtttatgaaaatcaaaagaaagaattttatttttggtttaaagtttaaactgacgtgtgattaaaggtattaaagagtggcaggtgggtttggttgtacggtcatttattcatatagagtgtgacccaccaactctctgcctgtccttcttttctcttacccccagtacggatccttcttattttatcattatttattttgcattcatatcttaaagacttaaaccttgacgtcacttacggaagccaaaaaaaaaaaaaagacactgaaatctgatgaaagaaaaacctgaaacctaaaaaacatatgaaggcctgtcggctcggcctcaaatcattgcgatttatcttgggccttcacaataataaaggcccatcatatttttgaataagactctagtttctgtattcgtttgtactcatgtatacgctaactactatatacactgatacacaagttaagcaaatgtgaaattaaaatagataaagaaacaaaaaataataaacgttaccaagaagaaaatgagttggtggtgattaatttgcggctaattttgggggaatataaaaagaaaaaattaccgtattttaaaaccggtctatataggatcgagcttgctaacaccattttagtaagagtcttgattggttcgctttaatttttcatttttgtatctgactgccgcaaactaagtaatatcaacactcaaaagtcacgataataaacattataaaaccttttcttcgctgtcctacgaacgtaccatattacttgattccgaaccagacaatattagacagacaaccaaactaacacaaatcattattctataagctgcggtctaacctactattcaaaatttagttttacttcacgtattaaagaaaggtacgaataacagcgatgagactggattttttttaacatggtaattaatataacgataagtacataattaaacaatactacaaaataaaactaaaaaacaatttcagcgacatctttgattacagattctaagaaaacaccagagaaagttagattaaaatctccctgagcttgttgtgtatcactaaacctcataaacgatgccgttcttggctcgccgactcgattatctggtgagatattctggaaaatagcgaagaatctgagaaagacaaaaataatcagagcaagaagataacatatccgagatgcgttgaagaacaagtgatatgctgcaacttgaagacaatacatctttttctcttcttcttcttgtctatttcgagtattaaaaggttaaaatctcagaagatgatgtttttttttcttagcatcgagatgtgtgtatatataatagtatacgtgtgtgtgtgatgtttgttgtgtatatatgtaatccgtaatcgcatgtacgcgtgtatctaacgcacacagacaatcagacatactcgacgacaccactgtggtccgaacaaagcaataaatgttcaaagccgatagttgtctctcattgatttggtactgtagtccggtttggatggtataccaggcgatacaacctattacctaagtggaggagattaagatccgattaattgtttaatcgtctgaataattaatgcaaaccggaaaaaaccggttatatgtttatacatgtaaggaaattgaatacacgtagatacgaaattgatatgcatttcaatacgtgtctggtgattctgctcaactgcttagatgtagacatctcaacttgtaaccagaagatactgaaacctttattattgcatttctaaattttagaattctattttcttatatactatatggaatactttaatgccacataataataaatgagagaattcaggtcattatatgtcattttggagtgtaggaccaaaatggcactaacattttcaattttattttattttgtgaaaaacaattttgagaaactttaaaaagtgtattttttttcctctggtttggactttggagggaaaagtaatcaaaagtgtattcttaaaattcaaacaagaaaaattcaaaatagagacaggaaaaagatatgtagccaatgataaaatgccaggtgtaaagttctgttttgtctttttgatttcccttctgcaacaacttacaggcaatcggacaattccagagctaaaaaaccctaatcttctcgggcttgtcatctccaaaattcagggttcaatttcttcaccatagaagatatagcgttatctccggcgtctaaggggactttagggacattcttgtggtggagaaatgggagacgaccagctagatttcgagctcccagaagaggttttgtcggtgattccgatggacccttttgagcagctggatctcgcgaggaagattacatcaatggcgatagcttcaagggtgtcgaatctggactctgaggtggttgaattgagacagaagcttctgggtaaggaaagtgttgtccgtgagcttgaggagaaagcgtctcgcctggagagagactgccgcgaggctgattcgagattgaaggtcgttctcgaagataatgtaagtcaaagagcttcaatttcattatccaattctgttgcttttatggctccgttacttctgcattttaggtttcgagatttggctagttttgtttgctgagatagttgcttaacattgaagagatagtgtctcgggcttgactggtatgaatagattcaggactttcttggtgttacaggatacttaagggtatttctaagtttgggagcaattttgtgtgtgttgttatatgtttagagatctgtatgatgatagatagtctgttttagtttgttttattgagatttatgctcttcatcaaatcagtgattgaatatatgtgctcaagaatcgaatcacctggtgtcacgcttttttggtttcctctgctcttatatgattgtaaccttggcttatgttgttctttttaatgtgatgtctttcttttctggtaaagatgaacctgacaaaggagaaggattcactggcaatgactgtaacgaaactcacccgtgatttggctaaggtgagaattttgggggttttccgatgatttttgtttgtattataagagagtttcacatactatacttttgaggggagatagcagctaatgttctatttttagctggagacattcaagcggcagttaatcaaatccctgagcgatgagagtggtccggtaagacattcaagcttttgttattacacattcttttgttgtttgtatgttttttttgcactccaacgggcctctagcttttcctgctacttctctctatcttgcaagcttctgagctctgattcttctccatttgttattacagcaaacagaacctgttgatattaggacatgcgaccagccaggatcatatccaggcaaaggtactgcatcaataaccgattcccaattataagatacgtcttgttttggtctatctgtgaactatttatctttcaaccatgcagatggaaggatcaatgcacactcaattaaacaagcttacagtggatctacagacacgaacaatccagttgttgaaggtaacattgaatcatctatccagtgttatacttctctctatatgctgcaactaaagaataacagagtttttattttgcagcttcaaaatacactggaaacaaattttcaatgacatcatacatatctccacgtcttaccccaaccgcaacaccaaagatcatctccacaagtgtgtctcctcgaggctattctgcagcaggttctcctaaaagaacatcaggtgcagtttctcccacaaaggcaacactctggtacccgtcaagtcagcaatcatcggctgcgaattctcctcctcgcaaccgcacactcccaggttcataggatcttaaagattgttacttgtataaaattggtaaaactcaagtatattttctcatgtataaattcttttccagctcgtacaccgcggatggatggtaaagaattcttccggcaagccaggtgagtatttatttcttcagttcttgtcttagctagtgtcggtttttcattaaccagaatctgaaattgttgatctttttctgtttcatttgtaattcacaggagccgattatcctatgaacaattcagttccttcttagctaacatcaaagagctcaacgcccagaagcaaacccgagaggtaaaatttgtcgtagttcatgcgcccttttttctttcgatatgtccagattacggattcaaaaaagttaatgcatttcacaggaaactctgaggaaagcagatgagatatttggggaagagaacaaagatctttatttatctttccaaggtctccttaacagaaacatgcgttaaactttcataagccgttatcttgaatctgggccaatgtgataggatggatattaaccattgtagtatgtgtattccctacgggatttagtttgcaaagtgttttttttgtttcatcacaaacaaagaagaagaagtatctcgttttgggaagtgttgagtttctctcttataattggctttgaataaagctttatatgaaagtatgtctaatacacacacttatcaatatgtaaacatattctttctctacagaattaagaaattatgagttcatacaaaaatatataaaacattgaaagaaggcagattgaaataaagtttacaatcttagttcttttagctagtactttgctaatctagacaaatactttaatttaattgtatatttatcatgttcatattaattacatacacatcttatcatttatttattttaactattgcaaagatatgatagagtgctaactaaagctagcaagaccaaaggaagtctccggcatcatccgtatacgcaacagccatgtcgatgtcactgtagaagtctttgttcgaggggaaagtaacggtacttgccgtgtacggcgggggtttggtatgaatacggtggagcgtccttatatgaatcaactcggcttgagcaaaagcgagctgagtttggagagtttccagttgtctgtgtaacgacgaaattgtccctacacatccatacacaggatcttgtatcctcgcgttggcctcgtacaccatcgaatccacggcgtcgctccggtggttctccgacagctcctacggtcgttaaattaatatactttagtttggattttaataatatttagttctattatttattttaaagacttgtaaatagttgtttttgcaagaaatgtagattatgaatggttttaatctgctaaataacgaaatgatgttgcacttctataagtttttacgaaaaccatgcaattatatatacacagtggaaactattttattttagggtttaattctattgagaaaaatatttgatggtgttatttggaacttttagtgatgggtcataccgtcatatgatgtattattacatggtattttatgtaataaataagtgcatgcttacaagagatgatggtttgtttgtaatgattttgtcaatgatcttatagtaatattcaatagtagaaaatagtaagaagttgcgtttagacatggattaattattcaccgcgtcataatttgtcataaaataacaaataaaaagaaataatgtcatgattctgccttttaacgtgacatgcaatatagacttttgatagaaaactcgaaagtgacttcatacactattctttacacgcggtttcgatactttccaaaaacaacaaaaaaaatcttacaaaaagcaaatatcacatctgacaagatccaaatgccctaattgtcttaaacgttaatttcaagaagcaaaaataaattgaagagtttagcaacatggacgaccacaaggaaaaaaaagaaaaaccaaaataaagaaaccataatgtttataaacttgcaatatacaacaacaaaatagtgaccaaaaggaaaatatatatacaacaatttttttaacaaagtggctaaaatcccaaatttaaacaaagagagaagtgaattttcacctgcaacatcttattgacattactagcaccaaaaatcttgtggacaatggcaaacttgtaaggctctttggccggaaaatacggagcaaagacgcatgaatctttcacacattttcgccggagaagtttacagccggcacaaggcgatactgttcttccgtgtctgtgacccttttgtctcatttagaagagagagtttttgagaattgagagcaaaacaagaagagaagaagactttaacgaatagtgtgtgcttgtgtttatatagaaaagaagagaaagtaaaacatcaaatcttcttgtgggtccaacccaaaagtaaataagtcattagatttgctttgtttggacaaaaaatcgcatctctgattcttaagatttctttggcccacttataaattctcaggttttttattcatttatatatatgttgaataggtttttgtttcgtctgtatattgaattgaatactatacagatatagtttgcactattgtttcttgcaagtcgacgcaacattacttctctatttttactccttgttttggtcgggtatggaatgtcaccggtgaatcaagatcttgttttctttatgatcataagaaatcgttttgatatgaattttcaaatgctgtctttgctaatattgtctactactagtataaatgtataatactttgattatttgacacctccccaaatcaacgtacaacatgcaaaccatgtcgtttataattgtaagttgttattcaagtaattcaaaatcgacgaataccactattttgggctctattctattgagtgtagtgactattatagtattatcgttttagttctgcaagaagttcaaaaacaatgtatattaataccaaacgaaagatctttgaatgatatcaagatacatctacgctcacgtaattaatagttggttgttcttggtcggttgttataacttctacccaatagatattgaaatactttgaaaacgattataatcattgacaaaaaaattcaatacaattggaattgggaatagtttttcatttacttttctgggagaaaaatatatatatatatatatatatatatatatatatatatatatatatatatatatgtatttaattttattgtgtctttaacgagcaacttctggcagaaatacaatctgttctcagttttctaaagttgaagtgggatttcgtcgtataagtgttcattttcataaattgctgagttttgttttgaaaacccaaatagagtagttggatcgagcagcaaagattgaaacaagagtagtcgcacattgaaagatttctgtatcagtgatgtttgtttgtgtaatgtgtttatgtttgtataagtgtgagcacaaaacttacgtatgtgtgcatgtttatgtgttcgtgtaatgcgcttatgtgtatgtttacgttttagtgtagtgttagtgtatgtcattgtgtaatacgtttatgtgtatgtgtatgtgtatgtttatgtttagtgtttgtgttcgtgaattgcgtttatgttagcaccaaagatgagggagcttaaatatattgaataaagagagagagagagagagctagtagtgagcacactacaaaatcaagtaaaaaataaggaagctgaaggacagaataaacaatacgaaaaagcaaagaacgaagtaagcagaggaatcaaggaagcaaacaaatacattaaggaaataaagaattaagcaatgcactaagaaactgaaataaagattcaaataaacaaagccgctaagcatgtaaggaagcaatcgagaaaacaaagaagcaaaaaaaaagagaaaagaatcaatcaatgcactaagcagaagaatcaaaaagcaaagaaacaagtaatacactaaacagagtaatcaaacaagcaaaaagacaagtacaactctatagaggaatcaaacaagcaaagaaacaagtactacactaagtagaggaatcaaagaaaccaataattaagaaagcaaacaatgaagtaagcaataaacgcacagaaggaaacaagcttaattagtaaacacgttgagcatgtaagcaaaggaatcaaagaagcatatatcaacgaatgcttatgcatgaatatatgtgtgtgtatatgtaatgtgtcctaagtgcatgaactgtgttcggagattaaagatgtcggctgagatcacgctatcgcaggaattcaaggagaacattgtcaaagtatttgaaaatattatataacacattcaaatactttaacaataatcatttttttccgtcgatagcgtattctcggccagcatatctatgtaagatcttttggtttgtgagatatagccacattgactataaatctgccactgcacaaaaaaatagacttataatttaaactataagagcaaaactgaagactaaaaacaagattgaacatacctgaaagaaggtttcttgcttctctctgtaacttcagttgtctgttttcatagcttgagctaaggtacttataagctacacatgcatacctacttaattagaaagaggaagacgacgtgtaacacagagcctcgaatcatgcatctgataaaagaatcaaaagagttatgttttgcttaagaatatcaaaggctcgaaactgtaccaaatgtaagtaaggaactcaagatgtttgtaggcaatacctctggtttcaaagaagagaatgaggttttagacaaaaaatgtatggcaaagtcagtagttcagcgtcgcgtggacttggagagataataacctgcaactgtgatataaaccttaaatgagtatagcaagacaaagaaatcacagaatgtcgaaaattatgagatctcaactgaactttgaagctatgtaaacaatatatgaataattggattcaaaattcaaatacttacatacttgaaaggggtcggatttcctatttctcctccaaactccagcatcttacccacatacagagcaccttctctctgttttctgcaaataaagtcataaatttgttagaccacatatatgtgtgaagaaagacatacgaaatttcaaattctgatgcaaatggtaagtgcaaattttgttaggccaaaaaaatacgtgattgtaagtgcctctaaccgtgttttattttaagtcttactagttcaatatagaagctaatgagcattagtcacaaaattcattgatgttgttaggccaaagaaaaactatatgatattgaacaatcatgagatgttattcctgactatctctacagtatttgaactcaaacctcagacgtactcatgcgactactacacaaagccaattgcatcactaattaatactattgaatatagaaagtattatatatacataggacgtacctgagaaaccaaagttttgattctttaatcctgttgtgcaccagaagttacctgagaaactcgttcagctaatcatgttgtgcaccaaaagttaccaaaatgctccccacaacccttactactacaagaattcaaacacaactaataacactataatatttcaaactgagggagagaagtcgaacctgagaaattcatgtacacacactcgagttcttggtcttctgaagctaaaaagatagatcaatatttataaaagactacaactccatcaagaaaatatgaccttgttttaaaagatgaaatagacacttacctgataaaaagagggaaagataccgtcggcaagttgaatcttctacactacctttatttccctgttaagaacgaatctgcaaaagatgtggttagaacttagaacacagtaaggcaagcatagactaattaattcttaaataacctaaggtttataagagatgtacaaaaacataaaaagaacttacaaaatatagaggttggtttgatgtaacgtaagataataagtagaatctagttaaagaagaaatacatacctcctcgcctagacatcaggttagtatgcagagttttgacgtatagtctcatccgtattcagtagagattcggcagaactttgtatttcccattcttggggtgtctttagacaatccttacaagcagaacattgaatattattatgctgccccagccacaacaaactaactttaaatataagcaaatataagtcctattaaagaacctttatgctccatcaatttgcagagtattgaatatcatatctccattagtttgcagaatattgaattgtatcgtttaagtagagagaattgaatttctcgggacatcatagtccaagccttcatataggctgatcttagcagatattttgaattttctatcaagttgttccagcacagcaagacaatagtagaactatagagattgatttctctaatcttttacttacgggcatagatcgacaagcatatgctctagcttatatttggcaacatcagcctatgatttcccagctacaacattatatctttcatcagacttattcaaggacttttcttatccatcagtttgcagaatattgaattgtatcgtttaagtagagaattgaatttctcagaacatcattgttcaagccttaatacaggctgcaaaattttgaagttcgaattttgaagttcatatcaagctgtcccagtccagcaaagacaatgaaccataaagatagtttttttttggatttattttgtattgtttaatttaaataatttttatttatctaatcattcactcatgcaataagaaattatttttagtattaaaatattttttttctaacaatattctcaatatttcattatacacataattcataaacaacgttcatcttaaactaatttaacagatggtagtgttcgattctagaaacctaagaatttgatgatggagctccgtacgtattctgcaccctcggtaatttattatataaatatcaatttaaaagaataacctatactcaaatcattaactaatccatgattattatatattcatactttgagtttggattacaaaaaaaaacattcgagtatgaaaaaatttattaaaatagttttattgaaaaatcatgtaatattaaaataaatttagtaatagttcattaaatatgtaaaataaaataatatataaaataaaataatatataaaataaaataataaatgtatcagtaacctataaattagaatttgaagagcttatattaattatttaataaacacatgacaaatgctaaaatgatgatgtggcaattatattgaggagacaattgaccaacttttgtatatatatatatactagataaggcccgcctatttaggcgggtataagatacaaaaataaatttttatcgatagtatttgaatattgtatagcaatctatatatttttttgatatttaatttaataattattggtttaaacaaaatttcagtcttatgcattctattttaattatatacactcaatcttatcaatgatatttgaattctaaaaagtaaccgaccattattctatatttaatttagtatctagaaaagaaaaagaaaaaataaatttctatcttacaccattcaattttgtaatacagtttaactatctatgtcatcataataaactcgatttaaattctacacacttcatattgagtgataacattttcatatcaaaataatatttatgacatatcaaatctatatcctagttagtattaaaaataatttacaattaacaaaacataattaataggcttaggcataatacccaaatccgaagaaccgatccaaaaaacccgatccgaacccgaacccaaaattttcaaatacccgaacatgtctaaacttcaaaacccgaaaaacccaaacccaaacccgaataggtatccaaacatatctcaaatataagtatatattagttatatttatacttatatatagaaaatattaggattttttggatattttagatatttttgtgtattttaaaatatattcaagcaaaactactcgtgttgttttgggaatttttaaaattttcaagtaatttaatagatttgcagacaaaatttgatatttcaatatataaataaactcgaacccgaaccgaacccgacccgaaatcttaaattacccgaacgggttctaaacttctaagcccgaaaacccgaacccgaaatacccgacccgaatacccaaacgcttaggactaataattaataaaaaaatagaaatctacaaaaatatttagaaaccaaacattgttgaaaatatattttttatatatgccgtaatctcgtaagttaattttacatcatacaaattaatattaaatgagttaaaattaataaattaaaatattcttactaaaagttattgaaaagttaaatcctataagctaagttatttctctcaaaatgttctattttcacttatgattacattagttaaagacaaatttgttaattttccttttgttgaataaatgttaaacatcttatcgtttgatttgacacgtgacacgatcttaagagttagtaacttgtaaacatctgatcgtttgacttgacacgtggcacgatcttaagagttagtaactttaaaaaccatactttatataataagatatatatatgattttaatattattttattagaatttccttttctggttttctaatgtaaaaatggaaatataattatacttacgtggaaaacgaaaattgtattttattttaaaaaagccgggaacgaccatctttctttcgtcggcgatttttcagagattaccagagagacagcgagaaacatttctttcggcgatggaagcatttcttaaggaattc

SEQ ID NO: 45 - DNA, 114935 bp, Arabidopsis thaliana
gaattcagaaagcaacagacttttttaatatacgcaaaaagctgaagaacaaaatggattctaaatagtcctataaacaaaggatcacctagtaatataatacgtaaaagaaataaatccatcaagggtcaatgatcaagatgcggagacgaggatacgaatcataatatgcataaactcgaaacatgatgcccaaaaagaacacaagcaggtgatcaataaaccctaaatcaagtacagagcaatctcgaagaaattaaacgaagctcttcactttaccaaatcataaatcacaaaatttcatcggagtataaaacaaaatcaaagcttgcaaaaagacacagatcaatcgaggaaacataatccaaaacacagaacacaaatcactaacaaacagcaacccaaaaaggcgagaataaaggaaaaattaagaaaaaaacggaccttggggttgatggtgtcaagagtaacgggaagagaggaagaggaatcagaagcagacatatcggaagaagaagaagaagacaagtggcgcgatgaagaatcggaaggagcagaaaaaggaggaataagagagacaaagctgagatttttgtgatgatgaagttgacgacgacgactctgatctatgagatttttagcttggccaatcacgaatctccgcatttgtgattgtgtggtatgggatttatactaaaaagcttgttggcttgtttctcaatctaaatttagatttcgatagttttgctcgaaagacgaaacttcccaattcctgtcttctctctctctccaattcacactgattttgacatttttttgtccgtccacggatttagaatttatcttgttttcctttattttcaacggatttctttaaacccttttcaacgaatattgaatgtctttctttttttctttcttaccaaatactctgtcaaaagccatctatatatttatcttttcaacgaaaaatcaatctaaaaaaagaatgtaataaacgtaaatgagatttttttttaatttcaaacaaaggaatgagattattattattgttttgttttgttttgtgtgttttcaatccataatccgtaatctcgagtcttttagccgtttatgatattttcttagtcaaaaaatttgtctaaagagaggtcgtaataaatgaaggtggttttttcttcttctttttaatttagtttggtactaataataataatgaacaattaattggagataaagaacttctggatcgtggattattcagacaaaaccatgtgttttattggtcggagtcggcgcgtaaaacgctgttagaaattggacaaaatttggccattatgggccgagttacggtttagagactctcttccggcccaaccggttcgtgggaaaaattcatcatattatacatgggatcagcaaaacgacgtcattttggcggcggttttctcagcgtttcctaataacagtaatattattatacatgggatcagcaaaacgacgtcatttttgagtaatgtgttggatgccactttgtttcttcttggtccaaaagtttgtaaacaatctcaacaatctgtatcggtgttttagagaagtacaaacttacatgtcaaaaggaatctagtgctcacagctgtgattacttctttcattgttgctgttttgcagtgaggagtaatcactggatatcgagataggcagctaaatagtcaggatattgtgaggtttcctgcagaacaactttcaattttttacggatctgaggatgcatttttgaagcatatagaaccgagaacatagataaagaggttgatcattttatatttaaggttttaagcaccactgagaacaacatgctatggctgaggataagtctgctgaagtcaaataaaagaaaccacaaagcagagaaaagaagaagaactcaaaagattaaagaggttgagaatagttttggaaagttagactactcgagctaggaggcgttttaaattttcatcctatcttgatcgatcaataagattaaaagatgagttcatatatttcaagtagattacagcattaaaagcacacatgtctaggtacctattctacaaaaaaaacgaaagtagaggatctaaataaggacaaaaaaagaactggaattttaaggttttcttgatgttgtgatctgctgttgtttcctacttgctttaacatctaccggtggattacacctgatacaaaaagaaacactttttgatgtcaattacacctaaaactcatctttggggatacataaaaaaaaagaaaaactagattgtgtctcgtatcttctttacttgttctgtatagggtttgagccactccttgggattcttctgaagctatcattttctcccttaagtggctctttcttcatctccttgcttacaggcaaatctctcacagcttgactcgaatgtgtcatcgttaacagagaacgtccttctacactatacttgctgctaaagaaagctacaagtaacagaaccagagccactgaacagcatctcttcattctgagttctcttcttgaaatttcctttaggactcttgaaacctcttgactttttcttgttctgtttttctgtgaactgagaaaatcttggatggagatgtgtgttagagaaaagagagacgagagacttctaaagcttgttggttttatagaataagatttatgtgtgtttgaacacatagttattgggatctgatcacgtgatcttactttgactaatgctatttaatcagatggtgagatacttatcttattcttaatcatttacttacgatgatgatgatattcctcaagcatctacattgaaacaatgatacaatatcatatgtagagacaaagatccacatattcacattacctaactcatgtaactgctttgaaactaagagatggtggtcatgtgattagagcacgtgatttctgcctactgttatcggggaactcaaaagaggctgaaacttaactttattgaaattattttttaagcataactttggaatttggaggtattagtgtaagtccaatttcagaaaagaaaaaattgcaggtaacagctgttttgtctcactactaatcactagttttttttcttcttctgcagctattttttttatatttcatgaagagaaggaaaaattgattccaagaaccggcacagattctttgatgagtggtggagaataaagaaatagggaaaagtgcattacgcaaaataattattaaatcattgatcctctaataacgaaccggaatggattatacaataccggtctaacttgtgttgaattttgttcggtttagataaaccaagcgcgagttaggctaattctttctctctctacccgcggagaaggagaaagtgagattaacgagaaaccccaagagagaaaatcttcatcgacaaaattcgattcaggtgatcaatttctttcatattttcgcaattatttcttggatctgatgttatctactttggaatttcttcgctgcattatcttttgatttgttgttcttgttcctttgcgtttctgggtaagagcgaagcttgaaattgcaattggaatctctaacaagtttaagactttgctttgatacggtttatgtggaagtatctgtgattttcttatatatttatggaagatattgcagctgattcgagtttggtttgcctatcattgttgcaattttctcggttcaatcaaaggattttctaggttgatatataattccagggatttccagataatttcctttaatttggttggaattcgattgaattttcgttgctttcaattggtttgcagtgatttgggtgaaaagatttttccaagctcatggaaattggggatttttattcaaagggtgtttctggtgatcatagagttgtttgactcaagtttcatttgatcttgtgtgtatttggttggtttttcttttcaatcaggtcatgaaagtattgcataatagctagaagtattgttatctctgtatatgtgttgtgagatagtacaattggtaaagtttccatatcaatggcacgaaaatcaactgcaatttactcgtttcgatatatgtttttatgtagttcatatatgtaattcagacataagggttttatgtagtccatctcatcagtaggtggactttcactcatatttgtatttcgttttgttgataatgttaaatgggtgtaacagctgctgcagctattcacttcgtccatagcacgtagatggcagaaaaggcctgtataaaacgtcttcaaaaggaatatagagcactttgcaaggtacactctctttacttgtttttctacctctctcgagctggaaccaggattccatatttttattgctcaaccagttttctctgtactttcaaatgatgctgtatctatatgtgaatgttttcttggttttggtttagagtaagtttcatattttcttttgtttctttgggggttatttaatatgttctgtttttggcctttaggaaccagtctcccatgttgttgctcgtccttccccaaatgacattctcgagtggcgtaagccttccctatctttttttcttaatctttattcctgctggcttcctgtaatcctgttgcaagcgtttctataaagatgttatgataagtatatatgatggacatatttgctacacttgtgagtatacgttaaactaagaaaaaatgggatactacgatctaagtagacagaagaggtctcacattactttgatggaatagtgaagacttatttatcaaaggtttatatgtacttacaatgcatagatttgatagttttcttctcaattgtgaaaggctgtcagtgttactgttagcctgatagcggttagggagtttcagtctttctattattactgcatttagtatgttaaaaagggtagcttgatctcttactaaaatagagttaaactattggattaatcttacagattatgtgctggaaggcagtgagggaacaccttttgcaggtgaaaatcttcttttgaaagtttcttgttagtgttgtcttacgcagtatcttatttttgatactaaaattctctttaccaggtggattttactatggaaagatcaagtttcctcccgagtatccttacaagccaccagggattacgtatgttccaatggttcctccaaattcagtctcaacattactcttacctcattttttgtccagttttttaatgaaccaaatctttttctgtttgcctcagaatgactacaccaaatggtcgattcatgacacagaagaaaatttgtttatctatgagtgattgtaaggacaatctgcactttctgttcattatttcgtatcaattaacttgtctaatatcgaaataagttgacatggcatttacagttcatccagaaagctggaatccgatgtggtctgtatcaaggtatagattctttctttacttttggaagatgacaatcgatatacccgttgataaccaactttttttcatgaatgcagcatacttacaggacttctctcatttatggtaagctcactgtaggttctacatatttatggacatcttgtttgaaaattctcatattcttatattgtaatggtttattagcttagatatgaatattcaaaaaggaagtctattttttcttttctgttctcaagctttctctaaacgttttccttgcggcgcagatggataccagtccgacaactggaagtgttaacactactgtaattgagaaacaacggttggctaagtcatctctcgctttcaattgtaaaacgtaagattttcccatcatcaaaaaatttcaaattctggattcatatagaagctaagtttagttatctgtggttaggatagtcataaaagctggttagataacgaatataggaatgaatgcagtcctgagattacatgttttcggtatttcacctgaatccaatgttcttacttgtgacagcccagcatttcgaaagctatttccagagtatgtagagaagtacaaccagcagcaactagctgagcaagctaccacacaactgacaacaccagagtctcctcaaaagagcgataccaaagtcgagtcagagaaaaccatcgatccaacaaagggagattcagaaggtggcttgaaggagaggaaaaagaacaataaacagggattgccagcgtggataatactgttgctagtgtcggttttcggtgtggtaatggcgttgcctctgcttcaactgtgatttctatgcaacaaacctcgacctggttttcgtataatctctccttgtgtctctctctcttcagcatcaagagtagtctccttttgtctagtgctcttcgtctgaatttactcatttagcacctcatggtttgtgcttgtaaaagcagataacataagtttggtttcacaattacatacatattgtagcttcgttggaactactttgtatagtatatatgaattgaggataatggtttggatttgaaaaatagaaccgtatggttttcaaattgtacttctcctagagctcacaggttaatttgtcaatttatgtaaatactctggtgtagtaacttgatgaaaacagaagtgacagagagaatacacagacaatagtgaatagaattgttaggtatattgggccaattaagcaattgtccctttaggcccattggtaagaaaaggaaaaaaccatacttaatgataaattaaaaccggtatggctgtaccggttcaatctgtcttcaaccaccgacgttgacttgttaccaatcttcttcttctgctcgagtccagtccagtgaaagtgattatgtttatggttaataatgttaactctataatttagtgggaaaaatgttatttaatacctcaacttacaaaaaatggtcaaattaaccgtgaactcgtgaaatggccgttttaactttcaacaaaaagttgacttctgttttaacattcaagtttgcgttgactcggcctaattaaccaccgttaaaattccttctaacagcgtaattgacagacgttacagaacatccgttaaggtgatacgacgacgttttgtgctatcaacagacttcaaagtcgacgaaacctctgaaaaatccccaaatcaaaacccaaaccctaaaaatcattttctctcaaatttttcgatcaaatctgcattatgagctgcaactcaaggaattcgagtggtgaaagtggaggctgcaattcaggaatgatttcgaatgctgaagctggaggtttcaagagccgtgggtttcctgttaagtgtaaatgtgggctcgacgtcgtcatgtttacatcgagcacggctaagaaccctggaaggcctttctttcggtgcaaaagctgtgaagatgtaagtagatttgatatgagaatgtgatgttttttgtgtttggtcgataaaagcttgagatggaattgcaggatcatttgttcaaatgggtggaggattgtatgtatgaagaggttatagatgctctacccaaaatctccagcattgataacgagataatcaatgcaaaagctgaggttgctgttgaaattgcaaacttaaaggagctaatgatagagttgaaagaagatggaatgtggagcaaaagagaaattcagagatggaaaaagatgacgaaagtgtgcttggtgtgcctttgttttagtgtgattgcaattgtaatatcaatgttctataagaaaaaaacccagaaatttgttcttggttattagtgtgtaatcgaatgggagcttagtttgaatgtgatgtctttgttgtttctcttgttgttggtctttgttgtttagtttgtgtttggttatgcttttactatgtaatgacatgtagctttggtaatggtaatgaatttcatttgaaagaaaaggtcaacttcttaaaactgagactaagctaatcatatagagagacaagtgcaaacaacaataagtaaaaagacttagattatgtcataaagacaagttcaaacaacaaaaacaaaccgagactaaacatatgtcataaagacaagttcaaacaacaaaaacaaacatgagactagcttatcatgttccacgagaacattcaaaccatggtgcaagtccagcaagtccttgcgattgtgcttctccttgtggttgttcagacacttgtgatgttccacgacctcttcccctctgtctttgtgctccacgagttgttcccctttgtctttgtgttccacgacctcttcctctttggctttgtgtttgtgacccattgttctgccctagtgagccattgttctgcccttgtgacacattttcctgcccttgtaacacattaccctgcccttgtgagccattatcatgtccatgtgatccttctacatacccttgtggttcctaatacaaacattacaatcagtttttgaaacagaatttttgaaaatagaaatgaaagatatacaaacctcatttatccttggtcgacctcttggtctctttggtggacttaaaacagtagcatttttgcatgatttcttgttgtgcccttcttgcaagcagttagagcatgtcatgatcctcttttcccttgacattttgttcggatttgaggaagaggcaacttcatttcttcctttccttcttgcataattgcttggccttccggcattgcctcttctccatggtggtggcaagacaggcagcctattcaatcgaccccacaaaggcatcccttggactggcctaataccacggaaatatgtttctcgccacctatttcttgtgtagtagtcgttcacatagctctcaaccttctcttttttccctattatcacacatgttgcatgaacacatgggatcccaaccatttgccatttcctgcagccgcatgtctttaagtccatatcaacaaagtagccaactccattgacatagatttcatgcaaattatccctggacatgtatctctgtgtattctggaacccagcaatcattttctcaatctcagcatgagctcttggtgtgtactttgttttgcacctgtcagcaatgataaaccttttggctgtcctaaccatgcattgcctcctaatatcctctagaagatctaacagtggtttccgcctagcttgtctaatggttctattgaatgactcactcagattgttgagattgtcgttgcaacatgtaccggttctaaagaatgctctagactatgtaatcagactagtaagttggagagacgtgtaggcttggatattgtacctttttaagtctgcctggtaattattgaactcttctacggtgtagctgcgtgctatcttccaaaatagacgttgtagctcaatgtcgtggctgtcccttttccaattatccatgatgtgttttgaacattgtcgatgctcggcttgcggaagaatggtatggatagccttgactaaaccctgcaaaacaacaaaaaaaacacaagtttagtatgattgtctatctcaaattacagtagatatatgaagggaatcttatagaatagagactaacagattgtttatctgaaatgattgccagatcagtcatttcgcatagccccaagcttgtagagagctgtctcaagaaccagtcccagttgtcatcattttctatctcgactacagaccaagcaatagggacaatccgattgtcaccatctcttccaactgcggctaatagatgtccttttatgtcccatttcagaaaagctccatctatccctattacgggtctgcaagtttgtttccatgactccctttgagcttgaaaacaaatatataaccggtaaaatctctgcttgcttccaatcactgctcctgcaactgtctctatgttgaactctgtccccggattccgcaataacacctctgcttgataatcccatatcctagcaaaatgagaatcatgactagcacgtctagctctcaaaacttttgtctttgccttagcacattggtctggagtcacttccaacttgtattctcttaagatctcagcaaccatctcatgtttagtgagttttggattcactctcaacctttcttcaaacaaaaacccattagatgacacctttaacatcttcgaatgtcctgacctcacacaagtatgctcattgtaataagttcgtatttgcatcttatgttttctcttctcataagagcaacggactctccacggacattcaacaccctcatcactaacatacacacacttagcagcaacaaccatagcttcagatttataaagtttaatgtcataccttgtctttagggaagacatcaaaggagcaagcttgaaatcttcaggagagttataagtcttctccaatgctagtaaaatctcaggatcaccaagatcatttcgagctgcctctactctatcatcatcttcatcgtcagaggacaaaggatctggaatcttgtcttcatcccatatatcatctccgctgtcattgtcactagcttcttcttctccattagcctctggaaaatctctttccatgtctaagttaccatcttcttcgacacctaatccagcagtatcatcttcttctctattagtatctactgcatcatcaacctcatcgcagtcttcatctccttggactgcacagtcatcgtcttcatcaagagcaggaacttcagcctctaaatcctcctcttcttcatctctgattctccttcgtttacttcgtctaagtggagcacgaacttcgactgcatctgccacagcaacgcctgattcttgagcttcatcgtgagcttcctcttcctcttgtccaatttcacgacgagttgattcttcaactgcaacatcaacttcttcttccaatctattttgcgttcgtctacttcgcctaagtggagaacaaactgcggttgcatctgccacatcaacggactgacctcaagcttcttctccaatttgatttgcttctccttccggcactggttcaactgcatcgtgagcttcttcttccaatctgatttgccttcgtttacttcgcctaagtggagaacgaacttcggccacatctgccacatcaacatttgatactacattcgcttgacctcgagcttcttctccaattcgatctgcttctccttccggcgttgctttagctgcatcttgtgctccgtcttctccgccacaagactcagataccacattcgtttcacccccaacttcttctccaatttcatctctttctcctcgcggtggtgcttcaactccatctcccaccaaattctctgattcgtgaagcattggagatccaatcctcacaacgacgccattctttctaactaatggcatttcagaaaacgaattgaagcaattagggtttcgattttgattttgggggcatgattaagtttcgatttgggtttagggtaattgattttgttttgagaatttctattctcgattttgatttctctttagcacgaaaacgacgtcgtaagactatagtaacagatgtttaacggactaaaacgtctgtcaattatgctgccgagtcaacgcaaacttgaatgttaaaacagaagtcaactttttgttgagagttaaaacggccatttcacgagttcacggttaatttggccattctttgtaagttgaggtattaaataacagttttctcataatttaatctgtttattcgcattttctatcgaatttcgagtttttgaattttgagatttgactctgagaagaatctcccattgattaccagctcggcgatggtgcgcaactcgtcggacgaagaagaggaccaccgcaatttaatcccacaaaacgacaccagagacaacgatctcaatctacgccctgacgccaggaccgtaaatatggctaacggcggtggcaggagtccgagatcggcgttacagatcgatgaaatcttgtcgcgagctcggaatcgttggaaaatctcagttaacaagcgttacgtcgttgctgccgtctctctaactttattcgtcggacttctgttcttatttactgatactcgtacattcttctcgagctttaagcttgatccaatgtcaagccgtgtcaaggaatctgagctccaagctctgaatcttcttaggcagcaacagctagcgctagtctctctgttgaaccgtacgaatttcaattcttcgaatgcaattagttcttctgtagtaatagacaatgtgaaagctgctctactgaagcagatttcagtgaataaggaaatcgaagaagtgcttctttcaccacacaggactgggaattactctatcactgcttctggttcagatagtttcactggttcttataacgctgatatatgtagaaaggtagatcagaagttgttggaccggaaaacgatcgaatggaagccgagaccagataagttcctatttgctatctgtctctcaggtcaaatgagtaaccacttgatttgtttagagaaacatatgttctttgctgcgctactggatcgagttcttgtgattccaagctctaagtttgattaccagtatgataaagtgattgatatagagcggattaacacgtgcttgggaagaactgttgtcatttcttttgatcagttcaaggagattgataagaagaacaatgctcacattgacagattcatctgttacgtctcgtcgccacagccttgttatgttgatgaggatcatatcaagaagctcaagggattgggggtttccattggtgggaagcttgaggctccttggagtgaagatataaagaagccaactaagcggacttctcaagaggtagtggaaaagtttaagtccgatgatggtgtgatcgccataggggatgtcttctatgctgatatggagcaagatttggtgatgcagcctggtggacccatcaaccataaatgtaaaacactgatcgaacccagtaggctcattttggtgacggcacaacgattcatccagacattcttaggaaagaatttcatctcgcttcatctccgtaggcatgggttccttaagttctggtgagttttttttgttgccatcactccctttttaggctacagaaccttgccattgttgccattatgtatcttgatagtgtagctcacactcaattgattgggataccagaacacctttccacctggtttgttaattagtacatatctccatccagaagtttgtcatttgctttacttaggcacttctgtgtaacaattgaatactgtgctgattgatatagggactaggattggattttgacaaactgtgtctcatttatagctggctctgtctaatgaaatgatttctggccagcaatgcaaaatcgccaagttgtttttatcccataccacaagctgcagactgcatcagtcggatggtggaaagggccaatgctccagtcatctacctttcaacagatgctgcagaaagcgaaaccggtcttcttcagtcactagtagtcgttgatggaaaagtcgttccccttgtcaaacgtccacctcaaaactctgcagaaaagtgggactcgttgttgtatagacatggtatagaagatgactctcaggtaacgcacttattgctttgtttatgggccaaagatcttgttctctacttgaaccgtatctctaatgtggtattgaacagaaatcaattctaatggctatgatctagtaacattctttggtctgagaaaaattcgtagatattctttgacgagacattcacttgcttatgctttggtttttggaatggttaggtgtatgctatgttggataagactatatgtgcaatgtccagtgtattcatcggagcatcgggttctacttttacagaggatatcttgcggctaagaaaagactggggaacttcatctatgtgcgatgagtatctctgtcgaggcgaagaaccaaacttcatagctgaaaatgaataaacaagtaaacacattcgttaattttcctctgtttccatggttcttcttctttacctgtattatagtaggtggtttaatgtcaaattcgtttgattcttttccgacggttttgtgaattttgtcggtgaaatatagtttatttgcttgagaattttgtgttctataagaacagcttgattgcttttgaaacaagtaattataaaccaagatttattcaacacggaatgtggactaaattagtaataattgaaaacaagagagtaaatattcgattacacaggaaataaaagtggtgatttttcaatttaaccaaagtgatgaacaatgatcacaggttcagtgaaacaccgacatatatggcctacaattgatctcagcagagcatatcaggtgaaatttctgctgtcaccggaaaacaagactacattacagactacagatcatatgaatgctctaaatattgtttttacttctctgaggaacacaacattgttcgattcctctttatgtaaattttgagatagggaaaaactaagagagtgttttagacagtatgagctgcacggatcatcctttggtcaatttgtttgagtttgatcacagattctaaatgccttgacactgaatgaacctctagaagcctaccaaatgaaaaacaatatagttattttggtagtatgtgaaaatggaagagaatacccaaaacggggtatagataaaaagagaacctggcgatttctgcacgcctcctggtttgttcagcgatccaagaagcgcgagaacggcttcctctgagttcttctgcggaacgacttctctgagagatggttacattgggcgatccatcatctttcccataatctttcttgtaagtaaaagctgtctgcaagacaaaccaacggtctcatcttcaagaaaatgcatagtttaagtgtgagactgactaacaagcagaggacaagagacacaggacatgtaccaaccttacggtccaatacgagattccaagcttctccactcaatgcgtagtgaaagacaaactttataacatctagaggtatgtaaaatatcagactgtataaccatataacacctgcccatctccatccaatgccggtgattttagcaaagctgatgttggcatacacagcaattaatgtagccgcctgtgtacatgaaatggacaagtcaatatcacgacctatgtgtgctatatagcattctgtgatggaaaaaatgcgaagtatggggaattcgtacaagttgagcaagaatgaaggcaaaaatcaggagagtcccgggacgttcaaaaaatgaccagcctcgactacgtgttacaaatatgagtgcctgactgatgatgctcacttggagatacatcgcggatgacacttgttcactgttgttggcaattgattttacatggaagtgtttctgcagccattaaagattggtcaccggtatgcattcttctcggtaagcaaaatctaacttactttgagtgataggaagatacctcgaagaaggtggtagaaacaatgatccagtaaaacaggacggtgaccaatgctagatatgttccaatgacaattcctgtcgcaaatatctggttgagcttccaactctcgggtgtaggagatggcctaactcgatctttagaaatagtcatgatagtccctgatgcgtaggagataaacatagcgtttgaaagtgataaaaattaggttacatcaatatgaagctattgattaagagattaccgtcattgagtattgcgattatcagaaccatgaaaggtgggaagtcgtattcccatatcaacgctaaaagtgtaaaaccaagctgcatgaaacaatgtcaagaagagaaagttcaagtaagttgatgtaacttaactaacatgagttagatcatgtatcatgaagctccttaccactatgcgtatggtgatagagactgcatatacctgcagattcgtactgattagtcggtaattcagagaaaaacataagctagttgagaatgtcatcaggctacttgaaatccatatcctatattatatgatttttcatttctttagctatcagggatcagatgatagtagtataactataactttagtacttactgtatagttcctcatccgctggaaaatggctctgctggtcaagacagcactgataattacacttaagccgggatcagttagtactatgtcagcagaacttcttgcagcatctgttgcatctgcgacagctattccgatgtcagcttttttgagagcaggagcatcattcacaccatctccggtcattccaaccacatgcttcatttcttgtaaaatctttacaatctcatacttatgttctgtaacatgagagacaaaaaaaatttgggattagaaatgagagcaaatcttaaatttcgtaggtactaaggttgtgttagaatatgaccagggaaaactccagcaaatccatctgccatttcaattagctcatccactggaatggcttcatgctcatcattgttgtggcctaacaaagaggaagaaggatacatgttggttcccattccaagacgtctgcctgtctcctttgcaatcgccaattgatcacctacatgtggttccaaacttatcattcattttcccagagttttaccgtttactcacaagggtatatgtgtttctctgtcgggccaagcctaccaagctaaaggttaagatttaccagtgatcatcttaacgcaaactcccaggctaagagctctaaggatggtttcaccgctatcatgccttgggggatcaaacagtggcaacagaccacagaacctccatggtcctccaggactgttgttgcttttctctggaatttcctagaaacaattatttaaatgatgcaatgaattggagtaattaatgtcatcataacgttcttcttcaaaagtacacttatgataaaaccagctcaagagagaaagggagaggacaatgatgttacctgataagcaaccgcaagagacctcaaacctttttctgcaaatctatcaatgatggcataaactctttgcgcaatctcatttttctgctgacacaagtttagaacctataatatagtgcagttgtattagtgatggtatttctttcatggaaacagtacaaaaaaattcactaaatttttacaactagagtcagtttggtagtgctaagaatacatacctgttcaggagcacctttggtagcacgataccattttccatcggaatcaatatacgttattgcagtacgtttgtccacaggattgaatggtaagaaatggatttctctaatgtttgcacgtgcctacagataaacaacctttgtatgagaaaaacttctaagaaggtgatagtcttataaaagagagttcatgttagagaaacatctctacctctctgggatctgcaagcatgctaacaatggctgcatctatagcatcctgattttctagtcgtgaagctcggcctgcaagcaacaaaattgtatccttgtccatgtagtcaacgaatacctgtgcagaaggatttgtacatttaaacaccaacaatagagaacaagacgatgaagaaggaggcaactgttcttaacagtattgtttgatgaaattcaagtcgcatctgtagtattggtacctcaataagatttttatcaacggtaagactgttcaaagtaagggttccagttttatcacagcagagtacatccatcccagccatttcctctattgcggtcattcttttcgtaatggcacccttagagaacatgaagaaacagattattgctaacaaactgttttaaagaataacaaacaaaggacttccttttgcattcagcagcttaaagtgggatgtacctgttgtgaaagtcgatgagatccaatggcaagcgttacagatagtacagtgggcatggcaatgggtatccctccaatcagtagtacaagaagattattgatcccaattctgtaagagcgatgttgtacagggaacatgataatgatttcaagaaccattccaacagcaatggagcaaatgcagaagtttccaatcgatgtaagaacctagaagaaaacatgtcaaagactacattcggtttttccagattccaagttcactaatcaggttctatccaaccaaaagggaaagaaagaaggaaaacctgctgaaaatgtccagttacatctgtactgtccaccaagcgtgctgtttttccaaagaaggtggtcgatccagttgctatcacaacagcttctatttcaccttgtttacaagtagagccagaaaagacctgttcacccttcttcttggtcacaggtagtgattctccggtcagcactgactgcaggaataaatgttttaactattctgtcagagaaagtctttacatagtacacactaaaagaatagagactagatattctggacgtacctgatcaatcttcaaggggtctccttcaagaaggcgagcatctgcaggaatgatatccccaagcttaatgctaattatatcaccaggtaccaagatagaagcatcttgttcttgccactgtccatctctaagaacctataagagtggatctaaatcaaatttaaggtaatatagaaattaaagtgcagctaactttgccgtttcggctcataggaaggttaagagccatactcttgtttttaaagccaagcgagccataagagctgcagcagcattcccagcattgttttcttcaaagaagctgattgttgcgttgatcagcaaaaggcaaacgattccagtaaagtcttcccagtcaggacctagactctgtaataccattttcaccatgagtttcaaggtgctttttcataaacactcatggatggaaaatggtagcaaaactgtggttgtcttacttgactattagcgagggcaatggccatcaatgcagcagcttccataacccatgacaagggattccacataaaacctaagaatttcacaaatctgttctcctgtatcattgttgttttaaatggcggttagcacaagataatagagacaattggcaggaacactaagaagaatgtcatgtttattacctgtttctcttcaagtctgttaggaccaaatatcttcaatctctcttcagcatctccagataaaagcccttgaggcgatgttcttaggtattcaaaaacctcctccaacggcaatataccctgtcaagctcaagaagggtcaaaacccttttttgccactaagaattcaagtactaataagagtatacagttaaaaggaacatttaccaaatcaattccttttctgttgaaagtatcaggatccagcaatggcttgtccaaatcctcggccatacttaaaagcttcaaaatgtattaccaggatccgatactaatttcgtcgttaagaatataccaggaacagaagagaaacaggaatccttaaaaagaatccaggaatattgaaactgaaacgaccattccatggctgaccagttgatagagtgtggagaagaggagattctcctgcaagtctcaattggtatcaccattattggaagcataagagagtttgcgaacagtagatgtgaaagacgacgaaaaaagcagagagagagagaaagaagagtggttaaagatctcacttctctacctaacggtcactctcactagcttcctctttttaacttaacttaacaaccactgttacgtcaactgttctcataggacttggtctcctctcatgttacgtagaaaatgaaattgagaaaggattaacgatggaccaatggtatgagaaaattgatcacaggaataatgaaagcgtcaggacaaagaaacagataaaaaaaatattaaagatgtacgacaagtctaattttgttatgtctgggctattcccccttagtcaacactggccaacaagttttttcatcttctttgtctgtttctcgtcttgttcttgttctcaccatgactaatgaggggagattcaaagccaaaggttttgtgagaacttcatcaaccacaagaccaatacaagctctgagttttcacatgattggcatactccttcagtgtgttcttttcatcagtgtcctttctattgcagtttcagaggctctctgcaactcgcaagatcgagaatccctactgtggttctctggaaacgtttcttcttctgtttctcctctgaattggaacccatccattgattgttgctcatgggaaggaataacctgcgatgattccccggatagccacatcactgcaatctcattgccctttagagcactatatggtaaactccctttgtctgttctgcgtctccaccatctctctcaactcaatctttctcataaccgtctctccggtcatctcccatctggctttctctcagcccttgatcagctcaaagttcttgatcttagttacaacagcctcgatggtgagttgccagttgaacaaacatttagaaatggaagcaacagatgtttcccaattcggatagttgatctgtcaagcaattttctccaaggcgaaatcctccctagttctatttttatgcaaggaactttcgatttaatcagtttcaatgtcagcaagaacagcttcacaggctcaatcccttcgtttatgtgcaagagttcaccgcagctcagcaaactggatttctcctacaatgattttaccggtaatattccgcaaggactagggagatgtttgaagctaagtgttctacaagcaggcttcaacaatatctctggtgaaatcccaagtgacatatacaatctttcggagctcgagcaactctttctacccgtcaatcatctttctggaaagatcaatgatgacatcacccacctcacaaaactaaaatcgctcgagctgtactccaatcaccttggaggagaaataccaatggacataggtcagctctctcgcctgcaaagcctccaactccatatcaataacatcactggtacagtcccgccttctcttgcaaattgtactaatctcgtcaagttgaatctgaggcttaatcggctggaaggaaccttatcagagcttgacttttcccgctttcagagccttagcattctagatctcggaaacaatagcttcagcggtgatttcccttggagggttcactcctgcaaatctctatcagcgatgagatttgcaagcaataagttaacaggacagatatctcctcacgtactggaacttgaatctctatcgatcttgtctctttcagacaataaactgatgaacattacaggcgctcttggaattctgcagggctgcaggaatctgtccactctcctcataggaaagaatttttacaacgaaacatttccaagcgacaaagacttgatttcctcagatggattccctaatctccaaatatttgctagcggtggatctggactgagaggtgaaataccagcttggctaatcaaattgaagagcttagcagtcatagatttgtcccacaaccagcttgtagggtcaattcctggttggttgggaacttttccccaccttttctatattgatctctcagaaaatcttctttcaggagagctgccgaaggatttattccaactaaaggctctgatgtcccaaaaggcctacgacgcaacagaaaggaactatctaaagctgccagtttttgtcagtcccaataatgttacaactcatcagcaatacaatcagctgtttagcctcccacctgggatctacataagaaggaataacctgaaaggaagtataccgatcgaagttggccagttaaaggttcttcatgtcctcgagctttctcataactatttgtctggcatcatcccacatgagttgtcgaaactcaccagcttagagaggcttgacctgtccaacaatcacttatctggtagaattccttggtcgctaacaagcctccattatatgtcttatttcaacgtggtgaacaacagtctcgacgggccaatacccacaggaagtcagtttgatacttttccacaagcaaattttaaaggaaaccccttgttgtgcggtggcatactgctgacttcctgcaaggcttcaacaaagctgcctgctacaaccacaaataaagcggatacagaggatgaagaggagttgaagtttatttttattctcggagttgccactggattttttgtttcctactgtttttactggtgcttttttgctagactcgatgctttcattagtaagtaattttttcctatacattgtaaagaaacagtggttaaatgtgatggttttagattgattctgctcgctgcgtattactagatagaatgtgcaggctttatcaaaatcctcaaatctctttgtatttccagcagacataatattaaaaatagaaaccagctactaaagttttatcgcgccaaattcgtaacaggagattgagtttgctgaccaaggaatctagtgggtttgttgagttggagtctagaactatttcaccaacttgtaactaggatgcttgattaccttccgtttatgtgctctacttgagagatgagaggtgaaattttatagcctattcgtgttggacagcaagatcacggcagcatagtgagcaaacccatcaggcagagtcacccgtttcactgcacttctactcctcaagtgcccttgaatctgtgggaaaaaaaagtagccagttcagcaacagatttgctggttatttctacaacactgagatagaggacaaacacacacctgccagaagaaagttttgaaaagaattatatggaaacggctgcagaaggttgtatcccatcatttgtaggaagtcaaaaagaccaggttccggatcggatatgaccattatattagctggaggtgggatcctcacggtaaatctataaataagatccaaaatgtccatagaacctgtttcagaaactaaagacgtgagactctttattcatcaaggaaaatatcaattactgtagaaaggcataaggatgaaaagatatcaaccttaggggacgttagtaagagcgattccactggaatagactcatctcaggatgtcattctggacgtcttttagtacgccaacggcagtgatgttgagaggacaagagaattctccaaaacccgtttaatacacggacggacccgacgaggatcaaagcaagggagaaccagacacatactgatgtcccaaaagaccgatgtcacagccacagcctcctcctgcgtagccttctttatcatcgaagactgttttaaaacctaaggaaaatcaaattttcaaaattgggaaatcaaaacgcagtaaggtctttaatctaaaccgatgacatttttcagaaacagtgagataaggagcgaggaatttacctgagagataagataagcagggttggttggatctcgaaatcgactagggtatcgaaatccctgattgaagcaaattcaaataccgtccgtagatatatttatatatatgtcgaggctagattaaggtggtgttaaggtggtgttattcaattatggagttaaaatcaattctttaataagttttagatttgttttttgatattgcttttaaaaatatatttgtatgaattttaaaatctctgcaatatgtcctagatttcgattctaatgatctatatatacatttttgcagccattttgtgaaataaatcctatagttgggacttatttacaatggctgccactggattttaatgtttgtttttgataattagaaaaaaaatcttcgaattaaatatttgatatttaacaatcttccctaaatctctccacattaactacacgattaattactaaaataaaacttccaaaatatttaatatcatttaattactacaaaattatcatttttgatattgcttttctccataactataacaattcaattataatcatcaaaccgcagagatatttgatagcatttaattacaacaaaattacaaaatatttagacaataattcataaacatatcataaataagattaacattaataaaataaatgttttttttatgggacgggttgacaggacgttacttaataacaattgtaaactataaaataaaaatattttatagatagatacaatttgcaaagttttatgtatactaactttaaaaaataaattattcccacggtgtaccgcgagttaaaatctagtttactcatgaaactccaaagaggtttcatttcaaatgaattaatatacaaagattttacaaggtttttagttttgaataacactagattttaataaaatatttaaaatcttaattgaataacactaaactttaaaatctattaagcatgatttacaaagatgagttccaataacactagattttaaaattggatttagaatcattagttgaataacagtagattagtgttggatttcaattctattaaaatcctttaactaagaacaccccctaaattaacaaaggattaacaaacttagtcgaagggttgaataaaccaataaaatgactatttgccttggtcaacgatgctattgacaagatcaaacttctctctgactgactctcggctgactatttcccttggtaaccctgtatcaacaagaagttttctatttctcttattcttctctgtattgttcttctccttgctatgatagataaggaaatgagatccaaagccaaaggtcttgtgagaccattaatcacaaaacctgtacagcctctgagttctcacatgcatctcttcctcctctgtattcttttcctatctgccctctttcttacactttcagaagctgtttgtaacctacaagaccgagaatctctcatatggttttccggcaatgtttcttcttctgtttctccattgaattggaatttgtccattgattgttgttcctgggagggaattacctgcgatgattcatcagatagtcacgtcactgtgatttccttgccctctagaggactctctggcactctcgcttcgtctgttcagaacattcaccgtctctctcgtcttgatctttcttacaaccgtctctcgggtcctctcccaccaggttttttctcgacccttgatcaactcatgattcttaaccttagttacaatagcttcaatggtgagttgccacttgaacaagcatttggaaatgaaagcaacagattcttctcaattcagacccttgatctgtcgagcaatcttctggaaggcgaaattctccgtagttctgtttacctccagggcactatcaatttaatcagtttcaatgttagcaacaacagcttcacaggtccaatcccttcattcatgtgcaggagttcaccgcagctcagcaaactggatttttcttataatgattttagcggccatatctcccaagaattaggcagatgtttgaggcttactgttctacaagcaggcttcaacaacctctctggtgtaataccaagtgaaatctacaatctttctgagctggagcaactctttctgccagccaatcagcttaccggaaagatcgataataacatcaccaggctcaggaaactaacgtcgcttgcgctttactccaaccaccttgaaggagaaataccaatggacataggtaacctctccagcctgcgtagcctccaactccatatcaataacatcaacggtacagtcccgctttctcttgcaaattgtactaaactcgtcaagttgaatttgagggtcaatcagctgggaggaggcttaacagagctcgagttttcccagttgcagagtcttaaggttctagatctcggaaacaatagcttcactggtgctctgcctgataagattttttcctgcaaatcgctcactgcgatcagatttgcaggcaacaagttaacgggagagatatctcctcaagtattggaacttgagtctctgtcgttcatgggtttatcagacaataaactgacgaacattacaggggctctcagcattctacagggctgcaggaagttgtccactctaattttggcaaagaatttttacgatgaaacagttccaagcaaagaagactttctttccccagatggattccccaaactccgaatatttggcgtcggtgcatgtagattaagaggtgaaataccagcttggctgatcaatctcaataaggtagaagttatggatctgtcaatgaacagattcgtggggtcaattccgggttggctaggaactcttccagaccttttctacttggatctttcagataacctacttacaggagagctgccaaaggaactctttcaactaagggctctgatgtctcaaaagataacagaaaataactatctagagctgcctatttttctcaatcccaataacgttacaaccaatcagcaatacaataagctgtatagtttcccacctacgatttacatcagaaggaataacctgacagggagtataccagtcgaagttggccagttaaaggttcttcatatcctcgagcttcttggtaacaatttgtctggcagcatcccagatgaactgtcgaacctcaccaacttagagaggctggacctctccaacaataatttatctggtagcatcccttggtcgttaacaaacctcaatttcctgtcttatttcaacgtggctaacaacagtctcgaagggccaattcccagtgaaggtcagtttgatacatttccaaaagcaaattttgaaggaaaccccttgttgtgcggtggtgtactgctgacttcctgtaaacctactagagccaaagaaaatgatgagttaaacagaacatttcttatggggattgctattggatactttctcagctttgtttcgatcttagtggtgcgtgcctggtgagtgtaatgtaatcatatcaaaacgcagaatcattcaaaacggtttggagttccatttcagtttccatgggggaacaaactaggactattgtaaatatcctcaatttgtacaaaaaatgaaataacagttactatggattcgatggtatcaacaaatttctctcaatttgatggccaaaggaatctaatgaggttagtgcacttggattctagagtcactctacactcacaagaccaaaatcgatttgagcatattaacttcatgagttttggaaagaaataaaaaaaacgtccaatgacacactgaaattgaacccaaactattctactagaatcagatggcaaatattgcaaaaaggaaacaacgaagataaaaaaaactggaggcatcgtatctggagatgagagaagaaatagagacggcgagattcagacggacagattttttcaaataattggattaatatcatatggtaaagcatttgggtccaaaccgaaaaatagcattgcttagtgctcgagttacacaagattacaccttcttatgacatcattactacaccactgaaagaaaaaaaagagagaaaaatatccggatcggccggaaaaatgtaagaactaactgacgccgtgagattcctctccggcggaacattgataatagaaacccagtcgctgtagtagctaaaaaacccaaaacccgttaagtaagtaaagaggcctcaaggcccaaaagagacccgatccactagatgaatcagagatcgaccaaacaaattatgaatacccaattaagtttaatcttccaagtaattttgttagtaatcgtcgtgatctgtgtacgagcggaggagcatcgtggcgcagagtcgaattatacagagacgagcatgttgttgtttcatcagagaagtgcatttcgaagtgaagctgttcctgattttggaattagagttcgtcttctttgccaaaaatccacccatgttcgaatgaagaagatttgatgattcaactcttctatttataagcattggcttctcagagaccaatttaataaatatcgagttttttttttcattggatttgaaggaagcctgaacttggtcttgttttagctcaatttgaagattttgcgcttgaggtaatctcgccgtacaactatggagtattatacacatttgctcatttttattctatcgatacagaagattttgttttagcaaaaatcaacacttaacttcggtttcaagttttcttttttttttctttttttgtgttcttctattttgttggagaagtaagcttgtttatggttcaatgtatgtcaacgagcttatcaagagtaacgaagtttctaggaagatacgtttatggattttttttccctcttaatcctaatagattgttacgaaagcgatctgctaaaacagaacttatcaagatattttattttaagagaaaaaacattttaagctgcttatctgatcttggactctgttgcaaaatagttgaaacaatgatttacatgttctgcaatgtttctgaacaatgtgtttgtttacgtgataactgcagatatcattagagactcaagtgataagagtcaacatttctactttcaactgtatgactgaactggatttatttgctgacttcaaggtgatgcgacaaagtcaaatttctgcagaatagcaagaaatgttcatatgagaatcgcaaaaagttcggaaattgcagagaagtgtgtgtgtgtgtgtgtgtatgtgtagatacatacctttggaggagtttgcttcttctagaggagtttctgatgtaatggatgaggaagaaaggctacttgatccccgagcttctgtaatcatagcgaccacttctctcatagttggtctactagctggagaattgctggtgcagaacagtgcaatctttaggacaagagacatttcatgaactgttctcttatcatttgtatctagcctcgcatcaaacatttcaatggttggaatcatgttacggatcgatcgtcgaacccaattgactagatcccctccttgctccagcggttgaactgggggctttcctgttattagctccagaagcacaactccaaagctatagatatcacatttctctgtcaccttcatcgtgtaagcatattctgaaacacagcaaaacatcaattagatatgttagataagcgattgtgggaagaaagaaaactgtgatgttttactcacctggagcgatgtatccgtaagacccagcaacagctgacatggactttgagtaagagagatcaatcaacttagccaggccaaaatctccaacatgagcctggaaccgttcatcaagaagaatgttgttcgattttatgtcgcgatggactatttgaggtctgcaatcatgatggagataacacaaaccctctgcagcaccgagggcgattctataccgagcattccaatccaacaaacagtttttctcacctcgctgtagttgttcgccgaggcttccttttgacatgtactcatacaagagaagatttgaattctggtgatagcagaaaccatatagcttcacaatattccggtgccttatctttccaagagttgatatctcagctctgaaactattatcagaactagctccttcaccgcgagaattcagcttctttacagctatcacctcgccacctgacatttcagctttgtagactgttccacacgctcctctccctaaaaccacgtcttcggaaaagtttctggttgcatccacgaggccttgatatgtgaaaccttttttagggaaatagtagctgtccatgacatctggttttgtttgatcctcaagtgcaacaaacgctggttcccgccgctttattgtccaacagagaccaagaaaagtgataagaaaaaccgacccgattacaatacaagtgattgtcaagatcttttgcctttgcgaaccgttgattaaccaatttagctttgaatcagaatgtgggacaagtggttgacaatggcttctctgagagttacacaaaccatggtttccagcaaagttcgatgaatccatccgctggaacacggctgtgtctggtactgttccgaccaagttattgtttgagatattgcagatgaggaggctcatgagattcccaattgatgcagggatctcacctgaaagcttgttgtcgttgaggtaaagtatctccaacatctgtagatttcctaaactgtctggaatagtacctgagagattattgtgactaatgttgagggagatttgcagagaggttaacttcccgagctccactgggatgttttcagacaagagattgcctcctagttgtaactccatgagccgagtaagatctccaaagctatgaggaatttctccggtcaatctattatcagacaatctcaaaatctccaaatataccaactgaccaagctcttgtgctatgtatccggaaaacttgttgccactaaggtcaagcctctggatagtgacacaacttcccaactctttagggatgtgaccagtgagctgattggaggagatgttaaagccaacaatctttgtgagattcccaatctcaggaggaatttcaccagtaaaattgttgttagctagacgcagtctttccaaattcttcagctttcccaggtctgcagatatattccctgataaccagttttggtgaagctctaatgcagtaaggttctgaagattaaataattcaatgggaaggcttcctgttagctggttatcgcctagcattagctttgtcagtgacttgcaggttttcagatcacgagggatgtttcctgataacttgtttgaaccaagactcagaagtattagcgtctgaaatctgcagaagtgggcaggaattggaccagacagagaattggcagacatgtcaagaacagaaaaattgctatagaaaccgattaaaggaggtatcttcccttcaagctggttgtcaaaaagctgcaaatctacaaggtaaggtaggaactgaagctcttgcgggatagtaccgtttagtctattgatagacaagtctagcttctccaacagtgtcaattccccaagctccctaggaattggacctagaagaatgttctcaaaaagatgaagtaatttgagattcaggatatgaccaaactcttttggtatgaaacctgttaactgattctccgaaaaatctatctcagctgcatctatcaagttgcctatttcgcgaggtatctctccggttaactggtttgtgtaaaggtacagccttttcatctttgtgagcttcccaatctctcttggaattgatcccgtgaagtagttttcatgcagcgcaagcacctccagtctgctgatgtttcctacggaaggaggtatctcaccagatagacggttttgccagagtatcaaatcagtaagattttgaagcttctcgagctgcttaggaagagaaccctcaagaagattctctgctaatccaagtacctttaggctctcgcatccgctgatttcagacggaatcacacccgagaatccattccgtcctgccctaatgatccggagctgtctcaatttcgccatggaaggagggattacaccggtgagattattgctgtagatcacaagctcttggagtgaactcaaattaccgatttgtctagggatagaaccgaaaagataattctcgcatagatacagcttcttaagagtgatgatcatggttagctgaattggtatcactccatggaacctatttgtgcagagatcaagaacctctagacttcgacagagagataaatcttgagggattggaccagagatgaagttggtggagacattcaatttccttaaaccatgaagcttgcatatgagaggagatagtgtacctgatagattcatcccatttagatcaacagaagttacagttctgagatgggtacacgcgattccggtccagttgcagggatttgaatccaactgattccagcttgcgagatagccattggagtcattaaggaaagctttaaactccagaagaacacgcccttcttcgtttaaggatcttactaagatgaaggagaaagaacagagaatcactattgccaagaaacatatcctccctctcatttttacaagttagctttggtaagaacacagagtgatcgctgaacacatatgaaaaaaaaaaaaaaaaaagaatggcgaaacgaaacgtcgatttgggcagtcacggaatggttttggttaaaaggtaaaaagatgagattgagatgggcaaaaaagactgactttgattgatcaaggaagactatctgcaaaacactttggaaaggtctctctctgtctctacaataagtcaactctgtttttaattctctttgtcgacgacatcgtctctttctccgatttggttcatcatatttttgagctgcaagtggtttcaaatcacgtgtgggtttgtagtacagatccattgaataaaaatgttgggatcctttatagtgtttctctgggttgtcaatagaagaaaacagaggattttgtttgttgggacggtgaggatttgatgaagacgacacgtgaaaaaggatggatgattcaggacaatgatctttaaagtgtattgtttgctttaatttcttggtgatgggtgtgagagagcgttggagtctgtgagctcatgatttttatcgttgaccgttaaagagccacgcacgcacacacaagtggaagtcattgctgtctttttcgcgcccatcttgttgtctgttaatttgccactcaagctatgttcttacacttttacccctttctcatctcaatctctatccatcctctcatctttaatttacaagcgtattttcgtcaaaattaagaaggcatattaaaaaaaaaaaaaaaggcatatttaactaaatattttgaatgatttgagttttactgagtttttgtatgaattttgggtgaatttaacaaatgctcacaaatcacaatcttttaacgggtaagttgttgagcttccacatgacatatcaatgaaacatataatcgatttttaaggctttgagcgaaaccaaatagtatacaacacataaagtaatgaatttatagacattataaaggacttttttcaagataatattgttatatttggttcatttttttcttcctacatcaatcaaccaaatgtaggaacatttgccatgtacaaaatgagaccattacaaacaatgtaccaaccaactgttgtgtgaccaaaaatcttaccctgagagtctgattttgttgtttgcttgagtttctttgatgactttagaagcaaaacctggatcacaattaaactccagcctcttcaatcgcagcagacattgaagctgatgcttcttctagcgttcgcctcttttgaactgcgttaaaggcctcgatgatgtctccttctatccaatcatcgtagtcatccataccaataccacattctaatccagcactcacctaccaagtaagaaagttgaaaaggttgataagtcaaaatttggtttagatttggacatatttcagcgtgtgaaatggaagtcgatagtttagtatgactctactttctccttccatgttctatgcatgtaagacggaagttgatagtttacctctttcacgttttctttaacccgtttaagagaatcaagaacaccgacatggacagttttacccttccggaccaccctgatgccacaatctttgacaaattttccttcattcaccatgcatccagccacacgaccacttccactgctgaaagtagctcgaacttctgctgagccaattgggatttgttcctatcaaatatcaacagccacatgaatcttcagtttcaaaactccaaaaaggctcatgaagtgagactaaaacctatgtttttatgataatctatgacatgatacagaggtttccttttcaggcaattcaattattcaacccaacaataaaaacagttgttatgccaactcatgtggaaagaagacaaaacaatgatgagaaatgctgatcagattaggcaataacaaaacgcttcaaattgctaaagaaatcaatgctaacctcaacagactcaagaagtccttccattgcgtttcgcacatcgtcaataagctcatatataactctatatagtcggatttcaacacctttgttttctgcagctttcttaacagaaccagacgctttgacattaaatccaaaaacgatagcttcactcgctgatgctagatcaacatcactgttgctcacatcccctgttgcttgtagcaagaatttcaaggtgacattctcctgagggaggacttgaagggcttgtcttacagcttcaatggatccctagtagtcacattgatgatttgcatcagcataaataagaagagacagaggaaaccaaaatgtttaaggcgatgagtggatgaatccaaagtgactatttacctgtacatcgaccttcaagatgatattaagctgatgcaaatctaagcctgacatctttttcgctgatacagcagaagctaaggaggaaagcgtgacctttccatccccagcctttgcagatattctttcatctcgtagtgataccgcacgtgcctctgccatctcccgcgccacatcaagggaagagacgatctcaaattcatcaccagcaatggggacattatttaaaccaatcacctgcaaatgtattttagatcctcaaattagatatctaaatcatctatacatgagaacatagtatcaaaatcctgtcaccaagaaaataaacatgacgtttgtgtgcaatgacgtttgcaatgacgtttgtgtgcaatgacgtttaacttagggtagattatgaaactacaaacctgtacaggtatggagggtccagcttcatcaactcgttccccactgtgatcaaataaagctcgtacctaaacacagaaacagagcaagaccaaagtaggtaagtttttagcgattatatatcatctgcgcaatgtgacttgaggaaaacccaaatttgggatagacctttccgaaagcttctccgcaaacaacaacatcccctcttttcaaagtccccttctgaacaatgaacgtcgcaaatggtccttttgctttatcaagtccagcctcgattacaatgcccttggcatttctgtgtggatttgctttcaactcttgaagctgaaacagcaaaatacagtcagcccacaagcaaaagctaattgagaagcaaaagcagaaagtgggagaaaaaaaaaatgaatttatgtaagcgttattagtctttagccctccataaaacaagattttgggccgactttggagcaattatgtaagtcatttcgtagccactatgtagtgcttacatgaagagaacaaaattgagcttcattatgcatctaccgaaaacagaaacggaaaaatcaagcaaacctgttatcatgggatgaataacaaactaacctctgcaacaagcatgacagtttccaacagatcatcgacattttcccctttcaaagcactgatctgtcaaaggcaaatatagagcatgatatgagaacccatggaacatttggaccctaaaacatatacgtgatgaaagtatgtattccaacctgaaccattggaacatcaccaccccaatcttcaggcatcaaaccaattgaagaaagctcttgcatcactctatctggactagctccttctttatctatctggaacatgaaatgaataagactgggagaaacttacatatacccaaggtaaagaagaataacaaaataccttatttatagctataactattggtacagcagcagcctttgcgtgagctattgcttcatttgtttgaggacgaattccatcatcagcagcaaccacaatgattgcaatgtcagtgactcgtgctccgcgagctctcattgcaccaaatgcctagatgaggacataaaagtaagatgagtaaaactatggtatgcctagcaatagatgtgagatagtcaataaacatgctacatgtaagaaagctcatgaagtataattaatgatacttcagcatcagaaatgaacatgcgaagattcaattgcaagaaaaagaatctacctcatgtccaggagtatcaaggaaaacgcaggactgcaactttccatcaacaggcactgacaccttatatgcaccaattccttgtgtaattcctcctgcttctgacgcagcaacctgcatgtatccagcgaagggagattagctgacaacgctacttagcactaatcttgacaataagcaaatgaacaaacattaattgccagtagccatgctttagaaatgataagaaactgaagaggccacaatgaaatttcttaaataataaaaggcaaattaatagctaatctcatccataccttgctttttctgatatagtcgagaagagtggtctgcaaaataggcagcaaatgcattaggaacaacctactgctaaaaaataggactctatatatccttttaagggcgagtaggacatgagaacaaaaaaaaggcaatgcaaactgtgcctacctttccatggtccacatgacccattatcgttatgacaggaggtctgtcctctaacttgtccaaatcttcttcatcaaaagtttgccttttctttgccatctcttctactttaactgaatcagcatcaaggacctcaacatcgtaatctctacaaatcatcttcaccatctcgcggtccaaagtgtgcacaccatcaggtctaatcccttttgaatataggtacccaaggatgtcaccttctccgatggctaggttgtaagccaaatcctcgatggacatgccttcttcctctacctctaagatttcagctttgacaggtgctgcgtcttttgcagcctggagtcttacagccttcctactagctttactccattttctcccttttctacctgatcgagaaatggatgcatcatcgtcgccgtcgtcttcagcaacaattcttcgtcttggactagctgatgcattttttttattacggtgctcaactctgaacttgttagagggaggaccctttccaggcttagtaggagctaacacagcctgagaggccgcaggatcaacaccttttttcttcgaagcaaatttgtcaaccaaaataggcttcctttctttacttttaacgctagaatcaacttcttcagaaactaaaggttttgctgccataccaagatcttttaagatgggtgatttctttacgggtggagctaccataggcttcccttgtaacattggctggggtcttacaggcggttgaggtctaaaaggtggctgaggtggtgccaatggagtgcctgctttggcattcacctctccctcttctctcgttctaggttcggtctgcactcctctattaaaaattttaggtgattccttaacaactttttgcacagcagcaacagcatcgcccttacgccacacactcttcatggttttcgtcttccttgttcctccatcactcgcattcgcatagctaccatttcttgagttactactgttggcactaggctgtgacggcttaacagcctcaccaccctctttgttacccggtttcggaatttccaacttctcagctttatctaaaacttcaccaagagattcaataaccttattcctctcttcttctccatcaaacttacccccattcgacaaatctttactccaaggagcagtattcacccccaaacctctttctacccttgccacagggggtttcaagacaggtttaggagtctgcttcagcacaacctcactatcatccccatctttactccccctaaacgagttagaatctatagaaactgagttgttgttttggtcagcaatgaagtcagcagtagtagtagtagttgaagacgaaacagaatatctacacagccatttcttagtccccttaacacttctccttgacaaagaaaccctcttaactaaagcatacgatgcatccgaagaactcgttccagaaacgcttgcacaagcaccacctagactaaccagagaagccaaggacggcattgtgccgacgagaacaagcatcgatggcatctcaaaaaaaacagaaaacgaataaaacaaagcgatagcaaattcagagactttatctcattccaattgcaacgaatttcgaaccagaaatgacataaaaacttcaactttgtaaagaaattggggttatcgacgaatcaaatccgaaagcatgaagctgaattgagaatcgatgagcaatttagatatatggtgagagaaagagagagaggaagaagaagataagtgaaggaggaagaagaagaagagagtgcggagataactttgaacttgagcttgtgtgggtgtggctgcttctatgcctggaattttcgcggatttccgataaggccaacttacaaaattaaaattaaaatccataaatattttagctaacaaaaaaaaaaaacacttttgtttgtctgaaaagtaaggctattgggctcgtctctaaagcccatttataaaatcagacccggaaacttctgcgtgatagacacacgtggctacatttaagccgtatattgtaaatataggggcaaattcgtcattaacaaattaaaagtatttaatattatcgataagtaacagagcatttaatactaaatttaataaatattaaataacgtcaagagagagatttgtcatttgagacctcaagatttctctttctattgcctactctctgttgaaaaagtgaagaaggcccgatatagagagagagtgtgtgtcgttgacgaaggaggatgaaggaagaggatgtgagctcgcagaacgtaaaccctagaagtaatcggaacagtgtagcctcagcttctgcttccgcctctgctactcccgttgataggttccgacgacgtgctagatcgccttctcctcctcaaactgctgctgctaggttcgtccccattttaacgcagatcgagtttcagaagtgtgaaattatgagttagtttgaattcgatttgttgaatttgagctgagacgagatatatctagggttcgttgtttgagatttgcatcttaattttgcttgcggtgcttttagttttctgtaagttttgctcttttggatatcgacgattgaattcaattgaatcaatgtgcagctctgcaggggcatcatctccagctgttctggtaaacgctggcagtgttgactggacaggtcatggactggcattatcagtgcgttcgtgtagaacatgggatagaggagatttacttcgacgtcttgccactttcaagccttcaaattggcttgggaagcccaaagtatgactcttgttttctcgttatttgctctttcacatgcaaattcatttttccactctcagcaaactatatttctttggaaaatccgtagtgcatatcctagcaaaaagtccagttatcctagagctagtgaatttagtgatgcgaaaaacaaaatttggactgaatgctgattgataaacttggcaaatatcctcctgtagttcttttttggctcaaataaatttgctataggtgaatccaacagtatatttaatggtcctttatattcagaattcaatctgagggactgatgtattaaagataacctggaatggaaacatgaggaagaatagctaggttatctcatttgtgggcttattactttttattctttctctactttggattggtcctttctatctcctttgatatttgttgcaagtttcaactggttcaatgaaatgctgtttgattaaaggggtgtcctgctttggtaatctctgtttacagacagctagttctttggcttgtgctcagaaaggctgggttagtgttgatctggacaaacttcaatgtgaatactgtgggtccattctacaatactcccctccacaagattcgttgaatcctcccgaaggtcagttcttgttactgtaacctaacttatcttctttttcttcttggaatcaaggggtggggggatatcatttaagtattcgtcttcttaacatttaagtattcatctttctcttatactgtacggaaaaagatagtatctgacactctttatgagtatcttaagagccaagagttttggtcagtttaccaacatctacaatgaaagattttaactatttcgctgtcatttaagcacaaaagatcattattcatgaatcagcctcgttatatgctgctaacattttatattcctcatccatctttgatgagcagctgataccaccggagaaaaattctctaagcagcttgatgatgcacatgagagctcttgtccttgggtaggaaaaagttgttcagaaagcttagttcagtttcctccaactcctccatcagccttgattggaggttacaaggatcgttgtgatgggctcctacaattctattctctaccaattgtttcgccatctgcaattgaccagatgcgtgcttcaagacgaccacaaattgaccgccttttggcacatgccaatgatgatctcagtttcagaatggacaatatatcagctgcagaaacgtacaaagaagaggctttcagtaattactctcgcgtaagaactcaggattcaggaatatcaaacttactagccataaactactattgtttcttaatttatgttttatcttgtaggctcaaaagctgataagcctatgtggatgggagcctagatggcttccaaatatccaagattgtgaagaacattctgcccaatcagctagaaatgggtgcccttctggaccggctagaaatcaaagtcgtctgcaagatcctggtccaagcaggaaacaattctcggcttcatcccgaaaagcctctggaaattatgaagttttgggtccagaatataagtcagaatccagattacctttactggattgtagtttatgtggtgtaaccgtcagaatttgtgatttcatgaccacttctcggccggttccgtttgctgctataaatgccaatcttcctgaaacgagtaagaaaatgggagtgacacgtggcactagcgcaacaagtggaatcaatggatggtttgctaatgaaggcatgggacagcagcaaaatgaagatgttgacgaggctgaaacttcagttaagagaagattagtatcaaatgtaggtctaagcttttatcaaaatgcagctggtgcatcatcctctgcgcagctgaacatgtctgtgacccgtgataattaccaatttagtgatagaggaaaggaagtgttgtggaggcagccttcaggaagtgaggttggtgatcgtgctgcttcatatgaatcacgagggcctagtactcgtaaacggagcctggatgatggtggaagcactgttgataggccttatctacgaatacaacgtgcagatagtgttgaaggcactgttgtcgaccgtgacggtgacgaggttaatgatgattcagcagggccttcaaagcgtacccgaggttctgatgcgcatgaagcttatcctttcttgtatgggcgagatttatcagtaggggggccaagtcactcactggatgctgaaaacgagagggaagtaaatagaagtgacccatttagtgaaggaaatgaacaagttatggcttttccaggtgccagagactccacacgtgcttcctctgtcattgcaatggatacaatttgccacagtgccaatgacgattctatggaaagtgtggaaaaccatccaggggattttgatgacataaattatccctctgtggcgacagctcaaagtgctgacttcaatgatccttcggaactgaatttcagcaatcaagctcagcagagtgcatgcttccaaccagctcctgttcggtttaatgctgaacaaggcattagcagcataaatgacggtgaggaagtactcaacacagagactgtcactgcccagggaagagatggaccaagtttaggtgtcagtgggggtagtgtcggaatgggtgcaagtcacgaggcagaaatacacggagctgacgtttcagtccataggggagatagcgttgtgggagacatggaaccagttgcagaagtcatagagaatctaggacaaagcggtgaattcgcaccagaccaaggccttactgatgattttgttcctgcagaaatggatcgagaaggtaggcttggggatagtcaagatagggtgtctcagtctgttgtaagggcggatagtggttctaaaatagttgattcattgaaggctgaatctgttgaaagtggtgaaaagatgagtaacataaatgtgttgatcaacgatgacagtgttcatccatctttgtcttgcaatgcgatagtgtgttctggttatgaagcatctaaagaagaagtgacccagacttgggagtctcccctcaacgctggctttgcactccccggatctagttacactgccaatgatcaaggtctgtaaatttcttcttatggttgataaacatatccaaacttcatcacttataaaaagtgtaataaatatatgctgtttcatttttcagggccacaaaacggagacagcaatgatgatattgtggagtttgatccaataaagtatcataactgttactgtccttgggttaatgaaaatgtggctgctgctggatgtagcagcaatagctcgggttcttcaggttttgctgaggcagtttgtgggtggcaactaactcttgatgcccttgattcgttccagtcgcttgaaaaccctcaaaaccagacaatggaatcagaatcagctgcatctctgtgcaaggtttgttaccaacttatccgttactttattttcttccttctcaggatgatctgacactaacactaactttgtttcaactcttttgtttgtaggatgatcaccgaactccttcccagaagctcttgaaacgccactcttttatcagcagccatgggaaaaagtaagaataatttgcttgcgaataaaaacaaaagggtacaattgcagatgaaatcaatatatatatattggtgtggtgaagcatataagcttgaacaacacttggttagggctctttagcttgggtttcctttttttgcagtacaaataaagaagttactataatctctctgatctataaacgttggggtttctatgaatttaaagtaaaagtttgtgtagtaagtaaaagttaaagactgcctaaacaaaggtgatagtgctgaatcttgttatttaataatcttatagactcttgttgtatcttcctccttttttttttgctgtttatcataatcctggattaacaactttggtttgcttgaaattaatttacaagacaatgtgtgttttgaaccgttgtatacttgtgttcaggataatttggctccggtaattttgtatgattcgacttgtgttttttttccgtatgattctcttgtttatacccttcaattagttagacgagtcgtaataggaagaaaagcaatgaaagaagagcaaacacataagcattctttctcttgaccaaagttaaaaacacacaacatttgaaacatgacaaactagatgtacttgaagagcaaatggaggatctaacttccgaagacagcgacttcgagattcttggcggagtcaacaatggaaggaggatcaaagcgagtaaagagcttataagaggagattagagagagaacgatgtagaaacaaaccacaaagaatgtgattataacagaagcagtggctctatgacagaaaccgccataggagctacatgcatcgctccaagtaatggctgagtctccattgtaagccaagtatagaacctcagctgatacagctccagcagcaagaaccaggtaggtcagaagctgagacaataaaacattatgaaattaatttttgtacttcagtggatcatttataaccgaattttttgaatagtagacctggtcgagacaaaagaaggtccaaacacgaggcattgtcgaagaagaacgaggcatcgctgcaatggctgctgatagaagagagtagcctgcacatattccatttgcgtgcaccaagtacctaagtttgtaattacattattaccattaccgataatcaatatttttttacaaaaacagtttatttcgactatactttatcaaaccctatctatgctaacttcgataaccaacaaatgtagcttgactaatacgtgtctttgcctagcattttggggccctagacaaaagtaaaaattctccattttgtatttaactcatcagagccgcttgtttcatgagaagaacgaaaatttggggccaaaattttaaggaaaagtttgggaagttcaataaagataacataatgtttacaactacaaaaccggtcataatcaatctggtaaaccaaataacaaattagaaactggccaaaagctcgacgtgtcttcatagtcagcacaatttgtttggtttaacgatccaaattaatttaattaattctgaaaatattgggattctgattacaaattttggtgaaatatgtagatataggttaatatacatgtacatatgtaatatactaatatgtatgcacatagttacagtcagtttcttaaaactagaactttttttgtgtgtttcatgtgaaacttcgccacaccatctcacaacatataaaccctaattgtaaatagtatgcaagaagaaataactctacatcttgaagatgaacagttaatatatgtgtatggagaagatacgtacctaaaggctgtgagattggagtaagaaattgaaccgaactcattagtctcagagtccttaagcatgacaacaagtgctgcaacacaaaggcccaccggagctaaccggagcattgtctcggcagttcggattccgaggctagtctcctcccacttctccgtggcaccaccaccggagccgccgtggctagccttgtcatgatcattacttttctccatcttctagcttctttagttttctctttatttatctctctctctttttatggattttgagagaaaatgtggttataaacaagtggatatgattttaatgtgtgacattaactaaagggaagtgttggatcgatagggttggtgaatgcatttaatttcgatattcatgacactcctcacatttcccaagcaaaaaaaaacatttaaagccttcgaaaatgataactccccgctaaaaagcaaaatattgatcactccactacaatctagattataattcattgtaatatactccgtatgaaggtctctctctatactcaagattggaatcatttcttttctaaatccttcagttcaaatcttaaaatacgaaaaaaaaaacaaaaattactatactaaactcaagttagaaaatcagttagcacatctccaccagagaaccctagataggtttttgaacttgaagcaaatgatttgcaagattgctccgtttacggtactgtttataggatactaaaaataactttaagctaatccaatgtcgtggtcgagaatggatatatcttgtttcgtcttatataataaatgtatagagtattagtttggctacttacgttttctttcttataatgtagtatgtggttgagtggttcatagattagttgatttaataaaagtaaataattctaagttataatccactaggactttttaatttggtggatcaaatgaatgctcagggtcttggcggatcaaatatgaaatttgatcattatgacattctggtagatcaaatatgaatgctcttggctgcaaaatttcacatatgattcaaattatgatttgttaaaaatactttcaaatcttgtggtattaataatattttataaagttaaacgtgatttcgtaattatgagatgcctggagatatgtttctttaatttatacaaaatcattacacaatttataaaacctcaacaacaatatactgtaatggtatctactagacgatgtgtatatatatgcaggcaactggcaaggcaacgtgtactttcattgttttggaaaaatatcttatatccgtatactgagacaagtataaatcagttattgtacattatttattgagttcctccgagctccacgtgatcataataacgtcatcaaaaaattcaggttactataattagcgacgaaaataacgttgataggttctttcgtaattatgaattcaattgcctttgtcaattaataggagactttttcctaatttacccttaaataaataaataatagaggaactaaaaaatatgaatgatgaatttgatagggattatgataagggacagcttagcaacgcatattaaaggttttgtttaagtgttggatcaatcaaaccatatctttacgcaagattatacatatatatatatatgtgtaattacattgaccataattttattgttttgtttttgtttgttaatgtttaaacttaaactgcctcgtaagataaaagcaaaaataaatttgacaaaaatataaaaccaaaaataaaaatacaagatagataagtgttctcagtctcgtggccagtctcaatctagaggtatattgtaacatttctttcgaatttgattcatagctccacaattaacgataaatcatgaaagacacaagaattccatatattactggattgatttgttatagattattaaatatctctattataaacaacaaaaagagtaagttaatcattagttatattaagtccaactacatattgtatttgtaattgaaaatagatcaatcatttgttataagatgtcatgtcagatgatgttgatataattgatatcaggaagaacaagtcctcggaattaatatgtacggttcgtgaactgaaacgactcttcgattaaaccggatggtttactgaagctaatccggtttattcaaattgagtgcaatgtcgtcgaatttaatagggtacagtaaacatttcgttattacggtttatcatactttcaacaaaacgacagaaataacaattacaaacctcacatgaaacattataaaagacagaaaataacagccttcttgaaacccaaaccatttttttacgctgctccaaatttcttcctcaggacataaacatactcaatgatcctatcagaatcagccaatgccttgaccacactctctctttccaaacacctcttggtccacgtagtcaatataggaaactctgtttcgatactgaattcaccaaatttctccatggccttgaaccagctgtagtatcccattaatgcaatgtctaggtatccaaatacttcaccaccgtaataaggtttgtctccgagctctgtctcaagtgtcttgaaatgttccaacaattccttcttcactgctgcatgttcttcgcccattgttgcccataccttccatgatgggtcgtaaaactgaaccaaccaaaaatcatcaaagtcataaatcattgaaagtacgtgagcctaattttgattatgtcataaatcattgaaaaatacgtgagcctaattttgattgttgaacattttaaaagttgtatagttttttcttcatgttataccaataactcccaataaattaacttcatctaaaaccctaactaactattccggatctcaaattaaaaaactatacaactttttagtaaacaaaaaaaaaagcgagttgtttacctttttgtcgatgaattcagcccaaaatctagctcgagacttctggtaaggatcagagggaaggattggggatgcatcggaccaaacctcatcaatgtactcaagctgaataagagattcacaaatcggtttaccgttgtggatgagaaccggaatcttcttgtgaatcgggttcatctctatgagtaaaggagtcttaacccatggatctgtttccttgtactcatacttgactcctttctcagccaaagccatcttcgtcctcatcccgaacatgcttggccagtaatcaagaagaatcacttggtcgttcgccatttttcagatccggtttagttctgatatatcgatttaatgttttcaactctttgtgtttattgaaatgtagatgaggatgatagaggttgcggttttggggggatttatagagtaccacgtcgcatgttctattttttttttttttccttatagaatatgtggattattttttattgttcacgtttaggccatgatattgttatttctttattattatatccctctaatctctattgtatcgaaatgtgatttccttacctgtcaacgaatatcttgatttggaagaagatatcagtactgactgtattattgggatttttataagctttcttcttgggaagtgttttattttgttccataaaaaggagggtgataaagcttgaccgtaccataatatagtctactaaaatgacgtttaaagtaaaaaaacgcatgataggatagtactggggtgtatgattgaatccgctgtaccagtcccattttttgtgttagtcttcaaagaaactgtatttgctcgtggtaagaacggtattgaagattcaaactttttgttaagtttgaatctgaggaaatcacacaaatttgttatgcttgtgttgcgttgtagttagcttttttttttctttttttggtatttctctgctacttatatctcttttacttaattccaaaactttaacaaaaaagggtaaacttatttaacacaattgaatacattatctttacctaatgctaatcaagatgcatcggttatttgattatgtataaattattgtattgtcaagtcacatgttttaaaattttaaataatactctcactcgtttttatttgtttttattcgtttcaacaactaataatatttattcgttacatattacatcaagaaagtggaattcactaatattcaattcaaaatatctttgaaaaaacttttttattttagaatgatttgacaaaatattttgaattgataagcctattataattttaatactaacaaaatagatttgaattgtatggcaaaaaaaaaaaaatttgaattggaaaactcttttaacagtaactaagagcttacaagtacagtgaaaacatatcttttggttgttcacttttgtaagatgatgtctggagactcaatttttcaggacaacgaaaagggttaatagttttctaaataaataatttttggctgcaatacaatttactcaattagaccttctcttcatagttcatagacaaatttgacatttgttattccaggctaagacaggtagtatttgattttcaagtttcacgtggtattttaataaactgattactgatcaccaaaaagaggctgaatacttaatgatttttcgaaccacgtttaaattgtctttactacaaatatttaatatggttttcaaatctgatcatgcgtggaagaggctcgagctaaccttctaggtaacgtagaaggttttgagtttagattccccttcctaatgcaccactgacgatattctttattagaaaacctaaaaaccattgaatgattgaatccgagactgatgatagcgcagcacaacacaacacaacaaacgcgctccacagtggcacagtccacactaaaacaacttcagagttagttcttatcatttagaaacatataacctacaaaaaaggcaaaactaaaaaaaaaaacagagcaatagaaaacagaaacataacctacataaacataatccagcaacggtagtcggatggttattggtacttgggacttgggtgtacaaactacaacgtaaacttgttttcctccagattcgattccaattattggttcgaaaaatataatagtacaattaaactttaaagcccactaagacccaagtaaatagactatcacggctaaactcaacacactgattttgtttttgggcccaaaagcccattatgttttggatattcggatgggctatattataaaggattcagtccaatgtttgaaattagttgatttggtctatgactatcaaacaaagattacaaattgtaattgtcattactcattagttttggtttagtacagcctcgataatttattcagatttggcactccaccaaaatctattttaataaaatcaacaatgtagtcggtttgttagttttttttttctttgacgctttgttttgataatactataatagtaattagtaaggggaaagaaaaaataaaacaaatcgattgttttagattttggattggattttcttggtactggtttaattcggtttactagacttatcatcgcaatgaagatctaaaaaattgaagctaatgcaacgtattacgcatgcttaaccaccccaaccgaattttcaagtaaatatttgtattattttgatgacattatcttaaagatttccgaaacaaggaagaaacagaacatgaaacagagcagaaacagcaacacaaacagaaacataaaaacatatcagcgtagaatctattcgatttcgatcccaagttttttccttagctcaggaacgaacttaatgatcttctccgaatcaggaagagacttagccacactctctctctccacacaccttttaccccaagcaatcagttttggacactcggcttcaatgctgaaactcccaaacttctcatacgcttcaaaccaactgtaaaatccaatgagagctatatcaacataaccgaatgtttcacctccaaagtaagtcttgtctccaagctcagactctagtgtcttgagtatctcgatgaactccttcttccccgcctcatgctcttcgcctttagctccccaaatcaacctcgctgaagcatacacctaagcacattatacgaaatattaacgtctatgtcttgcctaagaagggtttgatttttaagcttatttttggaagatagattaccttcttatcaatgaaatctccccaaaatttggcctgagctctttggtaaggatcagaaggaagaagtggggttttgctaggccaaacttcgtcgatgtattcgatctggatgagtgattcacataccggattaccattgtggatgagaaccggtattttcttatgaaccggattcatctcgaggagaatcgggcttttgttccacagatcttgttctctgtaatcgaatttgacatttttctcttctaaagcaatcctcgtcctcattccaaacatgctcggccagaaatcaagaagaatcacctcgtctgccattgctgttcttgattaagctcactaagatatttttgtttgtttgttttgtgtctaagtatattatggtgaagagaacaaggttttggtcaatttatagaggagacaataactcaaaactacaaacgaaatcgcatttgcttgccgctaaagtcagaaatgcattaacgtgcccattacactaaatctcatcgcactaaagcattttaatatgaagggaataaacttttgattaaacattttcttttcattagctttagtttaaaagtcgtcagagattatttagcttcaatactttgtgttattgaatatgagtatatcaactatcaaggggttatacataccaaaaaaaaactatcaagggggtttgtaatttatatgttgaaatttcatgttgatttcttctcgtgtaaagtttctcgtactttatattaaaatgtggaattaataaatattttggtgtaaaatttatgtgacaaattttaaatcagaaagcttaaacctagagattggtaacgagtagtatacaattatttagttgaacaactcatttattaatgttttgcggttcaagacattgaccacatgattcacagagttgaattgattatgccactgcttacgccatcatacctttttaccttcactttttccaaactttttattggttacttttctttggttaggactatatttactttaaggatgacgaaaaaaaaacaaaaaaacaaattttagctgtctgaaacctaataaaattgattaatatacaattatacatacctcttttttaaaaatatagagtatatgcatatctcattatatgtgtttggcatccatttcccatttcacattgtccccattcttgtatcttttgtgcatctaacgacaaaaataaaataaccaataaacgattaaacaaataaacggtgtagaatgagtttgcatggtaagatataataactatttgcttttaacattttttccaatacttcaaaaatcaaatgattaaatgacttatctttgggccaaatatccaacgatttttagatgtgtctggttaaaaagttcttaatcggggtttgctaatcggtttagtttcacttcagtttttttttctttggctcaaagttttcacttagtttgtttcattcttgtattcttcttttcgaccggtttagcatttctcctggttatttaactaagttaatcatattttttgaatcacgatcgtcaaatcttgttcacatgtgaggttattcattgaatcaacgaatttaatctttatcatatatttacgtcgattttggtattagagcaagcgccgttatggcaaccagattaatgtaccaacaattctccattgaatgaacatcacaacaaagtttcttttattgaaatcgagtttacataaagggaaatataatctcacaaattgaaattggtattattatgcattacatagacctcaaagaaaatagaacaaagcaacaacagatcaacataacaaagtagagatttactccaacccaagtttcttcctacgttcggaaatgaatgtaatgaccttctctgactcaggcagggctttagcgacgctctctctctccaaacaccttttggcccacgcaaccaatttcgaacactcagattcgatactgacatttccaaacttctcgtacactgcaaaccagctatggaatccaatgagagctatatctacatacccaaaagtttcgtctccaaagtactttttgtctccaagctcagactctagcgtcttgagtatttcgattaactccttggctgcttcttgctcctcacctttgaccgcccaaatccttctcgccgtaacattcacctgatccgttggtaaaaacaaaaaacttacacaagagactctagcggaagaaaccgaaccaaaccaatccaaaatacttaaaccgaaaccaaaacctagaaacaacaaaataaaccaaaaccaaaccgtaaattttctacctttttgtcgatgaagtcggcccagaatttggcatgagctctcttgtaaggatcggagggaaggagagggttattgtcgggccaagtctcgtctatgtactcgatctgaatgagagattcacataccggtttaccattgtggatgagaaccggaattttcttatgaaccgggttcatctcgaggagcaaggagctcttattccatagatcttcttctctgtgatcgtacttaactcttttctccgccagagcaattcttgtcctcatcccaaacatactcgcccagaaatccagaagaatcacctcatctgccattgttgctcttgattaagctctcactacgacctctctcgtttgctgttttgtgtctatatgtgtgatgaatagaaaatatgtttggtaatttttaggggttttgaatcgcattttgcttgctcttaaagccaaaaaagttgtattaaattagttctacagttgttgttcgttgtttgtcttctttaagtcggattgttttctttctttccttttggcgcacttgattacatcatttttttgtttgggtgtcactcatatcaatactatgagttttgcgaataataagtcaaaaattccctctttactttttaggttcttaatattgatcagtattcagtttttttaatgtaatgttcacatatttttgttaaatacaagttatattattttgacaacagatttatgtgagaaatgagtgttgtacgctaatctttatttaattataaagattttcgatagttgctttcaaagaagaagaaaaaagagattctcgttagttgcttaggccactgcctgcgtcagcatgctttggacaattgacttaactaagacttgtttctggtgaattgtgtttttgtttataaaatttgagtgaaatgaaaaagaaaaaaaaaatgaaaatagaggatgaaatctgaacaacttttattgataagaggacttgaaaagagtatcagttttagatactaaatttaaggagcttcaaaacagattttcggtcaggcatgctcggtattgcaccctttacttggacacaaagagaggcagctgcagctgcaggcatcggaaaaaagtgagacaaaactaatctgaattacgggttagaaaaccagatttatgtcactaattattaccagcaaatctcaagcattcctcatgggacttgccctctaccatagcgactgcaaatgctgcagtgaaagtatccccagctcctgtagtatcaaccacttgtgcagccggtatgatagactgctggattggtttttccccttgtatgaatagtgcagatcctttggacccgagttttactagaacttgcttaactccctgaggaaaacatagccttaaaccttttaaacccaaaagccactaaaccagcattttcaaagagtccagtagcagcaaggattagccaaaatttggagttaataatgtgcaagaaagggacttaccaacttatggcactttgcaacagcttggctaatctgttcaaaagtttcagttggcattcctgtcaagcgactgagctcagtttcattggggctcaagatatcaatggaatccaatagctcatttggtataggcgtatccattcctcccacatcaaggatgactggaacacctgctttcttcacagcctgcaataaaacccaccagcagcctaagtttcttcgaacatgatatttcaaacataatcaactctataaccctattccaaaacctctcatagttttcaaaacctaaagcagctgcatccattcaacagagcttccctaaaccctaaaccaactctcactgaagtaactaactcaagaaagtaaaaaaatggaccttagcaacttgaatattgatggaatctgggatctccctttgcagaagcacaataccagcattcctcacaatctcaagatcatcatcgctcataatctcaggccaagctttcatatttgcaccaccaacgataatgatcgaattctgaccgtccgactgaagcatcaccaccgcgtgtcccgtcggctcattattcacagatctcacgtagtccaagtgaaccccacacccatcatcgcccaacgcctcagctattagcttcccgtgcgcgtcctctcccaaacgaccaacgaagtaagtcggatacattagcttcgctccacacgccgcctgattcgcgccttttcctccggcgagcgtttgccctgtcttggccgaaatcgtttccccttccttgggtaatctctcgatctccacatagatatcggcgttcgcagatcccacaaccaccagtggcggcgcgtgtgcgtcaacggctgatttaggattccgatttgccgatggatcggcggagagtgagagaacacggagggatcgagggcgggaaaatcgagattgagctggattgggattcacagtactgatctgaagctgcggtcgattgaattcgatgtatggattataattgatcgattgagaaactgaagagatccctttcatcatcgttatttgatttttggcttttatgaaatcgctgttatgtcacaactcagaaccaacaactaaacatatctgagaattatatgtaagttaaagatatatccatgtttgttatgatcattaatgttatttatatgttaaccaaaaaataaacaacatgagtacatgactatgtttggactggatcaacttagacaatgcggaggaaccatcttcccagtagcagatccatcaacgttctcacacaacgcacttgcaggaccgtcgactccatggtgagttaagttaatgtcaattaactgaacatctttgcaaggaaaggttttgctacattgaaatttcacagccactttattctttgatgttccccaaatgttctttagtgtcacgtttcggatctgaatgtgagaatctccctgcgataaaacatgaactaacatgttaattttaaagtcgatgaagattctaagaagatagaaatttgtttcttgcatagtaagttaccatattgctgcatggcgggtaaggacagtatttttgatcaatgccgataggattttcaacatttatcatctgtagattctcatacactaaattgataattcggattgttgaagctgaagattcccatgtcttgatccgtataccgttggtcgtaccggtaaagaccgaatttctaaccattaaaccattaacattcttttcgtctttgttttttcctaagcttccaatactaattccatgtcccggtccgcacttgacattatagatatcaaaatttgtgtttccagagagcattgcgatacaatcgtctccggtgctgatgtgagtgtttgagatttgcatgttacttgataaagctattttgattccgtcagtgttgggactattgctgggagctattatgttgactctagtgatgctgaagtggtcaacggataagaaattgaagtgtccggctttactgttgagtgatgttatcccattcatgcttgagttttttacgaaatcgaaccccatattctgcaaatgtatcaaaacaccatgaaaatatgattaaatcaagtttatgtttcaagattctctttttaaaagttatatatatatataatgacataaaatattcagtttgatccataaaaacagtagctataaaaagaaagttcaagaaagcgtacgtactatagcgagtttgggacaattattgtccttctggcaatcaattagtgaccatgacttttttccttggccgtcgagggtgccatccccgaagaccgtgagatagttgatgtagcggaagtttatccatatttcctttttaatgtcgtcgttgttcggaggagccaacaaagttccatcaatgacaaacgagatcttaccatcgcatggtcctacaaacgttacaccaccaagatagaatgttcctagtggtatgtacattttgcttggtccattccatctgcatgcatctttccatgcatttgtgaacgccttatatgagacattaccaaagaaggtagattatttgtaagacaaaaactcttagtaacttataagattcaatttttttttgttacacacacacacataaatgaatacgctcttcaaataactaaatagaaaatatgtagttaaattgaactagttaattttaattaatccaaatattaaaaagcaagtaaatagcccgttattctttttttttggaaataaaaggtttattcctattttttttttttattgagtcaatcgacattctatgtgaaatgaatgaagaagttgagaaagaatatttagttaaagaaagcagaaaatgtcatttacattggtgttatccattttaccgtcacctttagcaccataacttcgaacgtcgaatacttttggccgagtgattgggcgacttgttgtgacggcgatgagcaagagaagcaaaccaaaagccatgaacacaaaatcaatgcacggcgccatcttcttcttttggcactgcatgcttctatttatttctctgtttttctttttgtttgtttttttcaacctttctcttttttttttttggatttttgaaataacaaagaaatctgtactttctttaaaagacaatacgatttggtctttttaaaagaaatacatcgtaaggaactatatatgctaagaaatctgcgaaaaaaatttgattcttgttataccaattttgggctaaaaaaacaatttctttctaaaatcttcatacagcaagataacgattcatatattttatttgtctttggggtcttgatctggtgagattagttgtatcaaatattcttaaaatcatgcaacaaattacatcaatgcagtaaaaaactactatatatattacctttattttgaccaaaaaataaataaatatatattacctttattaaaacaactactaaatagtaatatatgaatcgttatcttgctgtatgaagattttagaaagaatttgtttttttttagaaaaaaaaatatcaaggaaaaaaaaaatcaactactaaaacctgtatacagtttatttttagtttgcatataatataaaaaaaaacacttatatagttatatacatatcaaggaatctataatacaaaaatcgaaatatgcttatataccaatgctgaggaatcatttttttgttactgagtaacgtagtcacatagactccaaatttcttatttcttatagtattctaaagatatcaaaacctgttctgcatatgtaaattatgtatgcatcttaggctggtttcacgttatgtaatgtgattccaatattccatcaaataaggcgtgctttgacccattacactatataatactgattctttcgatcgatattaaataaaggtcacataataataacaaaagcccatttattatttggtccgtcaaggctgcttgaatgttaacggtcaaacctgtctcacccgtacaagaatctcgtcaaagaccaatacaataaaattgaaaagaccacaaaataatttccttatggtcaaggaacatacaaatgaacataaaaacatctaacaaactagtgtaaaaataaaataaaaaaactatcagatttgtctatcaataattaatgaaaaatattggtgaaacgttgcaaaaaataaaccccacatgtgtatagaaattcttgaaataagtgacaatctccagtttcagttgaccccgtcgttacaaaaactctaaaatagattttattatatgcaacgtttgattagttttttttttggtaaaaaacgtttgattagttgattctaatttctttaaatagtggaaaatttgagccactccctgatatctaatcagtatataattagtcattagtcatgaaagcatatgatcgtaactccacacgtaagcaatttctagaatcaaaatatcattcgatctatataataatattcttttccaatccacaactatggatatagaatataaatgctatatcaataaaagaatctgctctcttatccatatagttcataatactaattaggagtccccatgataataaatgtttctaaacaataactaaaaatcaataaaatgataaaagttcggtctccccacaaatattatatatattcccatatatttatctacacatataaatacaaccaatatcggggagattcaaaaggcatactactcaatagagcaaaccaaaagaaaaaatctcatataacgccaaaaatatgtctgcaggagtgagatctgaaccgatgaaggttgtcttcattaacacacagtacgttcagacagatgctcggagcttcaagacaattgttcaagaactcacaggtaaaaacgcagtcgtcgccgacggtccttatgaattctccggtcaagggtacggtggcaaagattcatcacagcggttttgtggcgtaggaaaagaagcagaaagaggtgtagagacgacggagttcgatagttttttcagagagatgcctccggtcggcgaattgtataatctttggtcagaccattgactagactaataattcgttcttttttttcccacaatattaaggcccattgggtttaatattattatctcaagcctatgtgaaacacgaatgttccttagaaggtgaacttctttttttttgcttaatgcattaatgtattatactagattttaacctgcggtataccgcggagacaatttatttccttaaagttagtatatataaaagtttacaaattttatctatctataaaatatttttattttatagtttacaattgttattaagtagcttcctgccaaacccgtcccgccaacccgtctcgtaaaaaaaactatttattttattaatgttgatcttatttatgatatgtttatgaatcattgtctaaatattttgtaattttgtagtaattaattgctatcaaatatctttacggtttgctgcttataatcgaattgttatagtcataaaaaaagcaatatcaaaaatgataattttgtagtatttaaatgatattaaatattttggaaattttattttagtaattaatggtatagttaatgcagagagattttagaaaggtagttaaatgcaaacatttaattcgaagatttactttctaattatcaaaaacaattattaaatgccagtggtagccactgtaaataagtctcaacttgaaaatttatttcacaaagtggctgcaaaaatgtatatgtagattatctttcacttttttaaaaaagacaatcaataaaatcattagtagcatagtttgtttattttttttgaaagttttttttcgacccttatattattttttgaaataaatatttgcaacaataatagtctatcagattttacgacaaaatatcagaaggaacaaaaaaaaaaagaagaagcgtggagaaagttaacgcgcgagaggggcgcgtgacgataaagaagaggaagagtgaaaacaaaagagatgacgacgattcatttctttcgtatccgactaactccaccgtttcgttcttcgttcttcatcggatctttcttcttcacgacgacaacattactgtatatctctttcgcaaaggaaaagttctgatctttgtattctcttatcattcgttatctaagtctcttcgattctcgaagcttttaaggtttcttctctgactcaaactttattactcatttatattcaaagggtttgcaaattttcttctgtttgaaaagatttgttgcttcaattcttatcaacggttggaatttagggttttaaactttgtttgttagtttcggaaaaaaggaaatggctttggattgctacaagctctttattgcgttttgtgaattgtagaaagtgaaattgatttctatttgagtgttcttattatgtctctctactatcttaatttcaaggcatttaaagagacgaaatgggtaataagctgggaaggaagagacagattgtggacgaaagatacacaaagccacaacaaggtttatacatgagcaaagatgttgacattaaaaagcttaagaaactcatcttagagtctaagcttgctccttgttatcctggtcttgaagaaaccccctcctcccatcatgatcttgaagaatgtcctatttgctttctggtttgttttaagtctttccttttttgcttacttcctcattcaagaagatgaaattgaccaactctcatgcaattttttgttcttctgtgtttctagtattatccgagtcttaataggtcaagatgttgtatgaaaagcatttgtacaggtgaagaaatgtatttgttagtcatctctgaactatagaatgtttcttatccggtgtagtcattgactttgtgtttggttttatacagaatgctttctgcggatgaagagtcctaattcagctcaacctactcagtatcctttttcttatagtttgcattaagcttttggtcttctttacatatgaaaatgtctacttttgagtcctccttatcatatgtaagatgccctttttgcaaaacatccaattatgctgtcgagtatcgtggagggaaaactaaagaggagaagagctttgaacaaattgtaagccagacttaaatcttgaaacagtattgtttttaagagtatgtgatggaattactggctgattctgccaatattgttatctctgtgttatgaaggaagagcagcgagttatagaagccaaaataaggatgaggcagaaggaagttgaagatgatgaagaaagaatgcagaaacgtctggagtcatattcttctagttctagcactagtgcagcgactcttgatacagagtatggttctgctgcaggttagttcttctctcggtttcaactttcaacatgtgttaaattttaccacttttgttattcttggttcgcaatctcaatcagtagcttttacgcagaggatgatgaggaaattgtttcatctcaagaatcatgtcttccatctcaccaccctcaggttacaaggtttgtcattttcctagaaatggacctaaatgacttttatgagtatccatgccatggggttgtatgaacagcctttttctctatttagctgttaaatttcatttgtattagtcctatctcttgagaaactttgatgcttcgagaaccgttacagttaaaacttaaaaatgaaccccttcttaaattgtctcttattagtcagttatggtattacattttcagatcattcctttctggctaaagttatatgcacaacggtaatacgtgttggaactttgaatctgagtggttcatatcaggtgactgatatgtggttatctggaaaactcttcagggacggtcagtttgactttgatcttgaagatataatggtcatggaagcaatatggctttcgatgcaggtaatttgtttggttagtaaactttgaagtatatagcatttatctgaataagataagcctaactattttctttctttaacaggaaccaggaattcagagaaacacatcacctgatgatatttcagaaaaagatcgtaatgaggaaccatcaactccgtcatcatcatctccatcaggtgggctagcttgtgcaattgctgttcttgccgaacgtcagcaaatggttggcgtatcttcttcgaatcaaaacgttaaccttgcatcacaaaaccttgttccagacaatggtaacaacagtcattacaatgccatagaacaggatagtaaccattaccttcaaggagcaggaatcagctatacaagatcagatatgactgatgatagcggcggtgagacttccagggaagttacatggcaatagagagttcccaaaggtaaagaggaaagcttcaaagttgttatatagtcttttgtttatattatgttagcgggagtgaatggttttagattgttagttagttttgagggtgtatgttgatcacttcatacatgtgccaataagaaaaaccaaaacgattttcaattcctcctacagaaggttggttgtttggttgtattattatgaatggtaagcattgcacaaaaatgaaatgaagaatataatttacaaaaaaggggaatataaatcgtgattccgtgagattccattattggtaaaaccttagcatcaatgagggattttgccattttagcaattccatgtatttttatcaatgaaagcaatagtttggaagagtttgtgatgaatgggggatttgctaaaggagtaaaagaatagttagttagtagttgaggaaatgtcaagaaaggacgacaaaaatgaagatacacatgctttggtctctttgatattaaatgagaagagagaacataaattgaagtgtgagtgagagtggtggtcatctttgggagtttaagggtttttttagccttgaagtgatttacttaagagttcctctactcacatgcttttgtctttcattcttgaataagtacacttcacctttttcttactttagagcgtccatttacatttaatttccaacaactaataaaaatatgtttgctctaaattatttattatagtcgcatttctactttttgatcaacccatgttaggtcgaattctattgcgtttatattcgaaatgggaaatgatcatattaagttgttaacaaatatataatgaaactgattttttaaggccgtgaactgaattttaaggtgagtgatttcgtatagcatttttgaacaaaatgatagagccagctacaactagtatagtaactaatgacattgaccaaaacatgaaatccaaattatttggtaacaaattaacaataattgtttattgatatggacacccatgccatcaaatattaaacggcgattcaatgctatctacataaaataatacaatttgtaatctcgttttcattttttccttataagaagcatcaaattggtttctcgacgtgttggagatcacaaaaagaaacgtcgagattagagaaggtttataataaaatagaggtttgtaaattgaaacatgtacaaaaccgacaaaaagaaacaagagtgtcagaaatattgatatgtaggtaatatacatgtgtgtgtatttatgataaactattgaaactaattatgtgacataaatccacatttatatgcatttctctggatatatctattacaaaataaatatacaaaaattaaatatcccatattgatggttttaggcttttagtgttaattcctgaactttatatacattattattactgatctttgaaattgtacttcaatgattttaccttgtactcatttaaaggcacataccgtatattgatatatatctagggaaaactcacaaaaactacaaaatttacatgatgcttataaatttgagaaataacatctatattcaatacgaacattcacattcactcttgtattaaaattacattttttagatcattttataagatggtttacaatataaaacaaaagaatgaaacatgcggactttatatacatcatggttacgttacgtgtgtgtatatgtggacgttattacaagacttaaaattatacttttgcccttctcctacccaatggtccctcgattttaaatttgatcagctttatttcaaatcttcaaaaataaaataaaaccatttctttctctctctctctctagtctaggcttcttggattgagagagtgtcttcaaataaagctgtctgtttcgaaaaggtacatgcgttacactacaactctctatctctctctcttcttttctgctcatttttgggtaattcttctggttttatgttcttgttcctattactgactcacaatcagccaacgcaaatctttctttgaccatttttaatagtttctcttagtcacttgttggatttcaaatgcaaagttgacctcatcttcttcttcttcgagggtaagttttaactctttttagttggatccttttgcttattaaatgtagcaaacgaacattaaaataaagtttataagttcccagctttgacaactctcttctctgtttctggtttttctcatttgaagattactgtctcttgttctctcacacatatcatacactgatacacacgcgcttttgacggcgcgtgattataatcatatctcagttccccggaattttccgacatgagtcatggctttggttgttgctgtaataaatgacaactgattttgtttacgtttcagttttatacaagttactccataaaccttcgagcttccagcaactttggcttctctgttgtgaattattgcttattatatcctcaacacgaaatcaaaatgccaagaccaaggttacgattttgactaagaaatctccattttctcacatgagtaatgatgtgatttaagattttttgttgttgtttgtatttctctagagtttcagagttgtctcagaggcaagctccaaggctgaggtcatcgtcatctacttctgattccaatcattccaaccgtctgatcactacggatcaaagttttaagcccggtgttgaccgtaaatctcctcgaagcggtggacctaacagtgatccgcttggtcagaagaaacttgggggacgaatatcggatctagagtcgcagttaggacaagcgcaagaggaactgagattgctcaaggagcagttggctaatgctgaagctgtgaagaaacaagctcaagatgagcttcataagaagtccaagaaaccaaacccgctggctcgagtggaggaatctgcaactgaggctgagaggattgatagagacgaaatccctggtgatgtgcagaaagagactgatgtgtttgaggttcccgttgaaaagattgcagtagaagaagaagaactgagaagcggcaatgacgaagctgagaaattggttgcaaaggaagatgagataaagatgctgaaagctagactctatgacatggagaaagagcatgaatcactaggcaaagaaaacgagagcttgaagaatcagttgagcgattcagcttcagagatttctaatgtgaaagctaatgaagatgagatggtttcaaaggtgagtaggattggggaagagttagaagaaagcagagcaaagacggctcacctgaaggagaagcttgagtccatggaagaagcaaaagatgctttagaggctgagatgaagaagctcagggttcaaaccgagcagtggaggaaggcagcggatgctgcagcagcagttctttctggagagtttgagatgaatggtcgggatcgatctgggtcaactgagaagtattatgcaggtgggttctttgacccgtcagctgggttcatggatccaccgggaatggctgatgattatgatgatggactgggaagtggcaagaggaagagttctgggatgaagatgtttggtgagttgtggaggaagaaagggcaaaagtgagttacagattgtgtggagtgtcattcaagaaatggtgtgctcaccgtttctctcttttattttgctgtatttacctggaagtttttgtaagtgggtccgcttcatcagaagctaactatcaatccaaatcaattgcaaaaacaatttcatgaacaaatttctgaaaattctgaaagatctcacatatatcgacagtataagagctcgaattctaaaacagtgatatgagatctgtgaaagtgcggaacttgtcgagaacaaaaacaatcaatcttcatcttcatcactaccataattctggaataaagaggctaaactggtgttagccgcaccatcactcttcttctcctctggttttgcaggagccggagttgacgatgaagttggttgaggttgcttcttgatgacttttatgtgaacggatttaaagggttgtttgctgatagcttgtttcttgggctccttcggattttctggtcgtaaatggagaaacccgttaaacattattcaaccgaaaaaaggaaatcaaagtcgataaacttgaaagaaagattgaaaaaacccacctgcagaagaactagtcaaaatatctgtggggttgcttggacttacttctgttgccttcctcttctgtatcaaagataaaagaattaacagttagtcctgattccaaaaaatctgaaacatgatgagaagatgagggaaatctgaaagatatatgttttgatagaggaacctttgaaagatctgacgatgatcctttcttctccttctgaaggctgggataatcatcgatatcatcatcatcataatcatcatcaatttcttcatctgcaattctcctaataacttctttctgtttctgcatttcagatgaaacagaaatatgaaaaagtttagcaaagctagatgtcatgtgaagaaccaatatttacgcaagaatgacatgaacacttacaccaaatatcgactttataactgcttcatcttcttcttctattcgttttacctgtcaaaataaaaagaaaataaccatattggctcagtcaacgaaataacttaacataacaatggtacagaacacttttgtcagaggtacacttcgatagaaggcttacaaagagcaacaagatggtttagttatcaagaaacacgaaagctgaaatctctgtttcttatttaacttaaaaacagtattctgtgaagacaatatcaaatcgccataaatatgaaaaagtaaccgagtaacaggagcataccttctcagcgcctgttctttgcaaggcctccaacattgcatctacactcacagtagcatgtctagactgcaaaaatcaaaataatagaaaatcagtacccaaaactcttatgtcagcatgtaacagaatcatgaaatataatcacattttaagaattcaagagagagcgcgaggaagtagaagatacaaaaaggcagctgtgtcataccttcattgatttcatttcatcaagtgcagctataatgtccatttctcttttagaatccaaagttctgttctccaaggacttcatcgcgtcccccatctcctcagcatctcttttctgtttatccttatcaacctcctgtgcaataaaaaaaaagaagtaaattagtaaagaagaaaagcgtacatcaatatcatgcacgaggaaacaagctcaaagctacatgtctaaagtctttacctcatcttctgcacgccagggttcataatttcgagatgccccagattcgacaatgtaatcagaattttgtggatccgtcttcatagtcagctctgcagagcacttggtgcacttgaagtagaatctaaatatttgaatcccgagatacgtctgcacatcaaaagaaaagttctgaacaatttgattagaataaacgccacaaaaacaacaccaagaagaataactattcaagcagtctgaactagattatggaaaggcatctccttggccaaaaacgaaatcagcaatatataaggttcaagagccttcaaggtaatggtactcagttatactggttcgctatcataaaagctcaatttctcgaaaccctaaaaccccaaatctggaatcgttttcgtaattagtttcaattcaaggaccgacgacaatattatcgaaaactgaaaccctaataaaattagaagacactcctaataatctgcatcaacactatcaactaagaggtacagagattacgcaaaagcatccgaggaaataaattacactatgaaaccaaaccaattgattcaattacctcgccaatgacgtcttctttacgggaattgaacttggttcccttgtagatatagtttccgcaggtaccgcatcggacactcattggaagcatcatacgaaccttgatctgctggttcttcggccgccggagccgttgaagcttcgcaggatcgaagtccggcggataatacttgtttagcaccttccgttctcccatgtcgcctgtttcttcttcctcctcgagattcttcttcttctcagcaaaatcacaggaataaggaaatttctcgctatgattttacgctttggattttaacctcggcttctccttataacacatatctgtctgaagcaccgcttttataaatcggttaaatgggcttttttgggcttgagttatcatgttgtattcaattttgggtgaagttaaccgggtcgtgcattcgggttaccggtagctcgggtcattaaagtataataatcacaaagtagctaaataaaaaggtgtgagaactgagaacaccttattcaactccaattttaaatttccaagatagaaacaaatacaacagagttcaacaagttaataagtttcaacattgaaaaatgaaaagaatgagaaaacacgaaaacaagatcgatagtattattgtacattttaatagaagaatattgaaatcacatcagaaaacaagggaatttatacaatttaccaaacgtagtgaagtgttacgatcgattcttttatctctctccctcaaactttgcttcctccaaaggctgatgagctacatcataggttgcatgaagaccaacgaataggtagtacaaaagcatcaccatggtgcagataatgaatctcaagaatgctacataaccgagtgatccgataaggaatagattcatggcgattgaaaacgatggcaaccacggaactagtgggactccccataccttaggaacacgatatttcggaagcaatgccaaccctaaagtgcctataaaccaaataactccagtcactgtgtaagcgatccaacctttaacgcctgagttccaaagcgctgatactccaatggaggaagcaattatcaaaaacagaaaaccaagaaacttcaacaaaccggcctcaggagtgacatccttcacgtagtaacgtctcacaagcaatgctactgccacgagcatgaaaatgaagagggtagcaaaggagaaaacgcttgataaaacctctaagctggtgaagaaggatattattgaactgagtatggttacaaggagagtagcataaataggggttcctgtttttggatgaaccaaagcaaaccatggaggaatcatatgagaccgagcaatctgagtggtgtaccgagcttggcctagagagccaacaagcaggcttgtggtcattccctttaaagcgcatataccaaccaagtacttcgcccatttcatcccaatctgagcaaaagcaacagaataagctgcattcgcatcaatttcagtgtatttcaccatcatagtcaaggccagagccatcaaacagtaaaccacagtgatcatagacatcgaaccaaccaaaccaattggaatatctctggaaggtttctcggtttcttcagccatgttagccaccatatcaaaaccagtgtatgaccagtagacaactgcagcagattgcaccacacctttcgctccataagggaaaaaaggaaccaaatttgaggtttttgaatgagtaaaccccacaacgacgataaacacaataatacaaacagtgaccatggaagtaatcaaattcaaccaagaagtcctctttgttccagtcatggcaataccattagcaactaaaagcactgcaacagcaaccggatccaaaagatcaaaccctttagcaaaggaatcgactttaatccgaaaataatcagaatcattcttgaccaaactagctagatacgaagaccatgacctccctaatccagcagcaccaaccatagcctcaagaagaatattcccagcagcaataaaggcaataaaatcccccaattcaaccctaagataagagaaagaacctccagcgacaggaatctcaactccaaactcagcataacagagaactgagagcaatgcagagacaccagagatagcgtaggagagaacaacagcaggaccagctccaactcgagcctcctgacccgtgatcacgaacacacccgaaccaacaacagaaccaaagctaagccagagcaagtcccaccaagtgagacaacgacgcatagggttctcgctttcgcggcgggctgcatcgagctcgtacgcatcggaagagcgagagagaagacgatcggcgaggcgtggacaagtggcggagagagctgatttgtaggtagagaagctctgaaaagagaattccgggaaaaaatcctgcttcctccatctccagtagcttctccgttgacttaggtcatcggatctcgactccagctggtgagcttcctccattgaagcagggatcatctcaaatccacaaaaaatccgaaagagcgaataattggcaatttaaaaacttgagtgtctaaaatatgataataaaatagttatggatcgaaatgtaaatagtcgtctaattgtagttaaaattcgtgcagcgttcactgaaactgaaaggtggtgacagtacaaccctaaaaacgagggacccacctaaagtttttattgaaagtcgtctaataagagttataaaccaacggtcaggattggagatgtgagactcgatatcaccttttgagatgaatcgtacaaaatgcaggacccactttgtctgacatgttttgatcaaatagctaaacgccacgtgacgaatgtctattacgagatcatgccacgttcgtcgatgagcttgactgatttattcatcaacttgcttaccatttttttataaaaacaaattgttttaaaatcatatttctttttttttttgtcacattttaaaatcatatttctagtatttgttatttgtttgaaagaaaatgtattagatacagaacttgtgttttgccattcgtttttgatttgacaataacagattttgttatttagtaccttttctgatttttataattgctttcgatttttttttactgatattctacgtgacgttttataaataaagaaaaagtaaaattaattattagaagattcattattacatagtttcagatttcgtcaacagtcattttcatactttataaaacttacatgttcctgtccaaaggtatcaaggtaaaaatcccataataaaaatattactgttaatgtgacatattattttaggacaatgaaagactatttttatggagtatagaattcctttctggtattttgaataggaaaaaatcaactacatttaataattttatcaatttgcttacataattacgtgtgataaaataatagtattccggaatttattaaatgtctacctatattttggttattacccaaaatgagcttataaaattattattaataatctactttctatatttttggttaattattagtttatttaaaaacagcatcctgaaggacggagagagacagagtatgcgaggagtgtgaaaacgaagagcataaacaacacgggacgaggagagagaaactagtgtgttttagaaagaagaaagagagagatagacaaagagactgtttgtgtcttcttacccattcgaggaatcaaagcatctatttccgagctctcaagacgacgagaagctaaaagataaggctgaagaaatttagggttttttcttccttttgtattcagctcgttaattaaggtatgttcccaaattcttattcttaaagttcggctctttcctttttcttccgacttgtgtcttagttttttttttcaatcgtggtcaaaatttgttcttgagctactctgttataagggtttgtgggtactggaatctttgattcgagagcaatggagactttcaagcacctcagattttatggttagagaagtttttttttttgagctgctctgtagaataatgtgcttaggtctgtacggatttggggtaactagttggatcgcgagtgtttctcaccaggtccttggaaaaggatttgttttatacctgaaatttgggatttttcagactcatcttcaagtactttgctttgaatcggggatttagcagacttgggttcttcagtgagatgctttattcagttttgggggtttgttagatttgagagcttaagagataatttcttgttgcttttgttgaaaaactatgaatggagactagatttaattgggcttcccttggaaaccatcttgagctttattgaatctgtgtataatatgatggaataatgagagtataaactgaactcattctattggtatttgtaaatgcagggctatccatcttccgagttcttcagtagcttcacaagctggacctgaaaatagatcttggcgcatatcaggagtgtgattatggttatctgaattcatgtaatttgaagggattttcacgagctgtgatcgggtcatgaatgcgtgtctgaggacatgcttgaaccaaggggagcggacataccaatattgttcctggttttggttgtacttcctgtggtagcttacattttattaggaaaatggagtaacatttctgaaaaaagagtaagggctaacttgctggctcagatggcagctgaagaagctttaagagctgagaccgtggttaatgcggatagaggtgtaagatttgagagtgtggctactgagaatagggctcaaagaaccaggaccaagactgtttctgctggtggtggtgctgtaagagcagagtttgacgctggtgcgagagaaactgtagccgagcagagatctgattccgtgactgctacatgtggggttacagttgtggctcctgtcaataataatgagttacatgtatgtgcaaggtgttttggtcctgctaagacacgttgctcgagatgtaaatctgttagatactggtatgtttccacgtcattattatttcagaacgtttcttagtttttctttttatctcttttatctttttatatgatgctctcttgccgatgaaagttgctgacattttgacccataaatgtcttgattgtttacgcttgtagctccgggaagtgtcaaataattcactggagggtagctcacaaagatgaatgtgtcccagtggagtcttgctcttcgtcatctgagagggtttccttcgagaaagattctgttttgtatgaccatggcatggattctacaatgtatagtaacaatactacgcaggcagcaaagggaaagacttcaaaaagctctgtggattttgctagcttgggtatctctcagaatgatattacgccacaaatcaacacgcaagggaggaaaagcgtaggaaaacaacattcttccaaggccaaccgagaatcatgtagaagagacagtgctactgtgtttgattcttctgatgaagctgcttctgctggtggcgataacaagacgagtcacataaaacataaggtaagcactaaccagttcttgaactatttttctccctgtattaaataacagaagtaaatctgttgtgcttacttgccaaaagtcaaaactgtgcttgaatttaaacctggtgattttgcttgcagtcgagaggcaacagttatgctgcagaaacaaatcctagaaggcattctgttgacagctctgctgtgcaaatgaatggacaatcttttgtaagtggtatgcaggaaagtcacaaacacgaaaacaatttgggagtcagaagctcttttggttgtccaaacacacaatatccttcaaacggtgaggcctaataccataacataagctaataaaagttactctatattcagattgagatttgcatcttctaatgtggattgaattaaatagggaccagaactgcaacactgcccagaacaggtattaacaaatctggagaacagtcatgcacagagacaagtaagaaggggcaagtcgctgcagtatcaagtgagcgtccctgacttttgcttcgaccttagaattcttttgttgagtgtctcatgtttgtatctataatccagagactgttcggtctaaggatactggcatcagtgaagaaagcaatggcatctcctcaacgatgggaataatgaagatgatgggtttaagaaattctacaaagcatgatgatcgatataagaacctgaaagttagttccctggtgatattatcgtctctttactatttcaatttgtatctttagtttcctacttttctgagtcaataactattatgtttcagatgctttttccatacgaggaatttcttaaattctttcagtgtgaagtgtttgatttatcacctagggggcttgtaaattgtggaaacaggtattgtctcaattacttttcattctgttaatctacagaattaaggattgcttttataatagcaagatccattttgtatatatgtccttactgatttatatactttctaaatttactatcatctttcttctccagttgctatgcgaacgctgttttgcaatccttaacatgtacaaaaccactcgttgcttatttgcttcgacgatcacattcaagatcatgtaatgcttttcccaattaatctcgtagcataaagttttgcagatttagtttacttcgtctgactaaactatgttattctttcgctataggttctgggaaagattggtgccttatgtgtgaacttgagcaacatgtaatgatgctaagagaatccggaggtccactttctgctagcagaattctctcacacatgcgaagtataaattgtcagattggtgatgggagtcaggaagatgctcatgagttcttaaggtttttcttcatagtccttcaagatatctgtgtatcctttctacataatgtgattatatctctccgtctatgttgaaatctcatgaaattacgatattcttttgacttaaatgtaggcttttggttgcctctatgcaatccatatgtttggagagacttggaggtgagactaaagtggatccgagactgcaagaaacaaccttagttcaacatatgtttggtggacgtctccgctcaaaggtgttttaatctcctagctcatgatctatctctactttgactttacacattctcattgtttctgctcccgtctttctctggaaaaccaggttaaatgcctgaggtgtgatcatgaatcagaaagatacgagaatataatggatctcacattagagatatacggttgggtagaatctcttcaagatgccttgactcagtttactagaccggaagatctcgacggagaaaacatgtatagatgcagcaggttagatccaaaaaccaaattacttgtccttttgtggtattgaaacaagactgtaatattgtgaaaatgtgtttaaaaaggtgcgctggatatgttagagcgaggaaagaattgagcattcatgaagcaccaaacattctcacaattgttcttaagcgattccaggtatcaattacttttaaagatgactcgaaatattactcttgggttgttgttgtctttagaaaaaaaattgaaaatacttttaaaacttttgtgtatgcaggaaggaagatacgggaaaataaacaaatgtataagttttcctgaaatgctagacatgattcctttcatgacaagaaccggagacgttcctccgctttatatgctttacgccgtcatagttcacttggatactctcaacgcatctttctcgggtcactacatttcgtatgtcaaagatttgagagggaattggtacagaatcgatgattcagaggtaaactagtttcatcctcctcttccattatgcgacaagccaaacggtttatgaacatatgcaaatttcttttttctgcagattcatccagtgccaatgactcaagttatgtcagaaggagcttacatgttgttctacatgaggtaagaaaataaaataccggtttggaacttataatggttttttctgcattccgaggtcatggattcttaaaatacattttttgcagatcgtatccacgtcctcaaagaggagagcacaatggaaaagctccggttcaccattcgcaaccaagaaacgagatgaaggaacagaggaaacctgttaaccgcttcaaaccgagagcggatcacaagaacacagagtcatcatcaagcgaatggtctctcttcacaagctcagacgaggcttctttcaccacagaatcaaccagagactctttcagcaccatagactacacagatgtttgccacgtcgtagactcttcttctcctttcgccatcttcaacaacgtataccacaacgtagagccatcgccacacaacactgtcgcttgcagaatgttctcaggtaccaaacccgaaacccggtatttcgtggagcaagaaacaaatcacaacaacacggtcgtgctggacgcaacaccatcactatatcctattccagcaccgtatccgccccatgattattacgatcagagtatgtatgtaaattacgagactaacccagaatttaacaatggtcaggatcaggatagaacttacagttactggtagtaagtagaagagactagagaggattctgtttttgaacctccctgatttttattaaatatgtttagagatctctttagggatacttaactcgagtgccctgagattttttttttgtctttagtcatctgtttctttggtatcagggcaaattgttcaatctcatttcatcaaattcccctgtttctgcaaaatttgtatcagaaaaaaggtttgcactttacagattaacctcttattttattcaaatgtatagaaaaagggttcactaagcagagcttaaacatcgagctcgaacggtaaccaaatctcattgacccgaccggagaactcgaagggtgagttatactgagcgaccgtgtaagctgaatccgacccaacaccaccgtcttctttgcttttcgctattgcattagcccaagccgtacctttgaggctcgagtctagcgccgccgcttgttctcctatgctatcatcagacacgaatccactgaattgtctcacggccacgtacctagagttccatttctgaatgtggagattctccgacggagctggatcaggctggttctttttaggaacgtagaatgatacagtgaaggaagattcacagaatggaccgtcgcttggtgagacttgagagataaccggagcagtcatttctatcttctgatgatactcgttcttcccctgaatgtatgcaaacaatctgataccaaaattttcaatctttatccgaacaaaagcctcattttaaaagataaaactggaaatttgcacttactggaagaaagcggttctggtagcatcaacgagagagatatctggaatcggttcagtggaaacccagacggtgttgttgtaccggcgaatttcgtatccatttccggagtgaaccagctcgtagctcgggcattcgattctgttacacgacggcgggaacttcccaatttgggcgactccggattcggcatcgggacctaataggtctgatccaccggagaggaggctaaggaggaaggagagcttaaagaagcctaaaccggtggccatggcggttttatctaggtagcttacttctttctttgtttacgcggccttttaccggtaatatagattatttgttacgtgtgaatgtgtggttcatcttcggataggttttgtgtgtgtgtaaaaaagtttcgacctttttgtcatttttttgttcttgtatatgtgtgtgcctatgaaccgtttgtcatgagttctgagtttgaaattgccacgggtacacacatttaagaaccagaagaaaaaataatatttgtaatgaaccaaactaaatggtgattatgttatataaaatcaccctacatggatcaaatcataataaatgaaactgtagggatcattttgtaataaatagttaggaatatgtctgacaacaaaactattttgaacagttgtaaataaagaaatacacactccacccgacccgaaatggtccgggtcggaaactgattatgtacctttgttaacaacaaaactaattacccaagtcaaaaggaattctcgaaactgccccaggtcatcatcatatcatcctctctgttgaaaaatgcccatcaagtgttcgacgaaatggctgaaaggaaattttggcttcttcgacgagttttgacattcgggtatatctgttctttatgagttaaagcaactttgtcattttttaatttatctttgggatcttttcgtgttttacttttctcgaaggatttctgtttcaatatctaactttttatgcatgagtttaaaagagatgattttttcaagcttttgaaatttttattgtttagctcaatttgggattatgatgaaacagtagtggctgaatatgagactaactactgcccagctattagctgcaggtggttctctgtttcaacatgatctctctgccttactcatctgaattctctttttctgcattgttttttttttggtattttgtagaacttatttgacatgttcttgtatcatcatcttgccatgtttttaaaaaagagttgacttggttgatcaaatgtcaattgtgtgttgatgcaaagatgtctttaaaacaatattataggtttcttgttgtacgaattgggaaaaatatattagtgtttttgtattctatattttgttgttcatggcttttaaatttgatagctgtcttcaacaaattgttctttataatccttagtatttctagattgcataatgcaagtagtcaatgataagttgtgagcttattgtgataaattatttatgaattagataagtcgaagaacaagtctagtttactaattcggattgccacaaactatgtctttttaaatgaagttttgtacgtagtaaggcctctttgatgtttacttcaaaccaagaaaccttcaaatccttaatagattattatccacactcaagctacatattgaatgctaacatcagataatctttataaacaaatggttttttgtcatacttcagatttaaatcgcaaaccctgaacctttcactgatatagacaggtggtgatggtctcttcagatgctattgcgactctctgattgaaaatgtgcaggtaaaatcaaatactctgcaatactaattaacgcaattcatatataagagaagatgatctctccctttcatattatgttgcttattatttgaagttgtttagaatttagtaatatgtacttttttagcaaaacataatatctttatttatatgaatttggtgggaaaagaaagaaagagacaaatgcttttgtcatgcttgccacctttatctgttgaaaaatcttctccaccgcagacccaaaaaaataatattgttttctttatcctttttgtttgcttcttataagagattgttgttgtaagctcaccaaacattcagatttgagctttcttcttatatatctgtgtaggggaccagagaatcaaatcacttttcaagtgaataatacttttgatttctccatttgaacgattctggtttttgttgtaaaccaacaaccatcatgctcagtttccaagaagaatggatgcttacaattgtatcgtcgtgatcttctgcatctccttgtttgcaatcaatttagtgttttcttgtttcacttgcttctccattcttcagagctccatgaaagatgaaaaccaggatttcagtgatctcaggaagaatcttattgaaccagaggaagctaaaccagatgagaaggtaatgatcattacagtctctagtaaccaagaattatctgactccactgatgatgatgatggtggccaagattgctctcatgaggatatttgtgcttgttgaaacaaaggttggcttctatttccattacacaattctcctcttgcttttgcaattttgtcttatgatcattcctacttgtaaatggttaaatccatagatcgagagtatccatcttatgcggaatccagatttttgtttttgtttcatgtgtatcatatgaaagaaattatacagtctgcaaaaagcatatgtaaattgaatggtggtggtgcacaaatttgtggaaagttcaaagttatattgtttaatttgtggtgcatatatttcttgattaagtttaattttcaaggtttacgtttctttggaggctgagaattaaaggctgcctctacttagcgtgaaagaagaagagaaaaaaattccactcaaagaaagtaataaaaagtttaacaacgatgttgttagttgacaaaagtgacaattaaaaaacttgaaatagatatttaaaattaaaaacaaggacaacgaaatgcttatagtgacagactactgataaaattctctgttctgtattatagtttccattgcctaattgtataaaaatgattgaagatgataaatcatattcatggatgataaagaacattagttaatttcataatcatttccaagaactcgaagcttcgacggatgcatttaatatttattataccctaaccacatgtttcttcataaattatattttcaaaactttcttattagtatgaatagcaatcgtattaatgtcaaacattgcagtcggtttgtaaaagcatataataataactccgggccaattttcggaaatacgcgttatctggggtctgacagcaaataattaaaagtgttttaaccaaaaaaaaaaaaaaaagagacttcttcttcaaattgattcaacgcttcaatctcgattgaatcagaaagagcgatcagatcacggagaaagagatgggtcacggagaagaagataaaagcaaaggatttgcttcggaagaaggtaaccagcatcatcaatacggtacctttcaaggtgtttccaattaccctccgccgcagaattctgctccggtcactgggtttcctcaaccttctgcgccacctggcgtttacgattctggagctccttattacgctcatggatatcaaactgttccaggtagcttcacttcctgtattggatattctgatttcatattttagcagatttgggaatttaggttgaactgttgtaaaattaatagtgatcattcattgtcttcataagattctaatttgattacgggatcgtgtttgtttagctatagaaacaagttttggggttgttctttgttttaatcaaaatgttataacaagctttgatgagaattataaagtttggagagctttgattacttctaggaacagctcagttaattagttaggttgtattggtttgtgctatggaaaatttgtaaggcttatgtagtgtctcattttctcttcttcttcttgttcaaatccaagtcaagagcataaatagatgtgtgttcaaccgttcttatgtttactctttcttgattgttgtatttttcagtccatggtggtgttgctgaaggaagacctgtcagacaacgtcgccttccttgctgtggaattggtcttggatggttcctgtaagttcatttctacttcaaacacgagcttagtattttctgaatctccctctctcttcacatgcctgagaaaatatttggtcttgtggaaggttcattgttggatttttccttggagcaatcccttggtatgtcggattgttcatcatgatgtttggaaggagaatcgattacagggagaaaccaggatacattgcctgcactatcgctgtaatatttcttctactctctgtccttatcttctctcgtttttccttatatcccattggactcccgacaaattaaattaaattgattcatgtctaaacgttgcaggctattctagcaacaatcgctgtgattctgggtgtatctaaaggagcagacgactggtgatggatcaatcatcttgtggggttactctaaaaatgtttgtataggtttctttatcgtgtgttgtattatctacttccttttttacttactctatgaagaaacaagaaaaaaaaaagtgtaaacttcacaagaattatttgagttttgttatctaaataagaagaagtcaaagatatgaaatttaagacagagagacaaaatgtgatgagattgaagatggtttttacatcaggaaacttacaaaatgaaatgaaactatctttttgcagaaacagttgtattgttgtgcatcctcaataagtcatcaggggttacaagaaaccaaccgccatctttctgagccaacagcttctggttcactgagtctataatgacactcacattcccaaacccatatatctgaagaccattgtgcattctattcggtttaggtttgaacagcaactcctgctcttgcgcaaatacttccaagacttctttcaaactcaacacttcagtgctatccatctgagccttggcctgagcttgagcctgagccggcacggactgtgtacgctcatttgcctttgctcttggctgagacacttcaactccttcaacagcttccatcaacatatctaaaccacgctttaactgaattcggatcctctcatttgctgtaagctcttgcgggaataactctttccaaccataataccatccctggatctcttcgaaccttggtttagcacgcaaccaatggtacaacacatccagccatttggggaagaagaacctctccatcatatcagccattagatgtatgggtactgcagatgcccacttcataacccaatcaaaccgttctaaattctggtttgccgggtttacctgaaactcttgcaaagccagctgaagtttcggaactatgtaacgtcgcataagctgttcccagcttgtagtatcaaaaacggtcttccatggtgaaagaatagtgtaggcagatgaatcactgggatgccaagcatcaagaacattactcaatttcatctgaatgatctgataaagaaactccaacttctgaccaagtataggcaaccaaggatgcacccaaacatggatggcaacaagttcccttcgtggatcccaatattcaacagcagttgacaactttggtagcactactgtgtccaaaatcgtttgcaatacagatgaaggcagcaaagtttcccatgtctctaaaaatctaagcatcggctcagggtctctgggttcccaggtattaatgcctgctattcgaacagcaggtaacactacctccgagactagttggctataaggcgttgagactacccagatattatgatcttcctcgacttccaaaagctttctccaagaagatatagccttgagaccatgcactgcatcactaagagggtcccaaccctgaaacattctgataaagagaggcaaggccagtgagcaagcaatggtggacaagctacaaagcttataatcatcaggatagcttgtttgcaggtcctcgaaacgaatagcaagtgagtccagcgtcaaattcccagatgtattctcaagctcgattcgacttatttcatctgcgatatattccatgttttccaagtgtcttttttgtttctcttcctcatttataagcatctccttctcctgctgtaagctcaaggctgattctctctcgttcctcaagtccctatcaatcttttgaatttcatgctcaactagatcaacaatcaagcgcaagttgtgttgcaactccggcattggaacatctgcttcttttgctttctcctctgcatctaaattttccaaatttgtcacaacccgaacttgtggtcctcgcatatcaataatggtctgcccaccaccaaaccccgcttcctgcttcttttccaacaactcctctgcagtgacataaactgccttcctcaccttcttctttttccaaagatttttccctcctctatcaccatggctctgttcattctcactgacactgactccaataatcttcttctcttcaaccttctttaaatcgggtaactttgcctccttgaaatcattataccccatacccatattcttcggcctcaactgcgcttcaataggagctacaataccttgctggttcttcccaagcccacctcccttgtaccccatcttttcaagcagcttcataccaattcctttagtagacttctcaaactgacctatatcactgcctaaagtattcttctttcctccctttgcaccaccaccctcttgacctctcttctccacctttgccttccctctcatctttgcccgatcagctatcttcttccccaatgcacccggtaaaagattgtcctcatcatcaaaaccattcgcattaaaccctaaccctaaacctgagctaccaatacccaatccacctctaacttcaacatcctcatcaatcatatcattatcttcgattttatccctatctttctcatcattatgttctctagaatccttatcaatctcttgattcggcataaccgtacctgtagatacaaaattgacaggcttggttaagtctgctttccttcccgaatcacgatccttacgcctcttcctacgactgccgccgccgccagaatcatcggaatccgaatcgctctcagcgaagattccataagtagcgtcgtttttggtttgtttccgtttctccttcctcttctggtatacgaactcgtcaccttcccatcgacctccttcgtagtcattatccatactgaatctctccatatcttgatactcatccatggcgaagaaactagatctgaaactctgcgaattttccaaactatcggaggtttttggatttacgactgcaaatcgccgacgtcgccgtgtataatcggagggaaaggattaaccgacttgggctttataaataataaaggcccatttatttttgaattatagcccatttatttgtaaacttggctataacaatcagtcacctcatcttcttcattttggactcttggccaaccttatgtcgttttatcgcatctgttacaataaaacgcaaaaggtgatttttttttcaggtaaaaactatgagtttcgttatctaaccataactcaatagatactacgataactaaactaattaaaagggataaaataaacaaaaacacagttttggaaaagaaaacaaaatagaacccaccaaaacagatatagtaggttagaagtataacttataaggttaaccaaattgctcattataaccaaaaacaaaaaattgtgaacccaaaaattacgttaagaaaacgtagattccattatatcatggagttttgagtcttcaatccacatactttcgaaagtaacaaatttttccattaattctactaagatttttagggtgttgtttttgatgttttaagtttttcttattttttgtcttaatttctcctcctcctatctctcttattccaatttcataattatatatttttgcatgactagattattagaaaaaattgtttctgttttatgttatatataattaatctttctctttctgataaaatcataaaagtcaataattttttggtttaaacagtaatataaagtcatgagattttaggaacactttgttttctctaactaaccaacttttcattttgcaacatagaatagaagcattaatatattctttctggaataaatacaacaaaatccccttatttcttgtacaaatcgcataaatatgggatttgaagagtacaacaacacataaagaaacgtcccacctttttagatgttataacaaagaaaagtcggttgtatgactcggacttttctagttggtttttcaaaaatgttacgtaggttttgacgtcatatctcattatttgaaactattttccttggaatggttcactaatagctaaatgtaccattcttgttacattttttaaattagcagctaaaagtgtatacaaacttttatatatgtcgtcatttaattgcacacattggttatacaatgcaaattatttccttaaccatgtctagacttttttacttctatcaatttaattatatacttttcgtatctttatgtacataaaataagtttcaggtagtaatatcagcaaaaaataaggacttaaatgaatacgtctgataaataacttacgggatatgttatagcttcgcgacaaaaaaaaaatcctcgaagcctatagtctattaattacttgttgaacaaaacaattagtacgtactagctaatgaaataagcttacgttacaaattagtataataataaaccaacaacgcccgtagccgttaggtctattttgtcctaggtggaaaatttagtaaatgcctaatgaccctagtctacgcgtaattgcatttatatgaattattaaacttcaaaattaattgatatggttggacgaacattatcttatgaattattattatatcatatatcacatgcgtttcgcaagagagttgacattgctattcatcgtctccaaagaacaacgccacctggttccatatttattgtccccaatttaaatttaatttaatcgtgatcattgtcttagttacataaatgttaaggttgatttcgagttatacgtcaattattcaatggaaacttgtttaattatataagttgagacgaactctcctttctctacctgtttaaagataactacgatacgaagacgcaaacaaaaaaatgcgtaagaaagtaattatggaagcatcatgatcagcatatacgtactagtagatatatgtatatataaaaagataaaatactaaatactctcatgcaataaagccacatgcatgtagcgtaagggaaggaagacaaaattaaatttttggaaataaacaccaaagaacttgttgttataaattcattgccagttgcacatacagcgatttattacatatatatcccctctctctctctctctatagtctctctataaacaagttttttatcacatttcttttctacagtattttctctattcacgcatatatatagatatccagctgcctccaacatatatagtcaactgatgaaattataagcatcatcattatagttttgtctcctttttttcttcttcttttctttttctttctagctactctcttcttcatagctagatcaagatgttagagatcattacggtaagaaaagtgttcttgatcggattcttgatcttgatactgaattgggtatggagagctgtgaattgggtttggttaaggccaaagagactggagaaatatctgaagaaacaaggattctctgggaattcttatagaattttaatgggagatatgagagagagtaatcagatggatcaagttgctcactctcttcctcttcctctcgacgccgattttctccctcgcatgatgccttttctccaccacactgttctaaaacatggtatgatcccatcaacctcaacttaaattgtatatcaattgttttaattatggggttatttaattacttgaaagaaatgtgaatctatataagaaccaattatatatacttgacatatcttgggttagattcataacgattatttataattttgactaggagtaggtcatcttcttccatcatgacttttttttttttttatcattttcaaaaagtataatatatgaacagagaaattcagagttaagaaataaaaggagtttaatgtgtatacagattatagaatgatacacattttcataattaagatctaaatctgataccctttgtttccctggttttgtctaaatctagttcaatatacatatgattgttgtatgtgctttgttttgtttcatttgtgaatttggtaatttaaaagtaacaaatggtaataattaatgaatatatgtttgaatagggaagaagtgtttcacatggtacggaccgtacccgaacgtgatagtaatggatccagagacactccgagagattatgtcaaaacacgaactctttccaaaaccaaagatcgggtcacataatcatgttttcctaagtggtcttctcaatcacgaaggtcctaaatggtccaagcatcgaagcattcttaatcctgcttttcgtattgataatttgaaggtatgtttttcttttaccaaaaaagaagaagagaatatatagaatgctcattttgactctaataattatattttgttttttttataattgatttttaactctgacataatgtgaactttgtggacgtcattttcgtctcattctttagattttggtcagtttcattctctctttactttttttcgaaaaaagtcagataaagtaacgtctttcctcttgtttcttagctcagagatttaaacaataattatattaaaaaaaaaatcatgtattaactatttaaaaaaaataaaaaaatcaagatataacagaaaagaaaaaaaaaatctcttaaacaaaaaaatattaaatatcccggaaagaacataaagaaatacctaaaaaaggtatttatagaaaaagaagaaacggagaaaaaaaaaagtcagcaaagaactaaagaatccacgccacgccaccaagtcacccaacttaaaagtctaaaagcaaaaaaaacagaaaaagccaaaaaggcacattacaagaaggtgaaaatgaaatcatcatatttcaactcaagaatttctaaaataccaaatttatttcgacaaaaagaatttatcatttcattatcagtgtagaaacctcacatatgcagagcactcatcatctttaacaaaaacattatgagcaaataagtagcaataaataatatacaaaatgtaagcttctttaaagacccatttctgtgattttttttggtgtgaaatttggtagtgattttgaaatggtataaatgaacagagcatactaccagcatttaactcgagttgcaaagaaatgttagaagaatgggagagattagcctcagcaaaaggaacaatggaacttgattcatggactcactgtcatgacttaaccagaaacatgcttgctcgtgcttcttttggtgattcctacaaagatggtatcaagatcttcgaaatccaacaagaacagattgatcttggtctccttgctattcgagccgtctacattcctggctcaaagtaaagaaattgtctaaaatcaactgcgtttaattaaaaaagtcggaagctagttttgctgattcagtttttctatgtgcaggtttttgccaacaaagttcaacaggaggttgagagaaaccgaaagggacatgagggctatgtttaaagcgatgattgagacaaaagaggaggagataaaaagaggaagaggtaccgacaaaaacagcgactgttgttctcgatgttggcttcgaatacaaaaaccatcaaagaacaaggaccagattcagggctgagtcttgatgatctgatagatgactgcaaggctttctatctagctggtcaaaatgtgacttcttcattgtttgtttggacacttgttgctctaagccaacatcaagattggcaaaacaaagcaagagacgagatttctcaggccttcggtaacaacgaacccgatttcgaagggctaagccacctgaaagtcgtaagtatacattttcaaaagtgactaaaccacattataactaaaaaaagggttgttttttttaacaacttctttggttattatcattaggtaacaatgatcctccatgaagttctacgactctattcaccagcttacttcacatgtcggataactaaacaagaagtgaagctagagagattctctttacctgaaggagttgtagtaacaataccaatgctcttggtgcaccatgattctgatctttggggagacgatgtgaaagagtttaagcccgagagattcgccaatggcgtggcgggtgcaaccaaaggaagactctccttcttgccatttagctcgggccctcggacttgtatcggtcagaacttttcgatgttgcaagctaaactcttcttggcaatggtacttcaaaggttcagtgttgaactctctccatcgtatactcatgctcctttcccagctgcaactacatttccacaacatggagctcatttgatcatccgaaaactgtaggaggtagaagaatgaggaaaaaaatgtaaaggtgcttcctttttttttgttcatcaacaaaacagaaccttgaaggtgtgtagtggtaaatgcagtttgaatccggtcaagaaatcttatttgggtgtttttgtatatatgaaacaaattaaaatctagaaatttcataagatttttttattttcatagcatatttttcaccaccacctgatttagtttatgtgtttaacataatgagtttcatttgtatattttaattccactttagtcatcacacacataagagaggcttttcttatttgtttgcctaatttcaacttcactacaaaaaaatcttgtgccatgttaaaagaaaatgccacgtgaaatagtaatcttatatatgttgaatctcgacaaaatgattaagaaaacatgcttttagctcatttactaatttagtctaatacatgaggcaatgaatcaaagaagataaacaataattataacaaaaaaagaatcaaagaagatagaaaagaacagatggttgaagagacgcatcaagatcagctgtttttgcatttatatttctaatttgtttgttttgtttaggtaattcggtccagacaaacattctcgaattgaaaccacaaatttattaatttattcggttccagaaaattttatgtttcattttgagttagttaaagaatctcaatcaaaaccaaacttaaatccaactaaatagcaagcttataaatattaccattttttgtcccaaaaataaataaatcaatatgaccatttacaaaacttcgatttaatttttttactgtttatgtgaaatttgttgttttcacttttcaataccaagatgtatagaattttaacacagatcaatttatatttgggtctagtaccattcacaagtatctaaaaaattgagttacttttattttgcaataataagcatgaatttttgtttattactccattatgacatacagtaaaaaaaaaaatctgtgtttgaagttttgaacaagtaaagagtgttgttacagtttcctctgccaaataccctttgaaactaatcaatcctttcaagattaaacattaccatatcctcaagagccgatctgaaaccactcctaggaagacaattcaaattctttaacgcaagttcagctttctcctttgctaattcttgagctttcttgatcccaccgcgatttctaactatttcaatcgcttcttcaagcgatccaggctcacaaaactcagactcaatgatctctcttagccttggctcattctctagcgcgaagatcactggcgccgttatgttacctttggctaggtcattagctgcaggcttacctaactgctctgtggactgagtgaagtccagaatgtcatcaactacttgaaaagataaaccgagattcttcccgaactgatacatttgctctgcgaccttgctttcgactttactgaaaattgctgctcctttggtgcttgcagctactaatgaagctgtcttgtagtaactctttagcatgtagtcatcaagcttgacatcacaatcgaataaactcgatgcttgctttatctcaccgcttgcaaaatctttgatcacctgcaaaaagataaatcaagattcagaccaaatgttctttgtattgagtagcttcatctaatctcagaaaggaatattacctgacttatgagcttaatgacttcaaggttttcgagatttgctaagtaccatgatgcttgagcaaacatgaaatccccagctaatacagctactcttgttccgaatagctcgtgaaccgtttcccttcctaacaaacacagagagaaagcttaaacactttgcagagaaaatgcatactccgatcaaaagaatggaacttttgtcttacctcttcgcatatcactttcgtctaacacatcatcgtgtatcaaacttgcggtgtgaatcatctcaatgatctcacctaaacgccgatgttctactgtaagttccctgcaccaagatcagctataaaccatcatttttatttctaaagattatgagcagtttcgcggtcaaagatgtaatgacagttatatatagattactttaagcctgctaattccgcagtggctcgtgatacaaggaataccaaacccggtctcatcctcttgccaccagcgctgaagatttgctcagcagcagatatcaaaaccggattttctgcaccaacaatctataaaagaagagaatttacataagaaacataaccctctatcaagagaccagaaaagaaatggtggcgaggtactaaccgataaaagattgtcgttcaacctctgcaaatcatcagctacgacctcaaacagagtttccaaagatattggctttcgtgactcttgcctcagattgagcatcactgtttgatcttgaccaatacctacacaatcatcaatattcaaaaccctgaagaaaagtcttaaatgtataagcttttgacttctcataaattatctcagcttataagactctttgcctcaaccaaaactaaagatttctatttccatagcaaacattcaaaaagctcgaaactttaattcatgagactctctgtctcatgagctcaaaactgaactgttataagactaaaactatgcaccaaaaaggtgaagaccaatcaaacatgattcaattacttaaccaaccaaacctcaaaatcaaagaatctcaatcaatcacacaaccaaaatcagatagttctgctgaaaaattggttaccgttgaccagagaattctccttggatttagccggaacagctctgcaagtagccaaatctcgccggagaaataccaaatttccaacacagcttctgccaccaatcatacaaacggtcttcgaagaattgccaaacaagaatcgacgacttgttgaagaagagctacaagaatgatcaagaacactcgtacccaagtctatattccgacatgacatcatcatttctcagaccaaaatccacaagtgacgacaacttttaggcaaacccaaaccaaaaaaagacggctaataataagtttcagaaactgagagtccaaagagaagaatcttcggaaactgagagtccaatgttaagtttttttctttttggctgacgagagagagattgggtgtgtgtatggcaaattttcagaaaaataaaaaataaaaaagacaagaaatttataagtttgtgaatcgatccctttttttttttgtgttgattttctttgggtggacgagacaaaaccacatcagaagtaagaactcgctctcaaaactcgacctttggcggacgagagagatttcagatttgtgtgtgtgtgtgtgtgtccgttttcttttttaattcaatatacaaattagagagagagggaaaaaaaagtccatcgttgtaatcagaagctgaaatgtcaccacgtgtttcctaccgattggtccgtcatctaactcgtatcaaatattttgagattagagaatatccatttttctggtttcaagacaattataatatcattaatccagatctcacaaattttatactaataagttttttacctacaataattaggctctagggagtattttaaaaacaaatcatcaaattacgtgaaaccatgattttttatattgataattcatttctccaactccattgtgaatcaaaataatactgttatgacttaatttacaatttctgtatattattctcattccatgtattaccaatcacaataagtcatcatatatgagaagattaacaaaaatggttgaataaattttctaagagcttttaaatttaattagtacataacaaaacaaaaatatgaaagaaaaacattaccataattattttatttatttcttggtaaaaaaaacattaccataattaacctctaataagggattagggaccaagcaaatatgtagttggaacataaatgggccacacaaatataaaaactgagcagaagaagcaaaaatcgcaactcctttctttcttgtcggtaattgattttagataaacaaatatacttaagtcttacaataaaaatcctttccacctaatttaaatcactgagctttacaaaagttagtatcagttaatacttagacttagcaaatctatctgtacaataaacctcaataacagtcgatgcttctctactttgttgagttgagtctgttgattagattcagatgcctcttataatcctgaaaaatgcaacaaaaaccaaaataaataaaataagcaatttaagatcttcaatttgatctctctttgcttcaacaaaaactaaattttttcacttcctcactcaccttccaagccgagatagctcaggttccgccaaaagcatatcttgcaactgttttgcatctgtatacctttcactagaactaaaaacaaaaacaattgtcacaagacagacactgaggggaaaaaaaaaggagataaagaggtttacttactcgcagatgtggttgattgtgagtaatctatgatgaataactaaatcatggccgacataagtcacaaccacggaaccagcgtcaggatgtggccagcttcttgaagtagggaacctgagaatgaaagtgcccggtacttgattctgaagcgaacgttctgcctcttctttagtcacaaacccttctatccatttaggcgaagcagagcgccacattccattaatcaacccccttgatacagccgaagcaacagggaacaaccaacaccacattgtctcaaaattctcttgagttatgtattcatagcatccacatatccttcttagaaggtcaaaatcctgattacaatttcatgtcagaatcacaaatacaaaagatcaagactttgatcttggtgaaagttcaagcaatatgagaagagaaagagacaagacctggtgagtgagagatctactgctgcatttagctattctcatgaaatgttcttcaatctcaattaccacattgtcccaatgaacatgtcgatagttccgagagatcagattccacgcatttgttccttctgctatcagttttcttgccattttgatttgatagctggaaaatttggaagattagtgttctattttatttgaggcaggtgtgagtttaatttgatttctttacccgtggtgggagcatccggaatagagagaaacttgatctgcaaattccgagacttcttcgtctgatgaattgtttgtgatttccttcagaagaagagctctctctgttaagtttccaaggcagtatttgaaaataatccagtctgggattgaatatctcctgaaagcagtcgagtctctcatttcagtgttttcggaatcagttgaagagttatcttcttcgtggttctgaggcctccattccatactcgtaccatttccattcacaatctaactcgagagcaacaacaatgcagaataacagtaagtgggatatggatacaaagcaaaacaaaacgtaactcagagaaattggattatccaccttactctcagaaaccttttcttctcctaatctgatccgtttcatagaggaaacagaatcacggtttctcgaaatgcaacggatttggttggtgacagtttcgaggaaaggataattggccttcacttctggtatttcgaatttgatgcagaacaacctcttatcactcttggaagaaagctacaaaacaaaagaaaacaaggatccttcaatgccttttagcatagacaaaaaaattctaacaagaatgtgaaatcccattccgatggcctagatttataatcaccacctgagataatttgaacttgaaagaagcacatccgttcaataagttgcacggtttatcttcagcagataattcaatgccttcatagcttactaaaaggaatgcctcaaagtcactcctcttctcaacatgcgtcccactatcagcatacagtagagaagccacaacctgcaacatcaaatcgataacgcgctatcagaaatacttcctgagctaaacaaatgcagaaatttttagaaagcataagagtatgaaccttcacatccttgtgcacaggctgtccaatagcattggttaaaacaacatccaaggaacaaaatgttccactaacgacactccaaacaccatcttcatccaattcaattccagatgtagatggcttatcaacagataaccataaaggtgggtcctggaaaagaaatgaagcgaaataaagaaacacaggacaagagtcttttgttgaaaaagaagagaaggcaaagacaagaaactacctttgtgtagtgataacttgcagagagattagaaggcaaaacttctgcactgtggatgaaaccctgaacactataaccatctccaccaacactaaataacgatatctttcgtgcgcaatctgaatttgtaccattggtcatcaaggaagttaagacttgctctcctacaagctctccacaaatataaaggcgcatatagtttctagaaacctaggagacaacagaaatcagtaaatccgaagaaaagagatattggtcaaattaataagagtcctcagagatcttataattactacctcacaacccacatgaacccatttttgaagaggaaacttagccgttgtagaaacattaggaacttcagtccaagaagaagtgttaacaggatcaggagcttccctgtgaaggagagtcaatggcaaaagcatcatcttcttgttttcatctagaacaaggaaaggtgcactaacactcatgtcagagtgaacctgagaagaaagccactatttaatcagaagctggttgttacagtttaaaactcataaatcaacaatggttatactaaaaaaaaaaaaatcaaagaagcgacacaaagtttgaaccttttcccccaattcgcaaaacaagttaatctcacaagacatggatatatgaaaacgattataacacagaaggcaacagatggacatttctgagaactcacctgtctgataattgcagaagggtatgtggtggaatctaagagataaacccaaaaacaaagtgagaaagtctcaaatgctttgttttcgacttcaacatcgacattaaaatcctccagcagagagtatttctcggtgtcaatcgcacaatcacccgccattataacacacccagataaaaagctctcgactttgcaagcgaaacccttaaaacccagaaaatgaaaatacacacagatgaagaaaaaaaaagtaaaacctttttcgtttgtctcgcttttttctcgttacctaaacaaacacaatcgagagcttaaaggaaactgaaaagaaacgctgaggaatttttcgtcacgtcttttgacggctgttaattaacggttcgtaccgtcgtcttccggtggtttcagtctatactctatagggacgatcagcaaacaatctactgcctcgcgaccacgaaactaaactaaattagccaatcataattatttgatctattgactggtcttgactaccattttttttttctttggataaaatctgcagttagctggttaacaaattcgttttgatttcgattttacagaaaatgaaaaatgtttataattttattttaatttgatgaaactatggtttatattatttagtctagatttggtttcatattaattaagaaaatttataacattaaaataaaacgaatttattcggttacctaaaactcgattttgttttggatttatattatcaaaacccgtcggtttatagaagaatttcaattgtgttttaggctttcgagatggtttggtttagcagcttataacagaatcttattattccacttaaatatcggcatttggtataacaatgtcgaaatcagttacagtccattcagcaatttgattcttactcatatatatttcagttcctaaatctatcgacgaccaatgtctctccaccggtttcgtccctggatcctgcattttttaacatgttcgaaattttaatactcttttcgtgataatgtaaatgcagatatatatatatataaaggaggagtacaaaaaatacctggtaaaagaagagtgactgagagagttttccgacatcaagttcccaagttcttggatctccaatccaaccttgtcctttctttgtcggatacccaaactgttcccacactggatgaggcaagatctgcagaatctcctgcggttgtggattactgtacggatcacaaacctcgtacggagattccgcaaaacgcgcgtttcccggaacgcagtaatagtgatacgcttcgaaagggaacttctccttgtccgtcctgtgaactttagtcccgtttggaaaagtatgctctggcggacaagcgcctaggcggttgcgggtgcaaacggcggttgcccccgggttgattatcatttcgctgtaccttgtaacgtcggttgtgacgtcgccgtcgcagtctcttccgtcgtttttccagcaacttcccatgtccattaggtaaaattggctccctgaaccgcctcctttaataatctctagcttgaattttactttaaaatctggcgattttagcgtcttgtgcgtcatgaaagatcattgaaaacagagtatgttagtcccaaatcgctgaaaatggttattttctgcgtatgcgtttcagaaacagagtaaaaccggttttggttgctaaaatgcggattagaaacttaccatcttcatcatccctctagtgtcgtaatgataaccaccagagaaacctcgagaagcatcagcgcgtagataaagcatcaaccatggatacttagaagaagtcttcaacaaatgatgaaaaacccaactctcatttcccccaatcttcttctcccatttcaccttataatacgaattattaccaaccggatctttttggtcgttatccaagtcccaagtcccataaaaactcccactcatatgtccttcttcgttatcaaccaagcttgtgtactcatgatgcatcgatggcatgttcatacatcctttcccaaaacatggaaacctccccgtaggaggaaatggtttcgcctttttcccgttttcgggacaaattgcggctaaagtatccgtattaccgttctttagcattatcatccaaaactgccatggatttggcttgtccacaacttgacatttgtttcctaagtatacctccttttgcgctgcgtagatatctgcgttgtctccagcgcttattcctccgtaggttccatttcctaccccaagcctgttgtctctttcgtcgactttgtggattatcttcactaaaaaagtcccatgaacacaataaatcagtttcagtttgaggtttaatgtctctgtttcgtttgcctgtcccggaaggtaacaactttaagaaaatgttttgaaataagtatgaagtttgtttttctatatgttagcgtaaatgcggaattaaggcctaaaacagagaagtaagaacataacaacattatgattttaccgggaaagctagagttatcgatatcgaagcaatctgccattcgagggcttcccatgtttgtagcttcttcaccgacctcgttgcattggttccaagcttctatagccacccttaagttatcgtttctcatcccgggatctcccacagctgatacataattgatatttgttctctctgtaaagtctgatcgaacaaaggaatatgaaagacaagaaagtataatcacgagtctcttgatgagtctgcatgatccattgatacttttctccattccagagctcaaaatctaaaaaagatttctttctttataatatatttggcttcatatggtattgtatatatatgaaaatccacatgcgagctaattgatcccaagcaaatctataaattaattattttttttgtcaacagattgtttctttttaaaaaattgtggaagctaattaaccataatttttattctatgttattgttgtttgtccatttttagggaaatacatgtttaagaataaaatcgacattcgttactgttgctgttatccacaagattgagcaagaggttggtaatacgttaagtgcaatgtatgtcttacgtttgaggtttcttaacttatctaaaatatcttgtacgtgagcaagtcttttctcacagcgcacgctaacaacacaaaagttactaaatttaggagtcgaaaattaaaattggattttgcgacaaaccatagacttctaagataacagagtatgtgaatcatgtgatcatattattaggtatatctttgagcaacaacgaacgtgtcaagaaactttaacaaacttattgtccttttttttgctaagaacaaacttattgtcttattgtagcaatacgtagaagcattctctacaggagatttttgtctttaacgaaatgaagcaaatagagagacaatgaagataagattatagagattgttttattgcataaatcaagaaaacagagaaacagagtagtgggcgacaaggcattgctctctttagattctcaaagcatctagataagcttttccgtcgagagtacgagagaacaaaccatcgttatactctttcatggtcagccttttgaatcttgcaaccttttgtctttcaactaggctttttgcaggaccaacttctttatacattcccacattgtgaaacgttgcaatagagagcctctctttctctgaattcacaactccgcgatgctctatgcttcggtatgtcccattagttatgatctacattaagcccaaacaaacgtcatgatgaaattacaatgatctattaccctatgtatttgattaaactttacctctaagacgtctccaatattgacaatgaaagcatttgggaggggtttaacaggaacccatttcccatctttcttgatttggagaccttcaacgtcattcacttgcatcagtacagtgagtccgaccgaatcagaatgcggggttagaccaataacctgatctggttgtgggcatggtgggtagtaattcatcctcatactttgaaccgaatcaacatcatcaaacaacttttccagttcctctggtttgatctctagggctcttgccattttcgctattaagatcttagctacgctctgcacttcagaagaatacatctccagtgtatctctacagaaacataaaaccaatattatacagagcaatactttgtggagctagttgataaaatgttgaattagaacaaaacctaaagggaagaggtagcttggggaacaagtgaggcttgcgtaattcaactggttgcacggtatggaagaacaagtctgcccaatctagtttctgatcttctgaaaccacaaaagcttgtccgaaaccttctatctcatctggtcgctgccagaacttcttcttttcttccatgggaaggttgaagaaatcttgaatctctgactttactttgtccaagaaacttgagtctattccatggtttacaagctgtggataaccataagtcataaccattaaccaaaataataacatttgaaacatagagtgttcggctccaatttgtgtttaacatggtaaaaaaaacagaggttgttttgtaagaaacgattttatctgcctattttcctcaatcaaaaatagtaaaaactaatataagctccatgtgacgtatattatgttaataaagaaagacgcgatgggctgctttatagaagagttatatttgtagttggagaatttacctggaaaaatccccactctttgcaagcgaagtcgagtttctcaacctcagaatccatggtggttgaagaacacaaacgcttcatatcgatgattgggatctcaattttcacatcaaaatcatcatcgacttcagttttgtcttgatcagaccggacgtacctaggaggaacggtcgtgatcgtcttctccttaaccatctcttgaacggatggaactaggatagagctccactgtgctgccccttttgcttccatgtcggcttctttcctggacgaaacaaaagtttggacacggttcttttgtaggtggtattaaaaacgtatacgtatttttcctaaatgattgattggattgacttaaatagttgaagaaaatgattgatttaaactgactgatggaagaaaatataaataaaggacagatgataaaagacatatggtatgagtatgaccccagacccaaagtaggtaaattgatacatgatactttgaatggttgtagattttgatgttgtttttggttttagtttttctaaaaatctactttataccgaaccaagattgtgaaaaagtgtgttttctaaaaaataggaaacctagattttgatagttttgtcaaattttaaagaaaatctaaaatttatgttttattggtttttaattttcttaaagtgacttgactttttataaaaccttttttagtttttcattttttttaatacacaatctgaaaactataaaccaaaatccaaaaatcactttttggtttttggtttttttaccaaccccttatatatcgttcaaatttacctcgacatatatatatatatatatatatatatatatatgtgtcgttatatatatatataatatatatatctttgtatatacatttataataatatattgcattgtacaatttttttttccgttaaatcaaagaaatatttatcccaacgttcatgtgtctttaacattgggattgtgaatggtgtgacggtgtaaaaacggccggaaagcgaaacggacacacatgtgttgtcattcatgatgtttataaaaagaataaaaaataaagggcatatcgaaatatataacaaagagaaaagaaaaacaagaactgtatgtgtctaaataaataaggtgtggtattactacgtagttgatatttttgtatgttgacgaagacgaacgagcttattaagtattattcacaggcgtttttttctttaacagatttgaaccaaagacataagagagaaggaaaaacagaatatgaacacgacagtgaccagttggagaaaacagaatttcttgggaaacaagatatcacttcccttcaattctcatagcatcaagataagcctttcctttgagttcacgggaaaacaagccattcaagtagtctttagttttcaggcttctaaactttgcagcctcttgtctttgaacaaggcttctcgccggaccaatttctttatccattcccgtgttgtgaaatgtcgcaatggagagcctctctttctccaagttcaccattgcccggtgctcgatgcttcggtatgtcccgttcgttatgatctgcattacaaacggcccaacacccatcatcaaaatatttatgactagcgattagctgccataaagtctatcagggtttagcccgaccaaattcatcaaaacatctatatagtatggcttacctctaacacgtccccaacattgacaatgaaagcattttggagaggtttgacaaaaaaccacttgccatttttcttgatttggagaccgtcaacttcattcacctgcaaaagtatggtgagcccgactgcatcggaatgcggaattagacccgtaaccagattaggttgtggacacgggggatagtagttcatcctcatactctgcatcatatcatcaccaaatatttcttctacctcctctggcttgatctgcaaggctttcgccattttcgctagtaagatcttagctatactctttactcgagtggaatacatatctaacgtatccctgaaaaacattaaccaaaatgtaaatagagagactttgtggtgttagttgagaatgttaacacttttttttatgcatgcaaaacctaaagggaagaggtagcttggggaacaagtgacgcttgcgtaattgaacaggttgcattataaggaagaataaatctgcccagtcgagtttctgatcttctgaaaccacaaaagcttgtccaaacccttccatcaccgctggtgtctgccacaacttctttttttcttccatgggaaggttgaagaaatcttgaatctctgactttattttgtccaagaaacttgggtctattccatggtttacaagctgttaaggaccatacaaagacataaccaaataaataaatttgaaacggaaagttttaggctccattttggctttaacatagttgtaagaaacgattttttctgaataatttcatcaaacgtaatctatttaattctgatacttgcatggaaacaagggtaataagctccacgttaggtctaacatagataattttgtaaaaaaagtgaagtttgagattttgcctggaaaaatccatattctttgcaagcaaagtcgagtttctcaacctcagagtccacggcggtagaagaacacaaccgattcatgtcgatgatggggatctcggatatgaggccagaatcatggacgacgacttcagttttgtcttgatcataccgaacatatctgggaggaacggtcgtgatcatcttatccttcaccatctcctgaacagaaggaactaaaatagagctccacggggtttcttctttggcttccatgggggctttcttctccttggatgaaacaagaaaaaaaagagatgtaggcaaagctaaaagccaaatctaacctattatttgtgcatataatggatagaactacaattactgctcacactcacctataaagttcagtctaaagaagtagagaaagcggttcacgcaaatgaatttttgtttcattgttagattaatttgaaatttacttctaaatatatacttgtgattttagactctatataaatggtatcaggagaactcatattttcattatttttttttggagatcacaacaattttcattattttgtacactcaaccattaattattcattacacagacataaagttggattttattctaaagtaatttggctgctgaatccattaattagactaaagagcctgattcatctctagctttcatcatattaatttttcttgtggttaccatttggagtcgcatagatagattaagattaccaaagtgaaatgattagagagaatgatggaaaagcccctaggcggtgcgtgagagtgagccagccacataactaatggttctaaacaccgcaacgcggtaataaactctgtcaccacgttgagacccagtcatcgctcccatgtttgtcttcatgtgctaattttcatttttgagttgtattttagtgatctatattcattcttacagttttttttgtatcattttctttctttcttacaactatttttttaccctaaaatctacaaaatacgcatcaaatcaatatttgtttcattaaatattatttgctagctgataatattacatataacatttgttccacatttgatagataaaacctagatttttgtattatttgctgataatattagaaattcaagacctaataaggtttacatataacatgcatttcagagcagtggactcttttcttattatgaacaaaaaaaataaacaaaattaaacgaaagacttggtcaaagcaacttagtcaacatacttaaacgtttggcttcttgacacttgttgttgttgtatttgctactgcaagcttgtggagtaaattcacaacattgtgagatgagtcaacgacatagcgagcttttgtgcgagcttgtcctatggctgtagagaagtaattctcttgcttgaggtcaagaacgttcaatgaaaccttcttctctagggagtggttacttgaagaagacttcgatcttgtttcatgagataacttgggcgacaagatttctgattcgaagaatgtatagatgtcttcgtcctgcaacaaatattgacccatttgcatcagaaagccaaacagatcaaatctaaattctgattcagtaatgtaagctttaccttctccaagaagtaaccactgcaaaatacataatcaatcggtgtagtcatagcttttttgtgcactatttctcccaaaatatgaccaatttctggttcctaagtaacagagaaagatatagaaaccttttagaaacccgatttgcatcaagattcaatgtaatgtatatatcgaatattgcatagtgtagctcatatttctctgaatacttcaaaaaaaacaaaaaacgagaagctttgtttaccttagtcacaccaatggcatggacttcaacagaatattttcctcgaacaacttcagctgatgcattagagattggtcctgcccataagtattgtaacaagtctcttgcttgtgctctcccaaattcaacatcttacaaagagattgaaaaaaatggaaaatttaacaaaaagataaaagtgtatggaagacaacccaagaaactaatataaatcacctgcatattcgtaattccatacaagcgaagtcttgcttgcttcgaagaacgatcttggagttcgatcagtgaagtacttaaaaacattctacaatatacaaaataatcaaatccataatagatttcaggaaagttatagtggaaagattataagtttgtcttttttattactaaccttgagaccatcaacccaatcaaggttcatgttttgaggcatatttgtcacccattcttcagtagtatgctttaggaacattccattttccgcagccaaccatatcttatactctccaaagttctgatttttaagtaccaaatcagtgggaaaatagatatataattgtgtcacaataagtgaagataagaaaaatttgaccaaacaaaaaagtaaaaataagaaagacatattaatgatactttgtctaatatgtttttgccacttctactcaatacaactactgttgtttttggatcattgcataatgctttcagtgtttcttttagctctgggtttagttaaggtccatttccttactcagactattccttggctcagtgattgttccatagaaaccctgaaaacatatttgataagtgaataaacataattagtaaatacaaataagattaaaatctcccaatttagcttaattaccaagattatcagtctattgttcgacaacgaatatcgttgtatcacatcttgttgtggaagttcatgtggaattttcctaatttgcaactcggattcatcgaaagcgtcattgagttcactatatagagagagaagagaaacaaaatcttggcataaataagttcttacctaaagctagtattttgaagaaaatcaaaggtttcttcttctttggattacctcaagaaatcaaacccccatttttcagcagaatgagtttttacatacttaaaattaactctgtgtcttgtttctctttcctcatatggcatatttagagcttttttaattgcagaagaaacttctgtaacattccaaggattcacaagtagagctccagcaccaagagactgtccagcacctgcaaactgtatttacatgtaaaaatcatagctttaaaaacattaagatataaagcatttttttgattcaatactaacattaaagccaaatttatccatattacctcactgagaataagaacccctcttttggcctcttggcaagcaacaaattcatgactaacaagattcaatccgtctctcaaagatgttacaagcattacatctaaagcaaaaaaaaatgaaactcctcaaacaagttatataaagaaccaaaaccaaactaatgatcatcatgtgtagtagtgaaggaaattcattacctgaaatcgcataaagtgcgcataagtaattggagtcaacagaacaatcctgacatataatgagagaaaactctatcaagaaacaatgtggaaaatattaaattatgaaagcttgaatagatagagaaacaaaccatgtggtgaattggaagagaagagacagaaccaaaacgaccgtttatgcgtccaaccagtctatgaacttggtttttgagcttttgatctgtatatatataaaacacatcttataaaactgaagatcaatcttatagaaatatagaagcataatagaatataaaaaagcttttacattcagggacttcatttcttgttggtactgcaatttgcactagcacaattttatcgcgccaattaggattttcatccagaaatttctcaaatccaagatacttttgtggaatccctttgatcatatcaagacgatcaacacctaatatcacctgccaacaccaaaaagtatgatgtaaaaatcttttcttaggcatcaaattttaaagattataagaagaatgtgttaattacatatacctttttgccagaaaatctatctttaagctcattcatttgttgaattacttcagggagcttacatgtttttataaaccgatttggatatattcccatgggaagctgaaaatcctcagagatgaattattgttatgatgtgattccttaggttataaagaaacaaataatgtataagatttggatatgaagtcatacaacaaccactcgagtgactcttccttgatacacaactccttcatgtgttccttcaactccaagaattcgggtgcatgtattcacgaaatgtcttgcaaaatcatatgtgtgaaaactgaaaaaaaaaaagaccttatagaaattcaaaacctcttgaaatccaaataaaatgatacgtaaccatgtatggcatttttagagtttaaattccacctaattaaatcagctgcaagaaccgaacgaagaagctctgatcgtgagggcaatgttttataaatctcggaagaaggaaatggtgaatggagaaaccatccaactttgattttattgttgtactctttaagatattgaggaagaaacatgagatgataatcttggcaccaaacaatatctccatctttataattctcttttatgacatcaagaaacattcgatttgctttcttgtatgcatcatattgggtttcgaaagttttgattgtgtcatgatcatattcttgtggaagtcccatgtgatgaagaattggccacaatataccattgctataaccattgtagtattgatcaaaaacctcattaaggaatacagggatacacttctgcaagtagaaaagaatcaatcaaaaatgagaagaatgatctctattactattataatatatatacacatggacatgtttggatcaaattcgtaccatttcagccagagatttagagactgcatctttttcaacttcatcatacacatcaaatccaggccagccaatataatccatttggtatcaaactgatcggtgacaccaccttcaagagatcacagaaaatattgaacattatcacactatgttaatatatatctatatgtcttatgacttacctagaagattaaatttgccaccaggactcatttccagagaccaagaatgttccccggttctctttgcagaagctggaagccggttagccaccacaagcagtgtttgcctttcaccacatacattatcataacccatcaacttctttcaaaattcgtaagacacttatcaaattaactattgatctgcaaaactttgttttctgtatatattaaactataaatgacgtcaagaaacagagaaattcggaacttttggtgaagaaaaatattttggcgtgatttttattagttagattgaggcacaactctatatattaaactaaatattccaaattttaattttttacgatcatttaccataaatttttatttatcttggcaagtcttccaaaatgtcaataaatcttattattatttttgaatgtaatctcaataaatcttatatgtacatgtttatatttttatgctttggttttcacatgttaatttatcagttagattgatgcacaactctatatattaaactaaatattccaaatttttatttttaccatcaattagcaaaacaaaatatttatcttggcaagtcttccaacaataaatcttattattattttttgtaatgtcaataaatcttatatgtacatgtttctatttctatgctttggttttcactaattaatatctttaatatctacatattgtttgccttacattttgaattcaaatcttctttacttaaagaaatggtgaactttttatttaaatctatattttcacccagtggtccattaacaggtgtacctattagtgttttcttgtaaagttgtaactatctggcatcaatctataaaaacattttttttatattctcatatttccaagtttccaacactagctcatcaacatgtgtgtcttaatttcaatatggttttaaactctttgcaaaatatatgattttgcccaaaaaaaaaaagaaaaaaaaaagcaaaatataggattttaacccgattttaatcgatcaatagcttcataagtgagtttataaaagcatatgtgagtttatttacaaaattttcatactcatattttcaacaattacctaagtttatttatcaaagaaaaatcatactcatatttccaacaatttcctaactaacatatatagtatatatatatataatatctgtcttttttttattaaagatatagtcaatgtaagaaactgtttatatttggttgaaaattcttgttccagattttatagattaaaaatagatttatttattatctgctgataatattacaaatttacgacctcattaggtttaatggtttatacacaaagggttaaatccaagacctatatttttcgttacatgccgatttgcccagtgtctccaatttccactttccttcttctgacagaattgatccagcgtttcgaattttcatttgcatttgcatcgcgaggctcatatatttcgctatcagaaaatgagtcagtcattgttgtatctgcaacaactgcaagcttgtggagcaaatctacaacaccgtgagctgagtctatgacatagcgagcttttgtgcgagcttgtccaatggctgcagagaagtaattctctttcttgaggtcgagaccgttcggtgacttggacgacaagatttttgattcgaagaatgtgtaaatgtcttcgtcctgcaacatatatagacccatttgcataataaaaaaaaaagccaaacggataaaatctataagtctgattagtatacgtaataatatattctttaccttctccaagaagtaaccactacaaaagacaaaatcaatcggtgtggtcatagattttctgtgcactatttctcccaaaatacgaccaattgctgccccctaagaaacaatgaaagaatatacaaggcttgaaataacaatttcagtaaatatatatatcgagttttgcatatataagaagaaaataagaaatgatcagaagcatttaatttaccttagtctcaccaatggcatggacttcaacagaatggtttcctcgaacaacatcaactgatgcattagagattggtcctgcccataggtattgtaacaagtctcttgcttgtgctctcccaaattcaacatcttacaaaaagagtcaagaaaatggaaattttaacaaaaagataaaagtgtctggaattcaagaaactaatccaaatcacctgcatattcataattccatacgagcgaagtctcgcttgcttcgaagtacgatcttggagttcgatcagtgaaatacttaaaaacattctacgttatacaaaacaatcaaatccataaaagatataaaggaaagattaacaagtttgtctagtttttacagaaattactaacctttacaccatcgacccaatcaaggttcacgttttgaggcatatttgtcacccattctccagttgtctgcttttcgaacattccattttccgcagccagccatatattagactctccaaaattctgaattttaagtaccagcacatgagttacaaaatagatgtataaatcttatataataaagacactgatgataccttgtttaatatgtttttgccacttctactcaatacaactactgttgtttttggatcattgcacaatgctttcagtgttccttttagctctgggtttagtttaagatccatttccttagttccactattcattggctctgcgagtgttccaaagaaaccctgaaacatatttgaaattgtttattaattaaaatttagtaaacatgcaaaaacataaaagtctagataagattcagaaagtctcccaagctagctagcttaattaccaatattattagtctattgttagattgcgaatattgttgaatcacatcttgttctggaagttgaagtgggattttcctcatttgcatctcggattcaggaataatgccattgagttcactacgtagagattaaaaacaaaacttggcataaatgagctcttacttaagagacttaaatgttttgaagaaaataaaaggtttacctcatgaaatctaatccccatttttcagcagaatgagtacacacatactgaaaattagatctgtgtcttgtttctctttcttcagctggcatatttagagcttctttaatggcagaagaaacttctgtaacatcccaaggattcacaataagagctccaacaccaagagactggccagcacctgcaaactgtataattacatatgtaaagtcaataacctaaattatcattataaaatgttatgttaagttgttaacataaaaaaaatgcaattgtttttgttacctcactgagaacaagaaccccctttttggcttcttgacaagcaacaaattcataactaacaagattcattccatctctcaaagatgttacaagcattacatctaaagtagagaaaaaaaaagatcatcatcatcaaacaagttatagaaagaactataaccaactcactaatcatcatatgtaatgaaggaaattagttacctgcaattgcgtatattgcacataagtagttgaagtcaacagaacaatcctagcagagaagatgagggaaaaatctatcaagaaactatgaagatagtatatttaacttatgacaacatgagttatatagatagagaaatcaaacaaaccagatgatggattggaagagaagagacagaaccaaaacgaccgtttatgcgaccaacgagtccatggacttggcttttgagctttcgatctgtatgcaaacacaatctcataaaactgatgataaatcctatataaaataagaagcataagagtatataaagtttttttacattcagggacatcatttcttgttggcactgcaatttgcactagcacaactttatcacgccaatatggattttcttctagaaacttctcaaatgcaagatacttttgtgggatccctttgatcatatcaagacgatcaacacctaatatcacctgtcaacaccaaaaaatatcatgtaaaaatatcttctttttaactaagcatcaaactaaaaggttgtgagagaaatgttggtacctttttgccagcaaacttctcttgaagctcattcatttgctgtgtgacttcagggagcttacatgttcttataaaccgatcaggatctattccaatgggaaactgaaaataaaaaacagagaaatatttgtggttattatataatgatttaggttacagagaaatgttaagctaagatgttgaagtcatacaacagctactcgagtgactctgccttgatacacaactccttcatgtgttccttcaactccaagaattc

SEQ ID NO: 46 - DNA, 103192 bp, Arabidopsis thaliana
gaattctcttgattacatcagatatttattgcttttagtttatattgcatggtcacatactatttaatcactatattcattaaacacgaaagcacaagtgcacaactcaacatacagtatgctgaaactacatttgtaatgccataaataattctatgctagtaaaagatcgaggactaagcaaaactaagatgacttattcaacatctaattgacattattatttttatataatcaacaacatgccttataaagatttgatcattggtaatcaacacatcatcgacacatcaaattgaatcaacgaaagcaagtatcattgattttctagctttttcgacaataataagtataagtaacaaaaagtttaaaaggttttttttttgggttcttaaaaatattataatcaataatataaaaccttaagagaatctttatatttataatagaatataatatccagattattataattagactgaagccaagatttttgttttagtgaaaattccttggttgtgaagtgaagccaagatttttgtttattacattttccaccttaagttttaacattgaaccgttcaaatcaaatagttgttcagtttcatgaatttagcatcgaactatactttttcacgtaacttttttacattatataatcaaagacaacaaaaaagataagcacattcacgatttatatcatcaaatcttgtagtgtatatatggttggaaacttaggatggttaaattgagaaacatcatcattcatatataagtttgttggtaaacatatacgatcactagtctatggtacgtgacccaaatacacaatcaaagaaaaaatatacaatgttttcttcatgaaaactatttcatcagtttataacaaaacaaaaaaataataattatgcttcttctaattatattgtttcattttcattttgctaattttatttgttcctcaaaattgaaagcaacttaagaaaaaaaaaataacgatctaaacgacggagccttcgtagatggttgaaagttttagcctgaaagatcgaaccgccagcttagctcgtttagaagtgtatcttctcaaattacgaaccgaaccggaccggtttatcccactcgaagctttaaccggcgcagttttactcacaaacggccgtccctttttaactgtcgtttcacttccatttccgttaacggaatcgttagaccccgtcaacatcataaccggagagattctcaccttcttacgccgacgagattctttcttaacagagttttgtatcgcgacgcttgctttaacggcgagagccgccatatccgacgccgttaaacgactctgacgtttagaaatcgggagaacgaagtagatctggtccgcctgaagcggctcttccgatttgatcgccggtatgaaatcgtcgtagtagagagaatctgaatcgcagatgaaatatgaagaaggtctagaggaagacgaagatgaataagctgccgctgattcagcttccaaaacttgagatgctatcaccggaacattgtattcacggagatcgccgttaaccgtcacgatcttcaccgtcggtgaagaatttgaatcttcccgacgaaacgacacacagattcccatttttgattgagataacaaatttgaaatctagagagagagagagagggagtggagaagattcacgaatgttgatacgacgcgtcgagagagtcggtcatggtggggttatatatagaagacgggtgataaaaccgggtgattaaattgaaattagataaccggttacggtttaatgttttgaaccggttgttaacatgtagtttttgtttgttgtctgtccattagtagatttttgtcacgcatagtaaaaggacatatataatgtttccttagttaaaccttctaattacatttcgttttcatgacctaattactccgaattatttatttatcttgttgggttatttgttactatatagtgttatgtattttttaatctttcattgtatttacatattctaaagatctttctgatttttaactttctatttcgaaggatttttttcatatatcaaaagaaagttttcaatcaaggcaattatattcacacgcttatacagattctaaatatatttagaaaaattaattatataagttgtggtcatgtacatgtatgagtgtgtatgcgtatcgatattttattttctttgaatgaatattgctcttaattatggttactctgtatcattcaaatttaattggatatatctctaaagaaccatatttatacgttaagtactatgtgatcatgcatgtcaatttcactataactcactgtaatctatcaaaattaatgacctttatcgaaaaagactatagtctatcaaacgtgattagtttcgaatttcacaatattctcttgtgctccagattaaatccatatacaaagactataatctatcaaacgtgattagtttcgaatttcacaatattctcttgtgctccagattaaatccatatttgatatatggatagttattttaaaaaatctgaagatccatttctcacagtttataacacattaaaaagaaaactatacaaataaagatgctagagttatggaagcatgtaattgtgatttagtgcatctcttcatttattttatagcatgctttatgttttcttattttaataaagtttgaagccgataaactataaatatatgcaaaatatccaaatccaaatttgatcgttcattacataattgcggtgcaaacgaggatttctctcaatccatatgacataaattgttgctcactagtcactaccaccccaattgtatgatagagtctttgtaaacatatatatgtactttgtaaggcttggaacgcatgaaggcacgggcctcagctacaaagcaaaggaaggagacatcaacaacatcacattccaaatttatggtatttggatactaaaaggtaaaatgaaataattttaaaaatcattagggagtttgtttgatgaaattgtaatcaagcgtgtatgttagcaaaacatcggaaataaagagagaaaaagatcagcaatgtgaaagcgaaatcagcaacgacgtggcacgcaccacgcggctcccagtagtcaaaacacataacaagtggcctgttaaactctaaatatcgcaacttgtatttgactataacgtacaattgaactaaacggtattttaatttacccatgcagattttattattgaagaaatatcataattttactagtttcatgcagtttatcaactaaggctccgaatggtaattgtattttgcgatgcaggagaagtgcggttcggttcaaatagtaacaaaaatacatagatacatatgaatatgtagagattttaatattgttacaacactgttgcagtacggttttgggtgcggttttgattatcattaacagcctaaatagtgttaatacaatcagagagcataaactatataatgtactactgttattgtttattaacttactagcttttcaactttttggcggcagtttaatttattaatttgggttggacctttagaaacaactcactaaatgaaaggaaataggggaattatattagagcaaattaagaaattactaaaaattataatctaaactagtaaacaatataatacggaagaaatatattttttttttctgaaaattaaagaagaagaaaaattatgttctctttccaccgggccgagtaaactcgaacgggtcgcatgacatgcatatgacaaaccggcttcacatgttcacacgttgactttatttagtatcccgagctagctataaattcatagtcgtgatttaaattgaacatttgctcatatatttttgcaacatttgatatttgacatatttcattttctagacgtgacgaccgagtaattcgttgtccataccaaacttcgtacattcgagttgaacttttatattatacggtcaaacaaacaatataacacacaccctacgacctacgctaccatattctttcattttttggtatataacgcgctacaatattatttcaaaccacatatcaagtcatttgcttggcatatatatgtatacaatatacagtatgtgttataagtgttattaggatgggtacttcggctttgtttggcttgggttgggtccggttatatagtttggttctcgtaaagctataaatgagcttataaccaactctattaggtgcactcacacacacacaaaaaaaaaccaactctatttaattcagttagagttcagttcatgaattttgctggaatgcgttttggttgggtcttatattttagaaattttgattttctatgtcatccaaatattgcggacgaggtatgagaaatctatcatggtttcacaatttttttgttttttaacattttaaattgactaaaatatctattatatattccttcactatatggtactacaaatgtgtgccttttattccaagaaaacaccaaccggatatcaaattccaagtatatatacgttttactctatttacctgactgtattgtttatttaaatattattttccttgttatctcttaaatagtgccttttattctccatgcatgaatcgattttgtgagactacgactatccttgcctctttggtagagtataatccaatacattatatgttgtacaatctagactttccgtaatgtattcagataaactttgattgatattaagtaaaacgtacttatcaaatgcatttgtcttcaaacggtgtttagtttatctttgtcggtgtttaattcttcatacatatagcgaaaggatatctatatatcatcagcattcgtataagtatcaacacaaatctaaagaatttttttgataattataatttttaatcacagataatatgaagtcggacaagaattttcaagtaacgcaaagtaagtttaatttgtaacatagctaaaaagattatagataaagtagtttaagttctcctaattttttttctatattttgattatttggaaacattgattgtttatgtatagatatgtataattatatgcatgtgtatgtataattgctgttattcgtgtgttagtgtgtgctcacacctggcctatgaaaatattacttctcacgtttttctagcagctttcgtgtgcatgaaataattcacaagaaatccacacgagaaaaaaatcatcacacacgaatcaaatctttatgcagaattaaaatcataataattagggaccagaaaaattaatgtggttcgcgatatgtcgtctgatttagtgacgatggtcacatgtttacccgacaaatccgaaataattaacaacccatatatcatacaaacaaattaaactattattaaaaataaaaatcaactaagacggcagatataaaccatcgtgtgtggacagaacctcttcacacgtcgtattggtgtttttaccagaagtattcctaattctggttagtgttgataacttacactcaattatattccgatatttttctcaacatgttcatattggaggttgccgagacttgggcttctttgggcctaataattaacctggaccaagttgcgctagtcaatgacattacatattttattgtcattgcttatgcccatcgatatactattcttttgttttggttcaaaagcccatcgatgtacagtgcactcgatttccatgcctcgttgttcagataaaaaatcatgcacgtagatgtttaatactcgatttgttttatggaaatctttttgtttgagattatccttttcacaaacgttctggtaacccaagaagaagctcgtattgaaaattgatccatcgtcttgatttagtctaaacaaactattcgccgatagttgcaaatcctcggttcacaacagacgacgtttgttgaagaaccacaccaaagtacaaatcattcactgtactccaaactaatttatatatatacacacattaggtacgtatataacgttactttcaaaataaagctataaatatcctacgagtctatgacgtatattaagtttcgtcgtgattcaaagaattagtttcttggaagatagaaaaccacggaccataaatagccttagcaaatatggacccagcggaaacaaacaatataggaggattgatacaaccaaaaatagacctcagggtttcgtttatattgcctgtccccatgctgaaaactatctttgcctaccttttgtagtctaccaatgtatgaatgaagaagcctgatttttataacgaaatataatatctgttacagtacatttttgtatttcaaatgtaagaaagtaacagaaaatacaagaatgttagcaacaacgtctaatgtagagcaatacgtaattattgattccacgaaccagagctgagagccttaatattagtgccttaattaatattacttatccgttctaattatttacttttacgttgtgcattgttgattagtctcctttcttgcatctaattagtatcttattgaatcaaatttgaaccatacatttactttggcacaattgaatataatatttaaatgtactgtggaaatttcggctttcatcgcaattcgtagataatagagggtttaggagcagaaaaagacagaagggtactggttcggttccgacataatctgatagtcaagaggagatttatatcataaaaatactattttatagtaaacgcatgaaactgtaggaaacaaaacaatctcctaatgtgtaataatgtgtccgtacgtgaaactgcaagctagtccaaattttattatcttttcttaattgtcagaaatcctagattttaatgttttgctaacaccattttcgtaactctatgtgatcattaagaacaagtactatattccacattaagtaaagttacagaaataaacaaaatatcacgatttcgatagcgacaacaaaactatagaaatagttaaatacatcaccaaaatccttatcccgtcgtgtcgctagcgttcccattaatattatattgattacttaacgtcttgggagactgaacaagataactccacacaaggtctcacgtggtcccctcacactctctcaacacacgtgtcgtacacttaatgggtttcttcgacacgtgtcgtagtcggagtgacgaggatgcacaactagctgaaaagtccgacctattgaaaagtctataatgcccccattcggtcgctgcctaagccggtaggggccggtctaagattacgtggcagagccacggtccttggtcgcaatactctctcttgtatacatgtattgttgttggcaaggactaaaatagcaaaggttttatccaaaagtataagattagaaataatgcgatttcttgtttcctttacttcatttctgttcaaagatttagacagaaatgcaacaaatatatgttgtggtggccttcacaacttacaagtgagactccgatattattttgagatattgtttctatttttttcggtaactactaacttaggacaagcacacattcacagtcgtttatcataaattctttgtgtaactacttattctagaaaaccaaactacagtgaaaaaactatatatactgaaaatatgtgattaccgccttatataaattatttttgatgttaacattttcgtaaaataaaatttgtagtgatcctaaacaagataatttgaaattctagttttcgactccgagaaattatgaaccaagctcggaacttttttggtaaaagtaaaaagttgtgatgctttaagtgtgaaaacctagtgaaaagaagaaaacgtaaatttgtgggatacctaaaaagctacagaaaacgatttttgtgtttacgaaatggcataattaaaacattattataactaatgaaattttataagcaataacagtttgccaattattcgattccgtggattagtagagagtttaaaatatgatgttgaataattttgagcgatcagaaaaaggaatgaacacccgtctcttaacggtgagagagaatcgcagcctttcggattccacacggctcttattttcctctatccacttgctcactttttaaaccgcataataatattctttagcgtatactattataatattcttcttgattacgtcaaactacaacaaatcaatcaatagtattgaaaaatatgtctcagtgtcactcttacgacttttatacaaaccatgtaaccatgacgacatgacttcagttacacattaccatataaaacagttcatgaaaggattagactacactaacatttgttttagatgaatgtcacaaaatggtgatatagactaaatatagtagtcactagtcattagacaacgcataaactttataatatatcattcaccttgatattattattgtatgaacaaaaatttaatgtacacattacattacaacacaagacaaagccatgccttttaaacaaactaaacatcaaacacttccactataaaacctaattcttctatacttataaaaaatgtatttatgtatgtgttctaattatttcacctttatcttttagaaaaactataaaaagaaataatacacatttacaacattatgactacatcctaaatttcaccccaagttatacattgtattataccattatctatatatatatatatataattaattactatggggttggaaatttagtaattatcttttcttagaacggagcacggtgagggacaccctttcgtctgcttgaattccggtgattatagatcggaggtgttcccggagagaaactaaaaccaccttcatcaccagagcttgaagacctttgatcaccattgggaccgtagtcatcgaatctaacggttgagatcgagagaccactcatcagacggttgaaagcattggtcttacgcatcttagtcggtgtagtagcttcatctgattccgacccaccaaggtactctctcccatgctttcctttcaaagagaaggttagagataaatctcctctcctcattcctccaagctaaacagaacaaaaaacaaccaaaggacaatatcgttatttccacaaataacattacaaaaacagagcatatccacatgaatcacgaacaaaactaaacaaaaccggataaaatttgatatagatatcattaagaagtgaaatgcgttaatgggttttaagaaagtttacatttttgttaaaaccatatgaattgtttcaaacaaaaatggtgaaaacaggggaaaaaacagagggagagtctttttgtgttataccttgcagccgagagagcagaacctgaaagaatcaaggagacttctgcaacagatttcacaagtgtttgtaacacctttaccgattctaggctgaggtctttcattgaggaacacgatctttgcgctgttgataatatatgtctgaacacaagcgatgtctatgaacttctgtatctcattcactctcacaacgttatggtacgaagatcttcgtatctgcaaattttgattcttttcattaacattacaattaaaaaaccgagagattgaggaggagaaaaagaagaagaagagatattgaacctgaacaacacgatggtctttatgtttgactaaacagtaagagcaaaaggcatttccagcacaatcaagacagaacaaattgcattcgtttttgtttgaatcgacatggatggaacaagggacgaagtaactccctcgtagcattggcattagccacggtggacttgtatagtcttcttcttcctctgttcttatcattggtccctgaacaaaacgaaaccaaatcagaatctggagaagattgatagcaaggtaaaaacaaacaaaaagaattaaaaataagactcaccatgactttcttgtgattggccttgaaggccccgaagttgagtttgtgattgtggttttcgatagccagatttgcgagctccagtgtgtagcaaaacctttacgagaagaaggtagaagaagaagaaggaagaggaagaggtaagtgaaagcggcggctgaaagagagaaaataaagggttttatttttatttgaaggcggtcacgataagtttatgcggtttatatttcatacgaatttcattttaaaatatttttagagttatttttgtttattattaaaggtatcttttttgtttgttcctaaattatatttttctgactcctttatttgggaaaatcaatttgttttcttctttatgtaatttgggaaaatcattatctcgttttttttttttgaagtcctccaaaaacacacgtatcttgaatatgcgtgtctgtccagtgtgcatctagaagacctaaaaggaaagtcttaaaaggttaaaaataaaaggtgaaaatgcgatattattgttcaaatatggtcataaataattacgtttcgacatagaaaaaaatagcatactaatttttcagcttacgaatgatataatgattgatatattttcatatcatcatatgtataataagcggacaaacacatatgtggatgtcaaatctagttaagcattgagagtgatacaacaagaataaaggaactcccacacttgaatttgtaaaagtcaaatatgaaaataaaaattaattatggtcagaattagagagacaaatagtattatcctaattctttgtttttcgtaaaatttaaatccgaaaattgaagagataagcaaaaaagagagaagaggtggcgatagctgaaaagccaagacagatcgacgggtatgagaagagacagaagcgagactagtcttgttaaatcgtgagccgttggatgatgagaagagccttctcgtattatcctttttcgtgggacgtgtcggaagcttttacggttttaccccctcctccgattgacacttcacactcgtggagaactctgagccgtcaagatgatagttagagtgggactcactttgagtcataggtcaacgttcagctgccacgttacttaacgtgatccaagaaacaataaatggagttcgtttgtagttcaaagttaaaaacaaattattaaacttttagaagtagagagactagagttgtttttgtaaatttgtgtgtgtgtgtgtgtatcgtttttaacctgatagattctctggtaaaaagtcaaatcctgtagtcttagagaatctcctttgtacttggacgttgttaaagcaaaaaaagtaagcaattcgaaatgtacgagtgtgtcatgtactgaacaaataaaacattttaaaaaattcaaaatgttgattacgagtgtgtcatgtactgaactaataaacattttccaaatacggtgagatttgatattgaatattgtgaatattaaacaactaatagagtgtaaaacatagatattagcttttgatgtcgaaagcaattaaagatactaattaaggagatagacatgtaaaaagagaagtgtgatccacgtcatgaaaaaattatgtgaccactaatagttaacaatgtaattggaaatccgaccaaagaaagtgagcatagaacggcgatgaggaaagtggaagaaacatctttttaatttgtattcttatctctttcaaattggcaaaaaagaagcaaaagagaagaggcgtttaaacagtagaacgcacgtgcctcacgtgacctttgtgcaccgtttgaccacgtgagtcgtcagaaaaacgagggttgtcttagtagaagccaaacatgcaagttttaagaactaaatcatgcatgaagtcggaaaatgaaaatctacccgatatctaaaccacttcttatagaattggtcctataaaaatggacggtaacctaaaaatcaaatttgaatggtagctaaactagttaaatctataaacatgctttggacgagtcggatcatcagttgagacttgcgaggttaaaactacattctctctatttattggtatacaatccgaaaaatgttttgagtttttgtctatagttttttaagataaaaactaaaacacattatgtttttctttccgtttcattttctaagtttgggaatgcggacaaatggaaccgaaccttaccggattatcattgggtacgattaggtgtggcgggtccactacagtctacttttttaatcatcacccaaatgttatatattttttaacgaagattaatgagcaatttggatgaccaacaaaaagtgcaatttgcagcacgatggaaaggatttgaaccctttttttttttttaattctttttaatcaatttgggtgcttcactctcttttgcaacttgcttctggtggcaaagaagagccaatggaaaaacatgtttggcccttaattaattacacgcttccaaaacaaaagaagtccttaaacttagaaaattacaatattgattactttgtggtttgatttagattagagctgaacgtcgtgatgatacttagattagatacgcatatataactcggcgattcactttttacaatgaactattttataaaaatctaggatgcagatgaattaatatattcaataaaatcttatcaattcttaataacaaaaagattaaatatttgcttactcttaattgactttaaaaaaagggtaacaaaattatgtttaagctatctctcatgattttatttgttttgacaacacaaaaacaacacacaaataatatggagatagaaagatattaactcacaaatataaaactattaagaaagtcaggaaaagatatcgagtttttcatgcattaaacaatttcactaacaaacacgtttatatatatggtacaatagaaacaagaaaaactctaggttttgttaaaagaaataagttcgagtaattaaccctaatagtataacccaagtgtaacgaactttaaatttgaagtaacaatttttttttttgtttgtagaattatccacaagcatacatacgaatagtaaaccacgcatagccattagagtagtgatatggtcgactaaccctccgaaatggtgaggagttgtatggaagttacttatcaattcgaaattgtcatccgaaaatttaaaaggactcttcgtataagggtaaagacaaggagcaaaaaagtaaagacaagaaggtgaatgaatgatataatctcagagaaatgaataaactatgaatacgcatgaagatacgatcgacatcattcatcggagttaggtcctcgatttcgggaaggagcttttcaaaggaaccaaaccaagtatacggacaaagattacgctataaaagtatttagccgacaagagtcactatcctacgtgtctctttaacagtactaggatcaatccaggttcatcgatccctattttacatataacgaacgtaaaataattcgtatttacgaaactgccatcttcgtctaatgagtttattactttatttgatccgtatgggctaatacgagctagctacatccgtctgggtcatgtattgtgtaatgacatattatgggctttacaaaccaaattaagcgttcttccaagcccaattgaacctgcctcaggccctcaacctcaactctctctgaaagggcacttttgtgagttagttttttttttttcttttttcttggtgtgaattttgcgagttagtttgatctacatgtacttgataaatgaagataaaacaggattaaaaaagtttatatgtaacacatccgtcagaaaattataatagacaccaaaactctcgaaggtgcagaaacaaaagcagctagagagtataatctgatgatcataaattcataattaggacttaggagcagaaccaaattaaacgaaaagaatctgaagtaaagaaaaccaaaaacatttcctgtaagacttgaattatactttaaccgaactaatcgaatcgaactgcactgtaatgttaactgaaatatccgtatttctaaataaccaaaaacgtgcatgcatgtgtgaattgcatacggtaatttttttttttttcttttctttcaaattcacataactcatcgtcatctatatgtcctctctaatagatttaacaccttaattacctagaatttggactcttacttttctataacgtcacaccgaaccaaaatgaaataacttcagttatatttttattaaaccagaataacctaaccaaaagaaaacgaaatgttcatttctaagcatatctagacagatctatcctcaagaattcattatcagaacaatatgtatgagaatacagagaaactactgttactatggctaatatataaatattctcatattcgctttctttatatatctatacgtgtttcatttttgtctaatggagaaagtaattgtcgagaaagaatgattaatccaatgatgactaatctagagatgaaatgacagtgtggaataacttgtggaattgaacaaagttaaacaattggctagatcaagacttatagtcaagttttgatgtgttttaattgagtgagaatctttctcatagtgtcagtcctctgttgttcgttgatgctcttctcctccccttacagcgcatacacagcagaaagtttatcgttgcttataatatattttcttcctttttaaatggttgaaattcatcataaatctcaaaagtgtaacaaataaatggtgaatctctctaaatttcaattattatttctatgatttggttacctttgagcactcataaacgttgtttagtccaagttttgagatccttatatgatagtgtttttcatgattcatattttttaaaaaacgaaaccctaagtttgagtattttcatagggtgtgatatttttgtaaaaactttcttgtaaccctaccattgaataaacaaatacaacttttgagctggtatttacgaaaaattatctatgtttggggtttgcttggaaactaccactacaagtagtgttttgtatgatctcgcgaggaataagaattaaatcggggcccaatacatttctgtgattatattccaatgtcggatttggtagggaactaagcattgaaaacctttgtttttctcttccacttttgcctaaactcaacataaaatgtatgcgacttaaaagacaagtgctccaaaacatttcttaacaggattgatgttttaaacttaatatataactaaatatcccaccgtgacatataagaaacaaaaaacctcagtctataaatatattatagttagaattatggagttatggatatgaacttcaatttatcgtgtgattttgtaaccacatttgttaaacgatgttgggggctaatccaaaggatatgtcgaagatgtgatcgccagtagccggacataagactttagctatgattgataattgatagattctgggtataggaaaattcatggtaaagctataaattagttttgaataaataaaacaagagaataacacaatattgacaaaagagtgcaagccataattttcacgtacggtggttgccgacaagtaatttagctaaatttaagaaatagtgcagttctattaactctgttccttgttttttttttttttaacttcttattttttaaaacgtaaacgcccatgcaattacatgacaaataagtccacaaagcatcttcttttctttctagaaacctaaagcaattatatttctcatctatcgcaaaacctgtctatgtaactataacagttttcaatatctctttccaccataaataatctcgcatccaactcctaatttcaccactccatatttcactttcgtaccatgcacacaaaagaaaccctaattaatcagtcataacttccaccaccaactcaaaatattcattcttaaaaagaagaatgatgagaaccaaatccatagtcatcaattccaattccaagaacgatacttccaccatttccgcaacgacagctctgagacgttcggcctcaaacactaccccctcagctgcagtggtacgcacaaatgatcttaacaaaaaaccgcgacctcggtcagtagagttcccggcatctcctcaactagtacaaggtgaagagatggtccatttcggacatccccaacacgtgttggttaaagttgagttgccggatatttacacgtgcgcagggtgcaaagaagagggagcaggggttaggtacgtgtgtcaagaatgtgattatcagctccatgagttttgtgctttggctcctcctcaactcaaatcacacccttttcattaccagcatcaacttctcttctttgccaaacctggtacgtttttaattattactgtctttgatatccttatttgttagacctgaggagtatttttggtattaattacggaaatggctcaacttgatcggttttatttcttccgacaattttaagctaaatgtcctttgtttgtttttcagccaagaactagactcacgaaagtatataaaaaaaagccctgattatatattgattgctttacatagaataattttgctttgctttaaatatttggtttagtgggtatcaatattaacaagattaaatgttggttacgtacgtagaacaacagagaataagcttcctataacgccataaacataatacttttaactccagtacgaaaccgctgatcctggaataaaatggagacgtacaccaaaactaagatacttaaatgattcgaggacaaaaatattattgataattttatttttatttttatgatgaataacagcgaaaggagggatagtaaaatcgaaatgtgacgtgtgtggaagatcaccaaaaggttacactttcagatgcaaagcttgcagtttccaaatgcatcctggctgcgccatgttatctccttccctctcctcttcctccctccatcaccaccctctccgcctcctcccctcttcctcagcaggtagcaccaccggcggagactccggaggattcctctgcggagagtgcaagagaggtaagcgaacggggagggtttaccgttgcaccgtctgtgattaccacttgcatgccgtttgtgccaaagacgccgccgtgaatggcctccgagcaaacggacataaagggagggataagtctccggcagttttgggaacggcggcaaggttggcgtcgcaggttgtgattgattttctcggtggtattatcgatggtcttggcgaaggtgttggtgaagctattatagacggtgtgactagaggtggtggtggtggcggaggcggaaatggcggtggcactagagtaatcccacgtgtcagaggagggtaataatgaaatttgaggattgtttgattaactaattatgttttgtatgtggagattgctatgacttgatgatgcttttgataagtacatagatgtgcttgtatttattgagtttgagtttgtgtgggggatatattatgttgattatatttggggatatttacaattctaagaaaatgtgtatatgtttaattagattggattgataagtaatattattttctgttgtttgtgttttggttttcattatctaattaattaagaagtagagaatgccttgagtttcacgtatatgtgcttaactgaatacaatacattgtaatttgtaagtagatcaaacgcatatatagctagtacatgttttgaaaaaaatatgaaaatatatataactgtgacttttattattacatatggagaaataaaaaggaaaaccaaaaagctaatacctaatagcatcttggaaaagagaggaacatcaaacttaactcccattcaaattttatatacaactatataaggagaaatgagacccaccactcacattttatttcaaatttattcaatttgtttcataacattttaaaactttcattatgtttgagtcctatacataagcgtcaaatatgttaggatttcacaccaaattttttaaagcacttgacactagtaaatgtcttggatttaagttgaaaacacataaaacttaacaaaacctacatacaatttttaaaaaataataatcaagagttgcttaacttatagccacaagaatagacttttgaaatgtaaacgttacaaacgatttcactttcattctctctttcaagagttttcttttgaaaagtggcattaataaaatctcacactataacaaaatttcaagaatctttacgtctgttgattattaagcaactgaatcacactaatttcaagaatcttttacatgtgacaaaagaaaaaaaattgaatataaagatttcgtgacttgtgtgagttgttatgtttcataagctcgacaatccacgtgggaatcgttaacatgttattatatagccttttggactctatgtgccaagattcctccattttcatcttatcattgcttcctcctctattggtcttcacatatatagcaatataagtttaaaatggttatgcattttgactttcgagaataagaaaagaattacataatttcttaaagttacaacaagagaactacttgtacaaagtacaaatttacaaagataaaagaaccaaaaaaacaaaacataaaaacaactgcttcttatatgaagcagcatgttattatcttagttaaaataataatcataaaaagtaggaaacgtacaaggaaatacagaacaaattagcaaaaccaaaatatatatataattgaaagaaagaaagaaaaaacatcccgacggtgaaacttcctcgagtaatactgtagtcacttttggtcgtgtgtcacagtcatgtctctgagcttttccttctatttgtaccaaagtctcttctctttttcttatttttttttgtcttcgagaaaccaaaagaataaattataatacttttatatagtatagttctctagattgagccataatccaaacctccccaactgaagtgagacccttgtctgacgattgggaaagcatgcatgaaaacgcagacgcaaacgcagaccgttgcaaccgcaagcattgagtgaatgataggagttgggaacaaacgttgtgaacctgaaactctcctttgatacttcaaagccaccgttgcacacgaggcacaagatgatgatgacttgttcatctctaaacttaatctcttgctcagaccggtttggtcaactacctcgtgctcgatgtttagtgagacttgcttgtttcttttgtctgcaagtttacgagccaccaatgagttatagttatggttgttccttattgcagcgtagctgtatggagtttgcccggttgcatcgcgaagagtgttccagctcgataatccaatctgaaaacataaatgacggttttgtcagttttgaagaagcaaaaaaattggatttgagagaaagagagagagagagacatacctcttgtggatcattggtgagtagatcaatcatatcatctgaaccagatgtacatgcagctagatgtaaaggtgtgataccgccaggtccagttatattaggtaagaaaacgaactttctggaggaactgagtgtcaaggggttaaccaggtaatgaatgagtagttcgaccatttttgtgcttttcctcttaacagcacgattcaacaactgaatctcagcaagcatatccagggcttctctgttcagctcatcattcaccaaatttctctctactaacatgtcgaggagcgttctgatgagagcacagtaatctctttcaactgagcaaactagcaaaaacttgaagcgggcaagggaaaagtcagattgttcccgaagctcagaggtctgattcttctggaaaagccaaccaagctcgttcaagaagcacaaaacttcttctcttgatgtgggaccacgatttgagctctgcgcttgctcttctgtcatatcttgacttttggggtgaaactcttctccgagacgattcaactctttgcagatggatgcattggcaattatcaatggaaaactgtcacccctgaatccattctccacctgtacacaaactaggcgttagacatctctagacccacaacgagaaactataaagataagttatatatgaagtcatacctcaatgaaacagcgtccaagaaaaccagggtgtacattttggactttgaaactatttacattcaactcgtcaaatatggtttgtctacacactgccctggttacctccattgccatgtagctacccatatgtgtgcaacgaatactggtagtacaatgataaaaaggttagaaaggaaaatgtgaatatgagaaaccgtatgaaacttgattttttaaagttatacctgattccatcattcgtcaagcttctacctcttacaaccaaacttgtttcttcaccagctaccacagctacaggtgacactgagatgagctctggtgaattccaagttctccaagatttgctacatcgaactttacctgtaaccaatgatatgttatgaccattggtgatacaaaaactgcaacattaaaggttacataggatagaagtaacaactcgtgagtactcaccatttttgtgtgatgcgagttgtcttcccgtgttaactataaatcttgcgtttctccaaaaatcagaaggagaattttgtagcaaaacaccaagccgttgcagcaatttttgctcaagctgaaaaaagccaccaactgctcattaagctgcacatagcatagtatatttcaataaccgaacatttcaaaatattcactcacttgttcccaggctgcaggtgacattgctacataaacagatagaacaacacagccaggcctgatataactctccatttctgatggaatgttcgaaagccagttatagatctgtaataaaaggtaaacaatcacgactatgagcactcaaacagaagcagtcagtaacattatatttcagggcatggccagaaatgatcacctcagatcgtagagtcccagggagctgacttggatctttatcaagtagtttaaagactatctttccagtgcggtcctgtttgaataccatcaaaattaaaactataagtggcttgttttatctacgtacaaagagatgctaaaagaggagtagaaaagctgcaaacctgagcatcagagtttaagctaggaggagagtagtcagagccagaagaagcataaccagactgttgcccgaaacctttaaagttaggatctgcagctcctctattcgatgcaccaaagagctcaaggggcaagcaaccagtcctgggacttgagtttttatgattcttggacctcatggtttcaggggatgcctgcaaggggaataactcctgcatgaccggagaagaagatggtgatctatcctccacaggattactgctggcagaagaataatactttctagaagatgctactgtcggtcgactctcatcctcgggtgatgaggtgaatagttgtagagacaagctagacctagtgtcttgaccacgtgagtcagaatcctgagaaggagattggttactgctactgctcctctctcccccaacagaagaaaacccaaaagttctcttttccaagttggttgtaacaccattttcataagacgataacttagtcttctcgctgtctttgttaccaaacccaccttgagataatatcgctagtgcatcaggtgaagatgaacctaatgtcgtcgaaagaacagcaagcaagtccatggtagaaggagaagccccattcatatcattttgtgggttcaccgtcgggtgatccatatttttcctggctaaacttccaatattgttcaacttagagacaagatccataggcaaaggcaatgcatttatcttgttaagtatctgaagaagctgctctctatcaggcacagctggagatcccactgggggctttaccgcattcttacctgcagatcacacacaacaaaatctgttaataaaacaagaacatcaaagcagagttcccagactaaaatacttctacaagtcgcaaaactagtgtaccttgtgcacaagctaaggcggttaacaaagccataagatccatattggcgttagccgtattgttagtagtatcatggttccccggaaccacaaccccagatgcaacctcctccggctgcgtagttttcctcctccgtcgattatggccagccaatctacgcctacaacttctcttcccctcatcaaactcagaaagcagatgaaacctgcaaaattcatttagttaataccagattcaaaaagaaaacagagaaccatttccagaaaaaagaaatgagagtcctttcttatacctgctacactgttggcaaaacctctgcatctgtttaccaacaagagctttagtagctttactatgaacttcacaaactttatgccttctatgataatccttagcatgagacaaatcttcagtacaattatcaacctgacacatgggataattccctcccggagatccagaccgaaccttcttgttcggtctaacgttctgcgtcgtcgtcgtcgtctcttccacagcagtcaaaccacttcccagattcaaatcaagtcctctttcttcaccactcctattcctcaaagtcaaatcaaactcttgaacctcaacatccaccggtttagcttcaaatctccggctatcccaatcccacatcttcgaattccactcatctctacgctgaggctgagattgaaccaaccgattcgacatcggataataaagatctcgctttctccccagcgattgatgtataaacatcggagcagccacttgagctcctacctcatccatatctctcgatctgagtctgaccctttttcaaagtcctccttttgtagattgaagaagaagatgattcagttggagatctctaggggaggaacgaaccaacgtagctactcatcatatctaactcttagctaatcagtaaacacaaaatctgagctttcaagcataaacgcttcttcgattcaacgaaagcttaagacaaatcaagcaaaacatgactcgaaatcgaatgttcagattcgaaatgatttcaaaaaacgaatctttcaacttgtagattttcccgatccaatcaaggaaactaagagaaaaggatttgattttctctcctcaccagcttagagcttccttcttcaaatcttccaaagtctcaaactttgtccttcttcttcttctggtaatcaaagctttttcttttttttttggtccttggtctctgatgtcttcaagtccttaccttctacgatagcttttttttttccttatttgttttctacggtgatggcatattgtgtaaatttgaagagtagtgagggtatttttctgatatttattcgagccgcccatatgagagagatatgtagtcgaaggatccaagatacttcattttgctttttatctagttaaaagtaatttcaacactgtttctctttaaattctcgtaccctgaattaacggatccattttagttttcacaccatttatgtattttgttaacgagtttctttctagtcaacatattttttaaagagttttctttctagtcaattcttgttaaaagagttttaaaaaattcatgtggcaggagatatttagatcattgatgtattttatgtttgatttatatagttgagttttgggatatgtgtacctaagattcaaaacattgacacatatgttgtgtattttcttatagttaatgtaaaagtctataattaccatgaagtttatatcatgaaatagaacattttcttaggagaaaatattttttgtcatttctaaaatataattggaggatttcatactaaaattttagattaaacttttcatatgtgaaaatcttagtagttttggtatttaaaaccagtatgatatcaaacaaaattgaaagaaaaactcgaactattgtcttttgatttgaaggtaagtcttgcattactgcactaatttaccataccataataagttgattaatgataaccgataagtttaataaaagtaaagaacacaaagtgtttataagaaaaaatgtaatagattctcataaagataatattataacttacattcttttgtatagagattaagataaacataaatataaataatatatttaaagataatgttaaacttcctaaatttcaatattaacatttatcaatattcttctaaattcttctataattatatattcttcccatatcttgaccacgttatttcgaacctcaacctcgatcgatctttaattctttatatcactctgttacgtttttatcgaatagaatgatttctacgggctaaaaatatagaatttaacagtccaaatcattattataaaccatcttttaatgtaggtcccacgaaccaactatcttataactcatatcccgtgtaatatatctatatttatttaatcgttgtactatttagttatgaacatgtaacatgcctaagtggttagtgataacgaaacgatcgtcgacttttcttttaggacatggtactaacaatttttgcctaacaaattgtctaatcgattatagaactgagatgtacagaagcttatgtaagaagtatatcagttacttataggttttaaatgataaacatactcagtttttttgtatacgtttcgaagattagtttagatttcggtttgaaatttagattgtaaaaactaacttagaaatatctttcgtgtttacatatatcatttaaattccaagagcttagtttacgtacgaagcttagatctcgacaccgcgttacggagaagtcgtcgcgatcacgtaaggttaagggaaaaaaacaatcccacccaaaacctgtcgataagtgaaacgacatcattacccatacggaatctgaataactacgaaagtaacactcctcaagacattagtacaccagattggacaagacaagagatagagaggccacacctcacacgtacgggttttatgtatcgtccctacgcgcatgcaagtggctcattgtccttcttcttctcttcttgttccataaaacgacgttgttattaattcgctctttatgagtatttttaacattattataatctatcgttgttaatcgtgtctcatttttttattaatgtgtcaaccttttattcgttctacttctacatctattcttacattccttactaatggtgatgttaatccttttttttcccttttgtgtctttatatgcctaataatatattgaataaaaaagaagaaaaggggtaccaagaaaattttatatagataagttttagtataagaatgatagatgaataaaatacagagagtgaattgtagtagaatatgttagatgaaatggtagctaaaattatgttttaagaactaattagaatatctagaaaaacatttgaaaaaatctaatattttcactctcttcattcttcatcaaaattaatcatcaaaaaccattcatattgtaatatagtggaattaagagttgacaaaaataaaagagagtgtaattgcttctttttttttctttctctaaagatgtcatcattttgtaagctgatcgttaacttttgatggttatatatatgcgtatacatttatgtacataattatattaatttaaagtggaaaaaggttaaagggaaatagctgtgagttggtacggaaagtcgagttcaatggattggaccataaactcactaatcacttctcttctatctctaatttttataatttgtttctaatttatttctttcgtatgacaaactataattcgactactaccctaattgttttcagtgtatataacttttagtttgggacttatacaagtaatagctagaaacgattatgggaatcaatctaggaaagtagccacacacaccaaaatatagacacttaatattattaaaccctattttaaaattatgatggacctagttcattaacttttgtcgatgaatgcaacactaacggaacatgacaggtttcagtcatgcccaaagaagctaattcattataataaaagtttgcatttgcttacgacttaatgttagcattggataaattatacacatctgataatacaatgtttgtgtttttgtttgctagctgcctggttagccgcgtatactagatgaagttattaatttggtttcaacattatgcttctacagaattttaaacacatgattaataatttcaaatgtggcattatttgatgtaaataatagaactgagacgattgtatttagtgtgtcgccccgacaaaactctcttcccacattttctggaacaaagtgttatttttctttttatattctatactaataagaaaataatgcaaaaccgaatcgggcaacaaaatgtaatgtaaccatgaaccgttggaagaaaaaggaaaatgaaaaaggaaagagagtcaaatgtcacatggtggtccaaagtccaatcacagatcaaacgtgcaatgtattgagcctaatccctcaacatcctcatgcaacatgcttcttaccacgaacaacggcgggtttttgtttttatttctcatatgaattgaaatataaatcagtgttgtattatgtatatatgtgtcccatctccatatattctatgctaaaggttcacaagatgattggattttttttgtgtgagaggaaataatttgccaattctgagtacctttacacgtatataaacaatatatatgccctcgaatctttttcatgtttgatagagttggaatatatatgtaaattgatccataactattcaagtactactaatattaatggtagatgaaggatatcgcgcgttacaaaagaaacgcttaacacgtaactacgtttaaattttgtgaataaaacttgaaaataaatcaaacaaaacatttacgttttaataaacatccaataatgcatctgtacgttaaaagaagaaatttcatgagtaactctttcgtactacagatctaacatttttttgtttgaatttgagtgtaaggttcattggacgtggtcatgactcatgactatattataagtacaataattttccattatcataaccacttacttcaatggactgttctgtgatgtgaaacctaggatctgacaacttaaatttaagacaaaaaaacaaacatataaatcattttaatagaaaaccttagaaggttttgaaaaaagatttaagatatataaaatgtaatgttaaaccattcattttaaagatttgagcctttgaggaaataaattttcaagcacatctgaaatttgaaaacaatggtgagtactgagtggcttatatatgcttagcaattagaaagttttaatttgttttgtttttgttttggcctctcaaaggagctttacttctttatatataacaagaaccctcgttcccatataacgattatctttacgggaattttttttgtttcaaattatggttttacatttttttaattttattttgagttgacatttttcgatttcatgttaatgagaaggacatgaaaactaaataaaaagagtactgcagcagagcggcagcatatgtcacgtgtcttgtgaatgtaaaaagattcggctgcgtttgaacgcaactatttttctaatctaagtttttcatgttacaaaactaactatattcaactaactattttatccttagtaaaatagtttgtgggtcatgtgaagggattaaatttagtcgctgagtcaacatttcggatcattgttgagtccccatttggccgttcatgttacttcaccaattaccgttagttattctatcaaaattttaaactctgaactctaactgtcaaaacaaagagttcatgtcagattaaaaaaggataatacgagtcataggaggttaaaaagaagttagggtattgtgtcatctttaagctaagatgctagcattcggtcgtatcaattggttatggcgttctagtcaaactactgcggttgtcaaggcaaaacgtagcgctactgcgactagcagttctcgtgcgcctcatagactgttccaaaatttgatcccgaagatgattttgatgaaggggcaaatataagactgaatccagtgctgaaactggtggaacagtctcatgtttctctgctctgtccttaaaaagactagggaagtctagatggacgatctcttggcactgatgaggaaccacccctggatgacttatgtgacaagaacgaacaatcgtagaacttctagtgacataacaaagaaaacaagagactcttccaccagtttatatatcaatcgaaaagatgagaagaagttattgctttaataaatatattatggtatattagaaaataaaaaaaactggaaccgtgtttcttagacatatatacccagagcaagcaaaaccaatctatatgtctgtcgttcgtgtgaaatcaatgaatcaaagcttccccacttaaaagaaaaaagaataaaagcaccaaccacaatccaaactaatttagatgagccaaaaaaaaacatactataaaaagcacaaggcaaagtgtgtaagagtgtgccacttcttctttctttttttattcttatgtaaaccaaagatttgcaggagaggagagattggcattaccgagaaggaacaatgcgatgatgatcacaactatgagtccaatccacatccattgccgcagttttctcttgcttcctcggtttcttaaaggcagaggaaccgattttgacttgttttgtttcagaaactgtgatgaaggtttgtgagatttcttcatttgttgactctcctctacggtttgtttctttggagtttcgatctcccttggggtttcgactacagtttctgctgtcggaattgggttttctgttgctgtctcttctgatgtaaaaatcccctttcttctctccttcttccttagcttcttctctcgttcctacaaaatagacagagttgttcaacagatccatggcatagtatttaaaataatttttgtcccaacagaaacatactagctagagagactgatcgaaatccaatttggataacagaatgacaaaaatatgcttttaccttctccctttcttcggcttccttctgagccttgagaacagctcttgcttttgccttctcctctctcttcttcttcctctccattgcctctttcgcttttgctatttcctctaaccgatgttgctccttcatctttgcagcttccttttgttttctcttctcttcttctttcttaattaactcctcttcctcttttgttaacttaggcggctcttcttcttccggtgttgctgacttctctatctcctcttttccagaaaccaattctgtgacaattgatggaggctggtctggcttgacggcctttttagatttagtggtctgactcttttgctcggtgggtttagcaacctccttaccgttgttttcaacttttgaaccttcaaatttaacgactttctctttctgtgctggaactgcctcatgtttctctgctctgtcactagaagttctaagtttgtccgttcttggagcataagtgatccgaggtggctcctcatcagggccaagagatcgtccatctagggttcctagtcttctaaaggtactccttgtgttgctttttacatagtatttacggaactcgtcgtcattgttccacatattcatgaaattctccacctgcttaaagactgaaatgagtacaaagccgacatacagggattgaaaacgtagtagaaatttggcttctgcttatacctggtcagaacaaaggctttgcagtgctgctctgtctttcttcaaagccatttcacttgctgcccttgaattatctctgtacttgaagaaatatttgttctgcaatacgaaaaaatagtaaaagtgaaggatttaataaaaacctcagatgcaaacatttgtaagttatgtccactttcagatgctctttgggtaccttttctcgttgttgtttcttcaaatcctgtaggtgcacaaatgcttcctggcgaacagcatcagcagctctgaactgttcttgcagtttactctgtgcttcccattccccatcacacttttttttcgcagcttttgtgatttcttcggcttttgatagatcgtttctgagtgcgtctagttccttcctcaacacctgttatcaccagaaaagtcagttttgaaatgtgtaaatgatatccacacataaaggatgagataactaaatcacccgaatggacattatgcaaatagatgacataaatgcacttgaacggataaataggttgaatcaaagtagagagagaacgggtagtaactaaatgcagataggacgtaaaagatgactgctaggacgtttaaactgtagtgtaccttcaaacgttcttctgttttctctttctcatccaatgcttgctttacttcatccttggtacccatactcgaagatatctgctcgcgaagttgcttcaactgctttatttcacgcatgaaacctttttcttcattcagagataaagttgtgtgctgcatcgtatgttccatattacgcacctgattggaggcagagaaataagatagattagcataatcaaattagacaagctaaaaacttgaacaaaacttagctggaaatgtgatcattgggagtctcacccttgaatcaatatcatcaacagacgcagcacttttaacccggctaatcatagactgaagggcctcaatttcctgccgttttgaatgcattgcttttcttgcagatctctcttctgccatgaccgccttgtaactgatatcatagtccttacatattgcctagaaataacaatttcaaaaaatgtcagaggcaaatttagaacaaagatgttttagcatatgaaaatctcaaaagcgtttcttacgcgtatcttctggatatccgctctaagagcatcccgattttgtgttttctgatcaacctgctcttcagcatgcttcagttgctcggctaacttttcatcatcatatctaggaactctaggcagaaagtaaaaaggtcttttctctatctctgccgctacagtaagcccttcagaagcatcaagtacagaaacttcaccggtcgaggctactttatcatctgttctatcaacaacatttcctgaacacaacaatttatatatactgtcaactccatccttctgattctcaacaagagaagtacatagcctaatttcatttttaattaacttattaccttctttgttttcagcaggttggctgtccacacagtctttagctcctgtatgtatggtatcagtagatgtaaccactttagattcaagatcctgtgcacaggtcttgatttcagatgcaactgaggcagtagcgacttcttcatctgtatttatcgaagatctttctttgacgtccgattcttccatctcagaaacttctttaggtggtatatcctcgcgcacagcaacaggagtagtctttgtcacgttcacttctgaaccacaattgacttctctgtctatttcaccatcttcaataatggatggagctacatgtgcttcagcgcattgtttaattgattgagcagcttcagattccatggcaacagcgtctatttcgccagccactcctgctgagctttctgcaaagtcagagacagcagttttggtatccaacaagctcaatggttcgtcgatgtttgtagagagagtctcagcactctcatgtgatgcattcccagaaagatcccctgtaggtaattctttcgcttcttcagcagaatttagacaaacatcaccaccaacatttaagttcccctcgctattgtctccttgaactttctcatttggagcatgttttacattcacatcggtaacttcttccaactcagcactacaatcatcttgaattgtctggttagtgtcaactccatgatcctctgataaaccttgacttttggtgtcatcgcttacaattacactcgtgtcattcgcagaagacacaacctcatgtagcgcatgggatgggagtttttcaactagcccagatatctcatcactttctgatccctgctggttagtacaagataagccatcagaaatagcagcttctgaaccattatctttggcaacaataacagcatcacttatttcttctgaagcaggggcatcaagaacttccttaacttcggatgatatgtgttgttttccaccttgatcacaagtaggatcgctggcatcttgagattctggatgagtgtttatactcccatcagacacagagccatcatcaacagctccaatttccgattgcatcttgctgtcttcagattctgatttgctattaccattttcaacaacactatctttgccagaaggctgggaatccaagctgatggcattgagagcttgagtctcagcagggacgtcactgcttacctctgatacaacaacatccacggttccagagtctggcaacacttcaccatcggaagcattgactttttccgccactgaagtgaatggaacatcactacttctctccaactctgattctactggagggtgaccgttttcaacagaaacaggttccaaaactgttacaggttctgatccgacgtgatcattcacagattcagatccattgatggtttcagctggatctgttaccgtaggttgtcccaaatccatgcctccatcactaggctcagttggagaaaccttagcgctcaccaactcagactcccttacttcatctgagtcaacagggtgcttttctacattctcgttaagttttagatcttgagaaacatccaaatcccgatcagatttttcttgggcttcaatcttgtccccttgatgtccctcgacatctgtttcactatcagattcgatttcaacttcaggctcctctacgttattctttgtcagatccttggatccaacttcagaatcatgaagttgctccacttcctctttagattccactttaccctcaagcccactttctagatgcccattaccaggatgctgctggtcgacacttttttcaagagaatcctcaacttccgactttgggatctcaacgacttcctctggtccatcatctgtactttctagctcagacttttccagggtttgactatcttgagaaactcccaaaacatcatcatcggcaatacttggagcatctaccttcacattctctccttccttaagatctttctccacattggcatcatcaacaggcttaacataatcagactctacaaaatcatctccaacggtatcattctccgtaatgaaatcgtaagaaccatcggtatcgttcccgttgccattattactaccaccatggctgatcccattcaccacgtcctctttggtggccgaaacaactacctccggtttaatctcagtcgcattctcaaaatcaaccttcaccgacacctctccttggtctctctctacctccaccggcattttcaccgcttcacgaacgataagctaatcaaaggcgtaagaataaatcagatcaaacgaaattgcagccagctctaacgaaaattcacgaccataaaaaactaaaccgacatggacggagatcagagaaatttcagggaaaataaaaaagcgatttgcaactaaccttgagatcaggctttgtcgccggagatttcgaatgctgagatagtcggatcggtaagaaagacaatgccggcgattaacagaggaggaatttgaggaaattttggtccgagcaaagagagagtaggagacgagagagagagagagatgaagaagaagaagaagaaaacagctggcttagagaaggaaggaattaaggacgagatcgagaagcctctttgttgaacagagggcttcgttaatctgatttattgtatttatcgattaaccaatatctttgtatttttcatattttgattagcatagattagcattaaaactcattttaattagtaagaaatatatatatagtagcgtatattgttggaacatgtaaatcttggatacagagatttatccaaatgtttttatcagtgttaaaattgttaacttcaagttctgtttatgattgtcatcattattcattattactaattgctactatttaatgacgtcattaaacattaatatcatatccaaatatacttttatccatgaagaaaaggatttcatctttttatatttatgaaaggaggattaatagaacttttgttgaaaatgacaaatcaattatctataagtttcagaaattttcttattttgcaagactttctaatttttaaagtgaaaaggataatttaactccgaagggaaaattaaaggagcttcttaatgattaaagtggtgtttgagataagaattaataatttttcaaaatatgtttaaaaatactaatatattgaaaaattatcatccatgattataggtaaaaagatcacattttgtaatggacttaataagataaatacacgtggcatcctttaataggatgaaatgcagtttttgacatcaccatagcaagttgtagtattttagttagattttagccaacaatattaattaacactaattcaaagatttaccataattcgttatattatccggatcaggttggatcgggtcggataaagtagcgcgtgagaagggatgggccttgctattacgaaaacggatatgcgatttctgttccacattagaaaacgacgttctcattcttaactctctcgtttcatgaattatattgattgcatattaacgatgattatgtaatatctaacctcctaattttggtctctttcattaaagctttttattgggtgatacaatgaaaatatttagtataattcaaatacatcaataagattcaattgtgctactactataaccgaaaaataatttccctatagaaatttaaattgcatattgtaaagaagatagttattcttcattatttattttttactgcctaacttgattaaaatttactttaaataacttaaccacaactaagcgattaacgttcataaaaagatactcatcctatattttcatattgaagatgagaatttttcttttccaacctactaactgaaaatgacgtgcttactaaaactctaatgatatgtcggtttcggtggtaagattcaataaatacaatacaagacacacattatctaatggctcttttgttttcttgcctacatattatgacatttatttagttttccgctgtttgtttatttagatctactccacaatagttgacgaagatatattatacgcgtaaatagaattgaaaaatacgttaatatacggagacgactttaatttgtagttgccattagtttggtaagcactagatcgacaataaagtgagtagctggtaaaactaattaacaatataccaacttgagttaattcgtcaaagagacagctacacaaataaatcaatcaataggcatgaactaactgacaatatatgccgcaacacgagctatatatatccgtctatgatacatatttttctttatatcaagcttttcaaatgtataggtataagaactcaattttatgattatcgcctctacacgttgtttttgtgcttttttttttctacttttgtatatatttgggtcatgcgtgaagcggtgagagtactttcggttggtggaatgtcacgatgagcttcatcttttgaccttatcaattctagtagcggttcctgacatggaaattcacgtatacatgatacgaaaactgttacatttcgtcactttcgtcaatatttctacgcatattattcatatatgttatctattttcttcgtatgtttcacaaaaaacgtattttggactttctagggtttgttaaaatctctaatagtttattcatagtatatatggaaggaatattgagacaatattactcgaaattttaattatgcatggatatattcagaccaaaatgtcaattagcctccgaaatgtataaaacaagataaaggatttatagtggtcaacccattattgttataataaaggattttgtagttaactatgatacattgtaacacatttgaattttgtggcagactagcgatgattttctgaatgacctttttcaaatcaattgttacttgtaaaaatttgtcattaacaaccgtaagtgataatcggtagttaaatattccttccatatatactaatcaaatgcagcggttaaataattgataggaaaaaaaacagcataggcattgttactttgtgtttacacttttgaataaaaagtattattaagtaaaacaaataaataataaaaaatattattaaatcttggaataaagtacaccaattttgtcataaataattaactccggcaaaactttaaagataatggagccacactatgtcacatgatcgatgctccctctaatccgcaataggtgcttacatggatgtttaaaccgaatttaggcggacgagagttcttagttgtttatatatacgtaatttgttttgttgtatatgtgcagtaacaaaaataacatcgctttaaaacaaaaaaaattgaagtggtttagcataattttagatattaattaatcttggtaaactcttaaaaaaacagttttgttttagaatattaaacaaaaatacataattgaatatgatgctcttgttacgtggatttccacacatggcctttttgggacattttgattttccacgtctcaatatttcacacgcctacttatgtgatgactgatgcgtgattagtcaattttctgtattaaattactgttttgtttgtttgtcaccattctctgtatttccttaaagagtaaaagaaagtaaaaatttagtcaccggttgagtttttttctttccaaacaagagttttaatgatggagtgagtttttcttgtactttgtcatgttgttatggtagttgattcttgttatatcgatatataacatgagaactctttttaatacaaaactataaattatacgtgttgcatgtttgaaaactatattatcactaagatcaatagatctctttagagatttgacaaaaataaacaaagacatatatataaattttttggatatttttatggactgcccagttttcacatgataacacatgaaccttcgtctcatatacatgtgccatcttttactaatctaagattgcattcaaagtaatcagcctccatgtcattgtcaccatttaaagtttttcccattccttgttcattattacacacacattatatttgtcagcgattattaatgttgaggtattaatattttgacaattttaattcttataataaacaaaaacacttgcattcattctcaaattaacaaacgcaaaagaaagcatgagaccattgtcttattacgttgggcttaggaagtatgtacaggcccagcccaatccatgtacagagtcggtttcgttattggatccatagtttcaaaacggcatcgttaaagttttccaccttaaggcggtatcgctagcttatagaaagaattcgcagtcgaataaacgaaggagtgtctcctttagtcatttaggtcgattattaggagatagaggacgtgagaagggagagatctgagtctcctactagggtttcttctactggattgattcgttgcagagagtgaagctaagaagagattttcgtagctgtttctgtaagttttttttaatctccgtttcctcgatttgggtgtggttttattagggtttatcatctctgggagcttcttcgtttcacttttggttcgtttcttcgatttgaggttaacattgtgtatttttttttgttcctgtttgatttggtttctaggttttcggattggtagatggcgaacttgggaggcggtgcggaagcacatgccaggttcaagcagtatgagtacagagccaattctagtctggtgttaactactgataatagacctcgggatactcatgagcctacaggagaaccggaaactctgtgggggaaaatcgatccgaggtcttttggtgaccgtgttgctaagggaaggcctcaggagttggaggataagctgaaaaagtctaagaagaaggaacgtgatgttgtagatgatatggtaaatattaggcagagtaagaggcggcgtctaagggaagagagtgtgctgactgatactgatgatgcggtttatcagccgaagactaaggagacgagggctgcttatgaagccatgcttggtcttatccagaagcagttgggtgggcaacctccgagtattgttagtggtgcagcggatgagattttggctgttctcaagaatgacgcatttagaaaccctgagaaaaagatggagattgagaagttgctgaacaagattgaaaaccatgagtttgatcagcttgtttccattggaaagttaatcacggacttccaagagggtggtgattctggtggtggtagagctaatgatgatgaagggcttgatgatgatttgggcgtggctgttgaatttgaggagaatgaagaagatgatgaggaaagcgatcctgatatggttgaagaggatgatgatgaggaggatgatgagcctaccagaactggaggcatgcaggttgatgcagggataaatgatgaggatgcaggagatgccaatgagggcacaaatcttaatgttcaagacattgatgcatattggctccagagaaagatctctcaagcgtatgaacagcagattgatccacaacaatgccaggtactcgcagaagagctactaaagatactcgctgaaggggatgatagggttgttgaggacaagctgcttatgcaccttcagtacgaaaaatttagccttgtcaagtttctgctgcgtaaccgtcttaaagttgtgtggtgcactcgtttggctagggcagaagaccaggaagagaggaatagaatcgaggaggagatgagggggttaggcccagagttgacagcaattgtggagcagttgcatgcaacaagagcaacagcgaaagagagggaggagaacctgcaaaaaagtattaacgaggaagcccggcgtttgaaggacgaaactggtggagatggaggcagaggcaggagagatgttgctgatagagattcagagagtgggtgggtgaagggtcagcgtcagatgctggacctggagagcttggcttttgaccaaggtggtcttctgatggcgaataagaagtgtgacctcccccctggctcttacagaagtcatggcaagggatatgatgaagttcatgtgccttgggtttctaaaaaggttgataggaatgagaagctagtgaagattacggaaatgcctgattgggcgcaaccggcttttaagggaatgcaacagttgaacagggttcagagcaaagtgtatgacactgcgcttttcaaggcagagaatattcttctttgtgctccaactggtgctgggaaaaccaatgttgctatgctcaccatactgcagcaacttgaaatgaataggaacacagatggaacttataaccatggagattacaaaattgtctatgttgcacccatgaaagcccttgttgctgaagttgtaggtaatttgtctaatcgtctgaaggattatggagttattgtgagagaactcagtggggatcagtccctaaccggaagagaaattgaagagactcagataattgttacaacaccagagaaatgggatatcatcactaggaagtctggagaccgaacttatactcagcttgtgagacttcttataattgatgaaattcatctccttcatgacaatcgagggcctgtgcttgaaagcattgttgctaggactcttaggcaaattgaaaccacgaaagagaatattcgtctggttggtttatctgctacattgccaaattatgaagacgtggccttatttttgcgggttgatcttaagaaaggtttgtttaaatttgaccgcagctacagacccgtgcctctccatcagcagtatattggaatcagtgtgaagaaaccgttgcagaggttccagttgatgaatgatctttgttatcagaaagtattggctggtgctggaaagcaccaggtccttatttttgttcattcaaggaaggaaacatcaaaaactgctagagcaataagggacactgcaatggcgaacgataccctcagcagattcttgaaggaagatagtgtaactcgtgacgttctccatagtcatgaagacattgttaagaatagtgacctaaaagatattctgccttacggttttgcaattcatcatgctgggttatcaaggggtgatcgtgagattgttgagactcttttttctcaggggcatgtgcaagtcttggtttccacagcaactctcgcatggggtgtgaatctgcctgcacataccgtaattataaaaggaacccaggtgtataatcctgaaaaaggggcgtggatggagctgagtcctctagatgttatgcagatgcttggtcgtgctggaagacctcagtatgatcaacatggggagggtataattataactggctacagcgagctgcaatattatctttctttgatgaatgagcaactacctattgaaagccagtttatttccaaacttgctgatcagcttaatgctgaaattgtgcttggaaccgttcagaatgctagagaggcttgccattggcttggttacacgtatttgtatatccgtatggttcgtaatccaacgttgtatggcttagcgcctgatgcccttgcaaaagacgtagttttggaggagagaagagctgacctggtacggaatttgttcatctgcataaattttggcttttgctatctactgtcacattatttttctatagttaaatgcccataaatactatgcctagtatctgaagctttcatacagcctactattatgcagcctgtgattaattgtgcgtattttttatcactgctctgaaagttacttttatttgtgttaatattcttagtgaagagtttgtaacgctctttcatatagtatcattgcccctaaatattatgcctagcatcagtagctttgcctccgtgattaactgttgggatcacttgtgcatcatcatgtactgttgggatcacttgtgcatcatcatgttgattactaatctagtaacagaaatttctttttgagtattttgaatggggagtatgtacctgattatttaattttatttctctgaaaatgacgtttatttatttgatatcatttcccataaataatgttcctagtgtcagtagctttctcactgtctattacatgcaatcaatgatgaactgtttggtgtttgccttgtcttcttcaagttgatgacagattagtatttcatatatctttttgagatttccgaacaatgagtttgcattcggttatgtaatatcattgttctaaagtttcatatatcattgatcctttaatggcgagctgtgtctaatatttgcttgaatccttgtttttgcagatacattcggctgctactatcttggacaaaaacaacttggttaagtatgacaggaaaagtggatacttccaagttacagatttgggacgcatagcaagctactattacataacccatgggaccatagctacatacaatgagcatttgaagccaacaatgggtgatatagatctttatcgtctgttctccctgagtgacgagttcaagtatgtgactgttcggcaagatgagaagatggaactggcgaaacttttggatcgtgtcccaattccgatcaaggaaactttggaggagcccagtgccaaaataaatgtattgctgcaggcatatatttcacagctaaagcttgagggtctttctttgacatctgacatggtttacattacgcaggtttgttctacactttcttctctcgtcccttctagttacattgataaattagctgtatctattttctgatacttatatttcgttcctttctatcatttttagagtgctggacgtcttgtgcgagctctttatgaaattgtattgaagcggggatgggctcaattggcagagaaggctctgaacttgtctaaaatggtagggaagaggatgtggagtgttcagacacccctgcgtcagtttcatggactctccaatgatattttgatgcagttggagaagaaggatttggtgtgggagaggtactatgatctatccgcacaggagctaggagagcttattcgcagtcctaagatgggcaagccgcttcacaagttcattcaccagttcccaaaagtgactctttctgcacatgttcagcctattactcgcactgttctgaatgtggagcttacagttacacctgatttcctgtgggacgagaaaattcataaatatgttgagccgttttggataattgtggaagacaatgatggtgaaaagatccttcatcacgagtattttcttttgaagaagcagtatattgatgaggatcacactttgcacttcactgtgccaatttttgaaccgttgccacctcagtattttgttcgagtggtttcagacaagtggcttggctcggagactgtgttgcctgtatctttcaggcatcttattcttccagagaagtatccacctccgacagagttactggacttgcaacctctcccagtgacggcgctaaggaatccgaattatgagatactctatcaggatttcaagcatttcaatccagtgcagactcaggtctttactgttttgtataacactaacgacaatgtgttggttgctgctccaacgggaagtgggaaaactatttgtgcggagttcgctattttgaggaatcatcatgaaggacctgatgctacaatgcgtgttgtttatattgcaccacttgaggctattgccaaggagcagtttcgtatctgggaggggaagtttgggaagggtcttggtttacgggttgttgagctaactggggagacagcattggatcttaagctgcttgagaaaggccagataatcataagtactcctgagaaatgggatgctctttcccgcaggtggaaacagagaaaatatgttcaacaagttagtcttttcatcgtcgacgaactccatctaattggaggtcaacatggtccagtgttggaggtaatcgtttccagaatgagatatatttcaagtcaggtcattaataagatcaggattgttgcgctatccacttcgcttgcaaatgcaaaagatcttggggagtggattggggccagttcccacggccttttcaacttccctcccggagtccgtcctgttccactggagatccacattcagggagtggatatatccagttttgaagccaggatgcaggcgatgaccaaaccaacctacaccgccatagttcagcacgccaagaacaagaagccggctattgttttcgtcccaacccgtaaacatgtccgcttgactgctgtggatctgatggcttattctcacatggataacccgcagagtcctgatttcttgttagggaagctggaagaactggacccttttgttgaacaaatccgcgaggaaacactgaaggagacactgtgtcatggtattggatacttgcatgagggtttaagcagtctggatcaggagattgtgacacagctctttgaagctggacggattcaggtttgtgtgatgagcagttcattgtgttggggcactccattaactgcgcatttggtggtcgtaatgggaacgcagtattacgatgggagggaaaattcacattctgattatccagtccctgatctgcttcagatgatggggcgtgctagccgaccacttcttgacaatgccgggaagtgtgtgatcttttgtcatgcaccgcggaaggagtattacaagaagtttttgtacgaagccttccctgtggaaagtcagctccagcatttcttgcatgataatttcaacgcagaagtggttgctggggttatagagaacaagcaagatgccgtggattatcttacatggactttcatgtacaggaggcttccccagaaccctaactactacaatctccaaggtgttagccacaggcatttgtctgatcacctatcagagctggttgagaacaccttgtctgatcttgaagccagtaaatgcattgaggtagaggatgagatggaactctctcctctcaaccttggtatgattgcatcctattattacatcagttataccaccattgagcgcttcagttcactgttgtcttctaaaaccaagatgaagggacttcttgaaatcttaacatcggcttcagagtatgacatgattcctatacggcctggcgaagaggacaccgttcgaagattaatcaatcaccagaggttctcttttgaaaacccaaaatgcacagaccctcatgtgaaggcaaacgcgcttcttcaggcgcatttctcaaggcaaaacattggcgggaacttggcaatggatcagcgtgatgtccttctatctgcaaccagacttcttcaagcgatggtcgatgtgatatcaagcaatggctggctgaatcttgctctgctagctatggaagtaagccagatggtgactcaaggcatgtgggagcgggactccatgcttctgcagctccctcacttcacaaaagacttggccaagaggtgccaggagaatccagggaaaaacattgaaaccgtattcgatcttgtggagatggaggatgaagaacgccaagagcttctcaagatgtcagacgctcagcttctagacattgccagattctgcaaccgcttcccaaacatcgaccttacttacgagattgtgggcagtgaagaggtgaacccagggaaagaggttacattgcaagtgatgcttgagagagacatggaggggaggacagaagtgggacctgtggattcactgaggtatcccaagaccaaagaagaaggatggtggctggtcgtgggcgacaccaagacaaaccagttgctggcaatcaagcgtgtctcattgcaacggaaagtgaaggtgaagctggatttcacagcaccgagtgaaccaggagagaagtcatacacactatacttcatgtgtgactcttacttggggtgtgaccaagagtactcgttctctgttgatgtcaaaggatccggcgctggagatcgcatggaagaatgatttgttattcaggttagttccacagttttctggtcatagttttcggatttagattctgtacatggttgtagtttttgtgttacgaacttggctttactagattctgctatgtgcattgaccaactcgctttcatctattgtttgagtaatttgttcatcaatctgctatttttctgtttcgtctgttttctttttgcatgagctatgtattaggttttactcttgagcattgatttacttatctaggtattagaatacaggtatgctcatggtatatatatacctagtattgtgaaatgattgattgataagttagtgaacaatgttgatcagcaaattgttagaaatctgtataattggatggtgatttgatgtgtgctttggatggtgatttgatatgtgtgcatcactgctatatgaaaactgctttcttgaatcatgtctcataaaaatctcacatgatgttcctttaaaatagctgataatagattttgtattttgaaatccagaaaatgacacataatttctcttctttgcaggctatgctgattctggagagtgtgacttgtcttccaaaaagcctccgtaccgtttgggtctctgcaatcttagctctctgagaatatatattaaggtgtaatcgtttttttctggtcttttactattccaattactctttttatgtcgtgcatcgatttttaatcctatgtatggcttgtttctagttttgtttggaccaaactcgacagaggagccaatgtcaaaactacaatttgagtttgtgactttgaaagctgagattacttgaaagaattttaaatgcagcagtgttcattttgtaacatctgagttgtgtgatactggcttattgagtcaccgatagtttttccttaaaactaaaatgtactattgcaagtaaaaaccaaacaaaaaaaattcattcaaacttgcattataaccaagtaaacgtgatcaatagaaacttgcaaaatcacaaccaaaatatttgtccaaacaatatgtagtcaaaacagtctgttgtgttcataaaaaagtcatataacgatacaccaaaaagaaagaaacggaggtgtttggttggtagtatattcctcctcctcctctttcttcttctccctcctcactatatattttgaagtttattaacaagaaccaaaaaaagtcacactcgaagtctcacaccacaccaaccacttcttcttcttcttcttcttctacataaaacctaacgccatggattcagatttcggaatccccagagaactctcccctcttcagcaacttcgatctcagtacaaacctgagcttcctccttgtctccaggtcccttcttctacttcatagatctacttccttccattgttcctatcattggatttatttgagtacttagtttcttattcaatattatcattcttggatttctgcaactattccaagtttttgtttatcttaattcgatgaactttgctccttaagcagatctgatttctagattgtattgttctcggatctgttttatttcgattcctaagtttcattggcagtctcttcagctttaatcagttgaactttgtcattttcttattctgcttgaaattcgtttcaggggactactgtccgcgtggagcttggtgatggaaccactgtggctgaagctgctgattcacataccatggctcgtgctttcccgcataccttaggccagcctttggctcacttcctcagggaaactgctcaagttcctgatgcgcacatcattaccgagcttccttcagttaggtgtgtgaatctgtttgctctctatctatatgtttctggattggcgtttgtgtttgatttaagttctattcagcttaagttagttctttttctactgtagagttggaattgtgttttgtggaaggcaagctccaggtggacataatgtgatctggggtcttttcgaggctctcaaggtgcacaacgcaaaaagcactttgctaggatttttgggtaagttctattattttttatacaactgcatcatttgccagtttagagattttttgttagacttaagtaaaatttgttgttgactgataataggtggttccgagggtctatttgcacaaaagactctagagattacagatgatatacttcagacttacaaaaaccaaggtacttgtttgatcaaggcattgtcgtcaaatgcagaatctcccgttcattgcttcaagttctgatatattggtgttgaaatgtatgttgtaaggtggttatgatttgctcggaagaactaaggatcagatcaaaacaactgagcaggttaacgctgcactcaaagcttgcacagatttgaagttagatggccttgttatcattggaggtacctagcgtttttacttatattcattggcaaatttttgtctttaatttttactaaaccaagaatatatattgtggtttttgaaggcgtaatatcaaacacagatgcagctcatctcgctgaattttttgctgctgcaaaatgctcaactaaggtcctaatttctttttctacagtttcattttaaattcctttataaaaatgctacggtaattaagctcctatgaaattacaggtggttggtgttccagttactacaaatggagatctcaaaaatcagtttgtggaggcaaacgtgggttttgacaccatatgcaaggtaaaatgtaaactttaaccatctggttactttgtcttagttatcttttgtagctattgcagcaacatgatgccgttgtccctcgtaagtctttgcagaaactatatgttattgtttgctaatgatattttgcggcatacaggtgaactcacaactcattagcaatgcctgcactgatgccctttctgcagagaaggtaaaagctatttcttcctgaactttcatgttgcaagagattgctagggcattcttaactgcagtttattaacttcatattctgataagacgaaatatttcgatgaaggatgtgaaagcagaaagctactacaaagttatattctttatgattctgatatcaagttctactttcttttttatttgcagtattattatttcatccgcctcatgggtcgtaagcactctcatgttgcccttgagtgtacactccagtctcatccaaacatggttcgtaactgtttcagtttcgaaacatagactattgattctgttggcatgttcatgctctagactctcattatcgtgtcatccgattgtctcaggtgatactgggcgaggaggttgcagcatctaagctcacaatttttgacattgctaaacagatctgtgatgctgttcaagcaagagcagtagaaggtctcgtaatgaaaaccatctatgattagattatgcaatcatgtattttactgtgtttactaaatctggtactatttcatttgtttgaaccagacaagaatcatggagtcatcctcattcctgaagggcttatagtcagtattcctgaagtctacgctctgttaaaggtaatgatttgatacttgtttctttcttcaatactgagatgtacttcttagtataaatcacgtataagctgacatttgtttgatgtaggaaattcacgggctgctgaggcagggtgtatctgctgataagatttctactcagctctcaccttggtcatctgctttgtttgaatttcttcctccattcattaagaaacaggttcaaattctttgaaattagaattatctttgttttcgttcaaagcaaaggtgtattaatacatataagatggtcgcctttcttgctacagctacttctccatcctgagtctgatgattctgctcagctatcccaggtaattatgaagaacaaacagaatattttggacctactatgttataaaaaaaaagttggaatcctaaatgctctttttgctttctactctagattgagacagagaaacttcttgcgtatctcgtggagactgaaatgaacaagcgcttggtatgctccaattttatcattggtttctatcttttcccaatactgttatctaaataatggagtcattatttggcatcaaaaaatactattgctaatgtaatgaaatctttgaatttgacagaaagaaggcacatacaaggggaagaaattcaatgccatatgtcacttttttggttaccaagctcgtggatctcttccatcgaaattcgattgtgattacgcctacgtaagtcactaacagtctgtgccacagtaccaatgcaacttcataatttagatgaatattaacactattgaatgggagaatcatgcaggttcttggacatatatgttaccacatccttgcagctggtctgaatggttacatggcaacagtgaccaacctaaaaagtcctgtgaacaagtggaaatgtggtgctacacctattacagttgagttttgtcgtattttctatctaaaagacggcggttaatacagtgtatttctatactaattccccattcttttatctctggtattaccttttaggcgatgatgacggtgaagcattggtcccaggatgctagttatactttaacttcaattggtagacctgcaattcatccagctatggtggatttgaaaggcaaagcatacgagtaagtcagctattacagaaaacatgaacacactcacgtttggccttatttatcaattgtttgaatgtgaatggttttcttgcagcctcttgagacagaatgcacaaaaattcttgatggaagatctgtacagaaacccaggaccgctacagtacgatggtcctggtgcggatgctaaagcagtgagtctctgtgttgaagatcaagattacatgggacgtatcaagaagctgcaggaatatcttgaccaagtaaaaactttttgtttttgtgtttttctctgctaatttcgtcaagtatcgaataatgttcttcgccactttcatatttattaacatttttggggtttggtcaggtgaggacgatagtgaaaccaggatgttctcaagacgtattgaaggcagcactgagtgtgatggcttcggtgactgatgttcttactactatttcttcaaatggtggtcaatgatttgcttaaaacttaaggacaaagctcttatgaatcacacacgtcgtgtttgttctcttctttttgttttctttcttttgagatgtaacttttgttgtattttttaagttattgagtttggaaagacataaaaattgaaaaggtttggattatagaggcgctatttcaccatatcaatccttgtccaacttttatttttcagtttcactattattacaaactttttttaaatatgacaattaggcatgcatgcatgatgcatatagcaatagcatcgcttgaacacgattttgtttacaaaaagaatcattaaaattttaagagttacatttttaatcttaactacaccaaaatactagaaatacagtgtatcttgcaaactaactttaacaaccaatgacgtgtcatgttcccaaatcccagttataaattttgatagatttttgacagtatcttaggtacagctttggcataaatacacttttatttattttaaaaactatctttagcctaaatacattgttagttatttaaaaattagaaactaaatgaagaaattatttagatattaagaaatatttatcattaaaagatattagattttgtcatttttttatattagtaaattttctttgttcaactaatgaaattaataactaacagattattttgcaaaatgacaaacctataaaatatatattaatatttgattttcaaattatcttgcaaaatcattcaaaaatttaactaaatttatattaatgttgtatttgaatttttcttataatggtgagatactgagattatccttgattagaattgattgttacttttttttggtaataatatgttgtctattattatatatatatatatatatatatatatatatatatatatgttgaaaataacacaaaaatattcacatacgccaagcaaaatagaatcatgaataatttgccaagaaattctcaatttgattcatcttccatcatcaatgatttacctttagaccttctcgacgagattctcttcagattagaacccaaatctatggctatgatgcgatgcactaacaattctatcaaatcatatttaagtgatccaagatttggaccggaatatccttcatgggtcagacctagtttgtttaaccttggtagctatggcgctacttatgtatgttgccatcctttggtctcttcatgcgattatatgtcaccgggaaatggagtagaactgtttgatggtagtgcggattgttacattttcggctcatgctctggtcttctcctattgtacattggttgtctctttgttgcaaatcccttaacaaaaaggtttcgaatcctggatcattctggatcaaagcttataccaatgatagttaatggtggacttaaaggtcttagcggaattagttatcctggaggtaatgttgcttgtacggaacgagcgatgtgcgttggatttgcggtaaatcgaaatctaacaaccaagagattcaagatcgtgggcatactcgagatggaaaacgtatacggattcgagatcaacgaaggagactcttggagattatcggaaacgagtatcaccactagctcaaaaagtgatctcactacgcggatgaaacctgtttacttggacaacactcttcactggctgagaaacgatggcagcatcatgtcttttaatcccgagacagagcaagcatgcttgattccttccatatttcatcgggaaccggatacgaagctacttttcgcggaaagcgttaagatcaatcgcctgaccctaatttcggggacgatagaaacaatctccgtttacacacttgtcgagaatcacaaatggacactcacaaggcggatcaagaacatatctatcgaggaagaaacgcttgtatattggaacatagctatgtacgatggcaagtgtcttgtggtgagggtgaaaaagatgggtttagaacctttggcaagtgttcttcatgtgtacgacatggaagctaacagttggggagttttggtgtcaacccttgcttggcccaattgcgtccgagatttctataaattgacgccctccttgttctttgtagaggaggatgagcaacagaaggtgcttgttgcttctaatgaccgacgcatctcctatataaattcgattatgggactcattgataccaccaagtaaacatttagggcctatagattatacaaaaaatgtcctgatttataagaatgtttgtttcccatttgcttttatcattgcactattatggtttatgtatttcaaatctaaaaattagttgtatattactatttcttttgggacaaaaaatcatttaagacaatgttgtttaagaacttgttcttctctggcttgtcaatttttcgtcctgcccaataaaggcccatcttgtgtgttttgtcgaatctaacaacaaactcacaccttttgaccaaaaaacaaactctccccttttttttttcctttcgtgtagctaaaccgtctccggatgttgacaaacattggttattcactttttccacgtcacacttaaaaacagaacataaaaaaaaaactaatgacgacgctccagttttgaattttgaaaaaagaaaaaaagaaccgttgaaaaaacatgagtgctcaaagagggaatatacctttttaataatctccttcctatttaaaccaattctcgaatctaattacatttcctctctctttccccaaattgaaaacaaaatctgagattcgcgaaggaagaagaagagttgtcttgagagattgatagagatggacaacaatggagttaaacccgctgtttccgccatggaagcctttgaaaagcttgagaaagtaggtgaagggacttatgggaaagtttacagagcaagagagaaagctactgggatgatcgttgctttgaagaagacgcgtctccatgaggatgaagaaggtgttcctcccactactcttcgcgagatctctatcttgcgtatgctcgctcgtgatcctcacatcgttaggttcgatttccttttacatttctgattcggttcagtcactttctgaaattctccgatttactggttttgattgtggatttaggactcaatttcgatttctagggtttagtcccgattaattgatgtctcaattgatttgatgactctgattcttcctgcaaatcgcgcttagtgtcgctcttaggtgttactggtagatcttagtttcagtttgctatttgttgtgtggtccgatcgagataaaatgggttccttatcttatccgaatactagaaaatgtcaaagtagaagctctgtgttgtgatctcagtttcaactatttttgtggtgattgcatttctactgagagattattgttatgatgattatcttcttctacaggttgatggatgttaagcaaggaataaacaaagaaggaaaaactgtactttaccttgttttcgagtatgttgatactgatctcaagaaattcatcagaagctttcgtcaagctggacagaacattccacaaaatactgtcaaggtttggatatttggagattttgttctgctttttttctctcatccgataagcccctttaagctaagagaaacatgttcttgaattgcagtgcttgatgtaccagttatgcaaaggcatggctttttgccatggtcatggagtgttgcacaggtaaaaatcgtctttgttttggaagaactatgacttgagataacccattttgacacagatctctaatcctacttgtcttggtttcattacagggatcttaagcctcacaatctcttgatggaccggaagacaatgacgctcaaaatagcagatcttggattagccagagccttcactctcccaatgaaaaagtatacacatgaggtatataagtctacgttgatgaaacattagtcctgtttcattctagtttttttttttttttttaattctatcttagtttatctggagttataactcaggatgattttacccccatgatttcatttgcaacagattctaactctatggtatagagctccggaagttcttcttggagcaacccattactctactggagtggatatgtggtctgttggctgtatttttggtacaaaatcttctcttacagtttcactggtttcagttcaatgtcactagcaagaactaacagttttgtttcctttttgatgtgtagctgaactagtgaccaagcaagcaatctttgcgggagactctgagctccaacagctcctccgtatattcaggtaagtctttgtgttcatctttacctttaagacacaaacatgacattcgctaacttggttgttctgtttctttctttcctgtcaaactcaggttgttgggaacaccaaacgaagaagtttggcctggagtaagcaaactcaaggactggcatgaatacccgcaatggaaaccgttgagtctctccacagctgtgccaaacctcgacgaggctggacttgatctcttatctgtaagtctctagtgtctaacacacctctcagaccttgcttgattagtagataatcactctgctgagactaatttgtgtttctctttgtgcacagaaaatgctggagtacgagccagcaaaacgaatctcagcaaagaaagctatggagcatccttacttcgatgatttgcctgacaagtcctctctctgaggctctctttataaactctcaataggatattttgttctatctctgtctttgcttgtctcaagcatttatctgctatcttaggatgattgaagtttcaatattcccttttgattgggtctctattcccaattgtataaccttccaacatttttatcaatgaaagaatatatcagtttctctaatatttcaaagtagcaagatttgcaactgtttcccatttgtgtaagtgtgtgtgtgtggatgttcaggctacgagccacatgaagaatgttggccagacagtgagagaaactgaagccaaggcataactccagaatagaatcacagagcattcactttctcctgatccgaatagttgagtgattgtacctgccaaaaggtcaagtgagtttatgagaaagacagtgtgatgacatgttttggtagtatttttgtgagtctgaagaacgaaccaagattcatcgctgggggaacgacatactgaagcagaagaacaaactggtaaagcggttcggatgtaaccaaacccaagtaatgcgctcctcgtactatgaaaactcctaatattggcagcaacaagtaacgcacaaccaccacacccattatgactgacttgtttattcctgaacctctcagacctgtgattattataagagagagaacagagatttaaggttttgtcttaggaaaaaaagtttctgcagccatttgttattgtttatctaccattgagaaggtttcctccaacaatcagagtcagaacaggaatcgccccgtcccttcaagaaaattaagctactcaagtaagcattgttaattatcactgacaagtgagatttttaatatgttgtagaataccccaatagagatactgagtcctcaatcactcgaagtggagctgtgttaccgactagtagcttccgtagtaaaggatttaacccaaccgcaagcgcgataagctgaagagaaagaggattagttgcttaactagtaagaacatacagaagctagatagcagtcgtttagttcaagggaacattgaaacaaaccgctgcaatagttgaaggagcaaatattgttcgtagattgattttctctgctacagagcacactctttgtttgaccttgccccaagtcccaaccttgtcacatatacattctctcaaaatcagtaagttggctaacaagaatataagaaggaaaagtttagactaatacctgttccgcaacttcgactttgggagaaatcagtggcattgtagacgaggtactgtttattgcggtttctccagcaggatttgctagcatccgcataagattgtatacataagtccatatgtaaatggctccaatctgatatacatcacaaaacgtttttgacttgtattggcattaaaaaaaaactttagtagagaagcataagaagtagttaagaaatggtgacataccgccatagagagtgcaatataaccaagtccaaatttctcacaagactcaggatctccaaaaggacttcccttttcattacatatagctgggatgataatgagtggcatattccccaaattccctgttggattacacaatctcatcactgaatctaagaaaatgaaaacagcttttgtaagatgatattaaagttaccagcagcacaacaaccaacgatgatgccacggagatgcgaaggaggtttagtgattttgataacaatccaacccaaaaacgaaccaatgatgaatgttagcaaaacattaagtggcatgaaccacctgaaaatgaccccaacaaaatcaacatttcattttcaagaagaatcagttctttgaataaaaaacacttacattttcaccatgctttcgtatgtaatagtctcagataaactgcttgcaacaagagaaggactaaacacatagaaaactatctgtagaaaccaaaactcataagagaataaattaaccaaaattggtgaatggctatgcatgtgacggaaaacactgacattgttgagttgttttcttgcatcgtgattgagaatgttaacttgatcaagagccaagtaaaatccaattcctgttatcaacagaatcttcgcaactggtatcgatgaggttatgaacagatccaaaagcctcatcctcatcttcgctttcaatctgataccaaagaaaccaaaacaatatcttctatagaataaccagttatgcattcaaatcgagaagaatagaaatacgaaaaacattgaaatcgtgtgagacgtgatgatgatgacttacggaatagaaagaacggagaatcgagaggaatagagagatcgatcttcgtattctctggtttatcgagctaagaaacagagtatcaattatgaaacgtaaaatccagaagatgagaaacttgggagtggtagttgtggttctcgcatactttgctttgcatggcaattcggttatagttttagtagttaactacctaaaaaagaaagaattgtggatatagtataaatattttttcaaatcattttctattttgttccttcttttatattcttgtatgttgtattatctagagaaaatacagttaacaaaacttacaatgattcaatttccgagtagcatttgagaacattggatatattcatattgaattgaatacaattgtctttaactctacgttgtttacaatgcgagtccccgtgaaatggtgaagtgtcatataatcttgtggttatttttccgatactctggtgaattatatgcagttttgctgattgtgtcaaagacattagagttgtgcaatgctactctaacatttggagtgaatagaatgttccatcccttttccagaaattactcttaacattctgacacttctttatgttcattgtttgataaaggtgcggtcacacaaatcgactttggccaccaacaacctttcatgtggatcaagcttctctattgtctacgagaatagccgtttatcatcaacacataatagaccatctgtttcactgtttcagaagcattagttttaaattttgatccacaaaacttgagtactactatcttgattcataaatcctatgtctactacatactgaatgcaccatccccttttaccattactcggaaagcatccttcagcgtttaagtaggtcgcaagtccatgaactcccccagtagatgtaaacttttccctcaaaagaatattggtcaagcagatatagtcggagcttcacagacataggatccagaaacataactgaataagctccaagtcttacccattggagaggtaagaaaagctttgccttgtctatcacaaaaaattacatatcatctctccgggagcttcatgtttcacagatttcccctgcagaaaagatgccaaaagctgtaaaacggggaacttgatgcaagaaactaacaagcatagtgccaaacacaacctccatcaaactagattttacccatcatttaacagccaccacgcggtaatgctcattagcaaacccatcgaggacattgtataaacatgacaaagaaaaagagaatagaattaaaaagaggaaaagagttgcgggatgagaaacaacaagcattatgagaccatgtctctaatcacgacaagttcaagtctgtaaaaagatttagcaattgtgcagagattgtattccacaacatcaaccaataatacttgtttaataaaactctcagtgatttgaatcccttataatcacacacctcattgttgctttcctgttaaaagacagaaactaaagatccataagtctgaactttgagattaaaagagttatgtaagaaagaaaatagtctgcatgcaaggctaaagcaaagcatttagcataaatttatcaccaaagattgtaaattggactagaattctcgacttacattaaaggactgagtatctcccggatgctcctccaggaagtgaggacatggcctgattcgtaatgtcttcaagaacacgcttgagttcagcttttgcgtgcttaactgatttttcgctaggcccttcaatgaataagtacagcttccgttccccaggtcccggtatacgtcctgtaggataaaactgacccctggtggtaatagcagctccagtccactctgatattggacccaaagtttctttatgggtgaccttccaacgagcattttgtgggaagtcattgatttcaagttctgcttcatagtgctcaggcattgcatcagcttgaatctttgccagattatgttgcagattcatggcagcaaccatggctgcagcacggcctgccccttcactaggaagggtaggaacagtaaccggaaggacacctggcatggcagcaagcccgccaccatttgccagtaattggttagctgtcacaggagcactcactggagcagcagcagcagctttggcagcagcagcaatggcggctatctgagcaaaagtagcctgctgctgtgagatctcaccaccacctgcctttcttactacatcattctcatcttctgagtcagacttgtcttcctcaaagccatactcctttgcttgtgctttctttgctgcttttctaacttcttcctcctcttcgttgaatttaaagccactaccaccatagccagttccatgagcttgctcaataccctgtttcactttcaccatgaaaccatcagcaagtgctttcagatcatcaggaactggctgctcagaaagctccagggccttgactaaatctggtgcatattttgcatcatcctcggagataaatgtcacagcacagcccttacgccctgccctgcctgtcctgccaacgcgatgcacataatcttcatagtggttcggcgcatcaaagtttacaaccaactcaagctctttcacatctagacccctagcagcaacacttgtggcaatcaacaaattgcagacatcgttcttaaaatcagatatagttgattcacgatcggtctgatccttacccccgtgaagagacagacaagggtaactagatttaatcatatccctatacaaggcatcacatttttcctgcgactgaacaaagaccagaattttccctttctcagaccattccccaagaagttccagaagtctaaggaacctatcactctccggtctgacttcaactaactgagttatatccttattcacaacactccttccaccgacctgtatttctacaggcttgttcaagactttacgtgccaaagtttcaacttggcgtggaaaagtggcagaaaaaagcacagtttggcgttccggtcgaatgttctgaataatacgagtaatttgaggctcaaaacccatgtcaaacatacgatcagcttcatccattaccaaaaatgtgactcttcgcagattagtgattttcccactgcttgtgcaaaggatatcaatcattctcccaggagtgcacacaacaatctcagtacctcgcttaagttcactaatttgctgggcaactcctgatcctccatacacagggacgcatcttatacccaatggcttagaaaactttctgatatcgctgtgaatctgctgaacaagctccctagtaggtgccattacaagaccaattggcccatcaccagcttcaacgggaggctgatctttaatatgcctcagcattggcaaaacaaaaccaagggttttacctgaaccggtttttgcaaccccaatgcagtctcgaccgctcatgatgatagggagtgcttgtgtttgaataggcattggcttttcataattaagcttcttcatagtatccaaaattttgctggttagcccagtctggtgccaaaactttatgggtcttggaacatcctttccatgaactttcagctccaattcctttctgtaagtgttaacttcttcttgtgtcatcctagagatatccttcacttcgatatagaagttcttccggaaaggttcatactctatttttgagtggtcaacaagggacaacttctcagcttttgtcttctttactctcttcatgaactcctcatcgtcttcgtctaaacttggatcatcatcattctttggttctgaataatcagaatcagaatcttcaccttgaattatcctaccaagggccttattaaaacctttctttggccggtcaccactttccttcccattcattttagaatccaaagtaccatcgttcactgctgggggaggagcaccattgcaaaacttctcaacctcaggtaataccatagtattcataaaagcatctaaaggatcaatttcctcttcatctacagctccatcacctccactctcagagacagtagcagctgtctcattctccaagtctaccatcttagcatctccatcattttcaggtttagtctcttcatcaacatccatttctgtttctgatttttcttccggatggccttcttcatcatcagattctccttcaagagtccaagccttaccggccttgggctcattaccatccgcatcacccttactttcactttcagcttcctccttcttcctcttcaattcttgccactcctggactcttctccttcgtttttccacttcctcatccaacttcttctgctcatcctctagttcttcttctcgcgttttcttctctttcttttccccattatcctcgacactctttctctttggactatcttcatgcctgctagatctgccaacactcttttcacgctctttctccttccgttcaccgccctcttttcttctacgtttcaagtcacgcttgacatcatcatcactctcttcattgcccacctctcttgacctttccctttcccggttcctcctactacccctttctttctcacgctctctcctatccctctctccatcttcccgttcccgcctttctctttctttaactctctccttctcccgctcttcccgttcccgttctctcctctctctatccttctccctttctctttctttatccttcctctcttccctctctctatcccttttcctatctttgcctctatctctctcatgttctcgatgccctctctccttctcattcactctgcgtttatccctctcatcctcttcttcaacgtcatcttcagaatcactactcttccttctctcagaccgtctcttcaccctatccttatccctccgtctccgctccctctccttctccttacgcttctccctctcttcatcatcatctctatcgtaatcatcttcagaatcactactcttaactcgtttcttccgcctatccttctctcgacgcttctctgaacccttatccttcttccgctcattactccgatcacgatctcgccgactcttcttcaaatcagcctcctcctccaccacatccaaatcttcgctcctatacttggatttctctacctccattcctaaattcagctccgataacacaaatccggatatgtaacctcgcagattcaatggaaaatcaatgaaattcgcccgccccgaagatccacagcgaattgtctgattcagaatcaaaacgagtgaggaaataatctcagattaatcgaatcgaaaaaaaaaaaaaggttttgaagcttacagagataaatcttcgatgaagaagacgaagctaagcgaagaatcgagagtgaataagaacgacggaaccctaaaactgtctggaaattgtggaaaaggtttgctaaaaaatctgagattggcggtttttcttaattaataacagaatttagccgacctgatttggatcaatattaagcccatatttcacatgacgattttggtttatctgtttcggcccaaagcccaaagtgagatttcagctttttatttattttatttgtttttcatttttttctcaaatataatttcacaattcttatgatatctccttatatatcccattttaatgaaaatctcttaaatatagaagacaattttaaaaagaaatattttcctaagaatttgaactatacttggtaatgtaggcaaatagaaaatatcttagccagtcaaacaattcaacacaactttgaaattttattagtttctaagaggaataataaaaacaacaaaaaggtttaaacaaataaatattttgattttttctaaaaatataaacctaacacatgtattgcaaaagtactaactattgagaatatcagtggataataacgtgatataatttatcgaacagttgtaacttttcataaatttatgaaattttttgaaaatgtttagaagttttgaaacttcataagcttttagatattttacgtgttttacaagcttttctatatatttacatgtttttggaaacgtttacgtgtttacaatgtctaaagtattatttatctacttacaatttaatgttttagaattatttcataacgttttaataattttacgtgacaacattttatatttttcacgtgtttttggaaatatttacgtgcttacaatgtctagatataaaaatcattgtcttggaaatttcatataatgcattttacatgtttttgaaaatatttatgtgattacacatcttaatgttgtttaacttctatttaagagatcatacttttgaaattttttatacgttttaatatatttgtgatcttaaattatttctttatatttaacctgtaaaaatattggttactagatattaacccgcggtataccgcgggcctatatttttattaaataaaaaataattaaataatttttaggatgatttaataaatttatgctattgtttgatttaaatgtataattcaccgcgagacgaaattttataactcaaattttaaagttttaagttgtatttgtttattttgttaaatgtttaatattgtataattgtattttgattgttgtttctcggatttcacccgtagtacaccatcccatattaatatcgaatcaaacccgtcaattctaggatttcacccgtggtagtatttaattgtataattatattttaattgtcatcgtaggatttcactcctaattctatcgcaaattattatcaactcaaaccagtcaattctaaaatatcacccgtagtacaccatcccatattaatatcgaatcaagcccgtcaattctaggatttcacccgtggtagtatttaattgtataattatattttaattgtcattctaggatttcactcctaattctatcgcaaattattatcaacccaaaccagtcaattctaaaatatcacccgtagtaaaccatcccatattaatatcgattcaaactcgtcaattataggatttcactcgtggtagtatttaattgtataattatattttgattgtcattctaggatttaactcctacttctatcgtaaattcttatcaacccaaacagtcaattataaaatttcacccgtagtataaagtttaaatatttataatgtttaaatttattataaaagaatcaaaatgtgttttaaaaaaattaaagttttaagttttttttttttaatattgttaattttgtttagtgtttaagattatgtaattatattatgattgttattatatgtttttttccatagcatactatcccatgttattatccactcaaacccgtcacaccatataaccccgtcccgtgaaattaaacacaaatttgtcattttattataaattttaaatatttataaaattagaaacttcaaaaaagattaatattgacccaaacttcatcattgaattttgagtgttatatctaagatttctctcgcagtatatcgtcccgtattaatatcttttatattgtttaaatttcttgtaatatttaatttataattttttaaactttttaaagtttcaattttttaaaataaataaccctagtaaaacaaaccattttaattttggacacctcataaatcaagtttcatgctcattcgtaatcgaaatcattttggtcctttttatagtatggctcttgaccattgtccaatttttttaagcgatatagaacattctaaaatcgtaattattatccacccaaacccgtcctaccatataatccagtcccgtgaaattaaacataattttgtcattttcttataaatttcaatattataaaatttgaaacttaaaaaaatacaatatcgacccaatttttaagatttttcctgtaatatatcatctcgtattaatatattttttctatatttgtaatgtttaaatttcttgtaaaattcaatttataatttttaaaactttataagttttaaaattataaatatttaaagcattttttaaagataaactttataaaaagtttttaaaattataatatttaacatttgataaagttataatatttataattttttgaaacattttaaagttttaattctttaaaataaaaaatccgagtaaaatcggataactattttaattttggacgcctgataaatcaagcttcatgctcattcataatcagaatcattttggtccttttataatatgggtctgaaccattgtccaatttttctaagcgatgttggacattgtacacatattatttcttcataggttgaataatatatgtccgttttaaaaaatttgaattacatcatattcagaaaaaaatataatattttattaactatatatattttatataaattcaaaataaataaagtataagatcaaataaaattgaaagaagaattatatatttatgtttaaattaggtagaaatattttaggaaattagttaaggtaaataagaaatatggttagtttagagatattgtttatattaaatttggtaattaaatcattaattttcgtttttaattattagtttttaggtaacttttccaaaaactaatgttatccaagatcagaactgaattaaacatgttatccaggatctgaacagagttaagccgagtaaaacccacccatttgaattaattgttgaattatggctcaaatcttcaacattatcttcaaaaatcccctccaaacatgtatatatagatatttccattatgatatagttttcacatcttaactccaaatcatgaaacctaaattttatttccaagtctcaacatcatatattttaattatcatcttgaacttcttgttaaaaatataaaattaattcataaacttttctataaacctaagttttttaatattttttgtatcgtatttatactaatttcgatcttctttgtttcctccgtaatcgttgtcgtaatttcgtaaacctaaatttcatatagctcctttcttctatgtatatatgttttgtacaatgtttcatatatataataacaccctttggcaaaaaaaaaaaaaaaactttttcaatgtttatctttcgtggttattacatatagtagaaatcccaacattcaacaacaataaaaggttacaaatcctatatttaccaaaaattaagaaagtctaaaaagactaatagatacaaaaagaagaaaagaaattgtttactttttgagtgtaaaacaaattaaagttaaaaaccacataacatcccccatcccatcttttttactaataccttcctccattaacataagattgtctctcctctttcgaattgtctctcctttttcagctctctctctgtatctccttcttcttcttcttcctccagcttctttcaatttctccggctgctaaaccctagcgcgccgtcggagtccctgcgttctcataccaacctttactcgccgtcgccgtcgctgcagaactggtaagcatatgtttttttttgctgctctctgtattctatggaagctgaaaggtcttctcggcttgtttatctgtggtagttttgattaggatgaggttttgtagtaatagagtgagtgagtttgctccaattcttaattgcgtttagagatagaagagagagagagagagaagctatagtttccaggcggagaagaaagacaattcctttttgtttaatctggaatcaccaatagttagttatatacagtttttttatcttcttcgtttttttcttctggatttgttcttttgtccttgtcttgctgtgactgactactccacaacagaaatcgaagcttaagatggtggataccgaaatgcaagagcaagatgtgacttttggtgcccttgttgagacaaagtatttagaggaagaacctttggagccagaaaatgatcacaaccctagtgaaatcccgcagccccttcttcttggagatggtcaggctaataatggtcatggcatgaatggtggtgctgttggagttgttgaccactctgaaaggaagactcgtagggtgcaaatgttgagtcctaagactgaaggtgagaatgccaaaaagaggaagacttggctgctggattctgaggtactaggctatgtttctttcaatttggctcaaaaagcctgtgtctttttgttttctcaggattggatttcactgttttgtggtcgaaaattatgtggtgattgttcacttactggttcacctttctctacaggcacagggaactgatgaagcagggacaccggtagaacaagtggcgtttctaagagaagtggaggccttttacaaagagagtttcctggaatttaaacctcctaagttttatggacagcctttaaacattctcaagtgagttgttggaaaagtggtgcttttgttcttaataaacccatatatctggttaatcagtgcctcacttttgcatccaatgtaggctttggcgagcagtcgtgaacctaggtggctatgaagtggtaattatccaaaaccatatcgtttttagttcgtcagtttataagtcttggttatttaagttggcccgtatgattatcacctacattttattgtttgaattgtggatggcatatgaactgtatatagggtataactattgaatccgtaagctaatttatgataagagtatctataacgatgtggctttcagagaagatttatgactttaagcgaacatatcaaacattaaagaatgttcgatattttcttgggaaactgatttattttactgttgttagctatatttggaattatatattcaatgttttcttaatcttctgctggacttatggtctttaagattcctttgttttttcatggtaatgtaggtcaccacaaataagctgtggcggcaagttggagaatccttcaatcctcccaagtatggctgatattttccttagactctccgttagtctttaccaatttttcataatgctaatctttttccacatttggttaaactatctttattcaggacatgcacaacagtctcctacacattccgcaatttctatgagaaggtgagtttgtttttgtgcataagtatcgtatatttatcctgtcttcatttttacttatccacttcagacaattctccttgtgcttcttcttagtatggtgtgttataatagttagtttaattctttgtcttgctgaggtagctctttattttggactattcttttgtcacttcgaagtttgaatgcactgcttgttttctttctatcttatcatatagatacaggtacatatgatctatatctttgcttcaattgcaggcacttttggagtacgaaaagtgtttaaggaataatggtgagcttaaccttcctggttcaacattgattctgtcttccagtgtcgagaaagaggtatgaatttcccctaaaaaaatggcttttggattttagacactactgaataatatatagaaataatggtagatatggaaagtttggatgaagatcgatctagcaccgtaaaattaatgaagagtatctacttgtcaatttattgtgggaaggtttcatgtactgtgattaaatgtcgttgatactgaagaaatgatagcataagagttatttttcagcatttatgtaataccagctaaaccttttaaacccaactatctgcaatctgactgaagaaagctgtagccattttgtgttcgatacaaaagccataagaaatccgtgtgcataacccagtaaattaccatataagttgcagaaaacctaaacgaaaattcatgtgcctccctttttttcccttctccatatttttttcttccctgatacaaggactttgctgtagccaagtagccatcaaggttcagggtcaggcagggcacgaagagattctgcagctcgtgctatgcaaggttggcatgcgcagcgccttgttggatctggagaggttactgcgcctgctgttaaggtttcacttcaaatcttactgcactttgtgattccattatgcagaattttttcatgcaccaaggaatctgactcacatgtagaaagaagaagactttttatttcttttgtcgttttttatttcggaagtaaaatgatgttctccttttgtttcaggataagggcttaatttccaccccaaagcacaagaaactcaaaagcattggtacaaaatagttctcaaggctttgctattttgtcaacgagggttgcttaacgttatgttttaaacggttttttcagggctgcaaaaacacaaacaacaaactagcatggaccatgttgttacaaatgaagctgacaaacagttacggaaagctgatctctccttcttatttgcaattctaagatagttatattagttttttggttcttctttcaatgcctcttagcagtaatgagatgaaaacgtagcattttctggacctgaacatattactatagattaacgttaaggtttcctttttgtcatgataggttggctgctgaggttgttgatgttggacccgttgctgactgggtgaagataaatgtcaaagaatctgtgagtaacttctgccaacggctaaagaaacgccaaaaacttgcaaactggatgtttgtttccaatatggaattcttaccaaatctgttttcctttttcttgaattcacagaaggattccttcgagatatttgccttggtacctggacttcttcgcaaagaggtgagcactcctttgtaaccctgtctctgaaggctacttgataagtccttgtcttttaattttgtttgaatgcatattactgtgacaatacaaagcaagcacaaagcgatttggtaggttaccaaagcagatccgttggctttagtttcatagtctcagtacacagtgttgtaggcaataagtattttctggtaaaatcagtacatagttccaattactgaacatacgttgtcttttctcaggttcgaattcaatcagatcctgcgggaaaggtggttataacaggccagccagagcagcttgacaatccttgggggattacacccttcaaaaaggtaaaactttcttctatattccagatatgtccattaactgaactgatacagagactgagaaccttcctgtcattttgatatgttttcaccagattgttgacttatcagcaagaattgatccgcttcacacatccgcggtcatgagcatgcatggacggttgttcatacgagttccgtttgagcagtaatggatttcaagagagctggtcagttgttcgtggtttcttctaggaattcatatgtttcagaaccaaattgttaggcggctgaagcagttttgtaactgtgatttgaatctgaagactgaagttaggaacatgcaacaaacatttgatcttactgtaatatttctcttttgtataatttgagattagtaggagaaactgctccaaagacatttaggatgcaaccaacaatgatgattttgatctaaaatcggaatgttatgcttttcttatacatatttttttaatagagatgaatagatttgcctatcccatctactagttctacttccaatagtatacttttaggttctcatgcgtttcggttttcaaaagttctcctgagatgatttgttttcaaaaagtgaaagtgaaagtatgcatatattggtggtgcatattattaaagggaaaacgaaaacagcaaaaaacttattgacatttccctgaatctaaaaagttcatgatcgggaatatatgatttagaaaagaaaaaaaggttcattacttgtttatatatatatatatatatgtatcatcaattcatgacgaaaatttaaggttcaaaagttttgaagctcactctagtttttgagtcatcagaaaatactgcagtattaagacaagaaacattattctcaacttgttttctttctctttaatcatgcaaaaaggttcacacttcacagtgatcaaaaaaggttttttattgctgattctcaacttggtgtagctcaattgcatgtaaggcacatgacatgaccgcatgggaatttgataatatttacaactacaatgctctttctccaagcccccaaaaaaaagtcatatgattccaagtatatgtattgattctaatttatattttatatattttggcaaagctaaaacgttttttactaagagacatctgatcactataatatttagctaagaactgtagattgtgacttgtgaaattaatctgcaatttgttccatgatatcagttgtaaaaaaaaaacaaatcatcctaaaatagttagaactaattcaatcaataataatcatacatctaagttataacatattcatcaaaattttagtagctttacaaccccaactatgtattgccatatgcccatattgcacctatagctgaataggcgtaacaaagctacctgaaagtagttaactataattcgttttagtatgttggtatcatttaaataactttaaaactttctcatgaaaaataaaaaaatattactacttgcttaagcttccttttgttcctagtcaataaatatgtccctagggaattggaacattcctctttttcacatatcttggtaatcaaaaccccattttttgttatgttgtgacagagactagctcttaactgacactacaaatgatttatgttcattgttaatcttaccatgttaagttcactaatttgtatgtaaccgacgtacgtgagataatctctacttcatgtttctactgtgctctgtaacggttgtctttaaccaatatacattgactaaaatcccaaaaaacaatactatgctctaaaaatggttaaagattagatgaataaatggaaaataataaagatgtagtatgagatatgaaataaataaaagtaatcccctcgttatatattttgcataatagcagaagcatattcttctatgaatgaatttgtttacttttcagtgggatgttagataatgattccattctatttaacgaatatgattagttttagcagaatatagaatttcactctttatctctctagttagacaagtatccccaatatcatttactcgttctttttatcaatatatatatatatatatataaaaactcatattttgtagtgacgaagaaacacgaaaatagtaatatataaaccggtataaaaccatattccatatatatatttaaattgttgggacagaaatatatatagattgagaaagagcagaatatgtatttgaagtgttggttgagagttgagacaaattctccataccagccaaaattaaggggttggaaatctcaaaccaaaaactacgattataacataaatggtactgtgcatatgtgacctataaatattagcttaaagctacgtacttgttgccaacctgtctttgaataatgttggatacaactattttacaggatcgacggttaattaactgaagcattaatgcatattttatgcatgtaattaagtaactgtagtgatcgaatgaaaaaggtcataacatggccactaggtatacatgtagtatttttaaaacactagaaactgtatgaacgctaaatagtttaaaaattgcccatgttgttttcctagatggtaagactcgagatcgcttagacggccctgtcgtaattaaatagccaattacaccaatcaatggaattttcaactgtaagtacaaacggctaaaaagacgttctaatcaggcaagtggttaactacaaaatttagaacgatgcacgttttgatcaatatgtaagcatattcttaacaccttatatatagatgggtatatatgacagtactcttaacacaataacaccgtatagatagatagatatgacacagaagttgtgatcttaaaaggtatactcggctaaaagacgctacaagtactcaaatggtacgaataatgaatttagatgcacaaaacgtatatattgatcaatatgtataataattttctaaccttataatgaatactacattgaggttgttaaaaagttgaaagaactatattatactatgattaaggtaacgtattgacgtattgtaaaaatattcaaatgagcgcctgagatgtgcccacataatatttcatcaagaatacgccgtgaagctcaaaattcttaaaagaacaaacgaactcattattgaatagtctagacctatatatctatcaaatcgagctaattataataatagttatagggtacaacacgaaaccctagctatgaataaaagaaagccatatatggaaaggaattttctaacataacgagacacatgcatttctctaacatgtaacatctaccgaagatatgagaagaaaagaaataaacacgagaaaccaaaatatgcatatcaactaaacattaaacaccaaatatcccaaaggaaagacgactccacaagatgataaaaacacataaatttccggacattaaaattcaattaaaaaggtggtcttgaaggtgttccagctccccatccaagcaaatgaggatcaccagaaaacccataaccacccacattacctcctaactgtccctgaccggtcactccagacggcggagatgctgatggagcttgttgcatctgcggtggccctcctcctcctcctcctccgccaccaccaccttcttcttcctcctcctcaatcggtagtctctcgaaaaccgcatttgagaacgaagccgccattagtataaccggagctgatgcaataaggggagccacaacgcttcctccgaccacctgaccttgccctccggctaaaaatatagacaaaccaccggcaccaggcggtgcaggaggtggcaaaacagtccccgttagcgaaagaatctcaaaccttccatgtaaagtcacaactcctcctcctccggacacaccaccgccatttccaggagtgactggctgacggagagtgacgttagatacggtgccgtttcctcctaaaacggagacgcctctccctctcctcctagcgtacgtggaaacactctcaactatgtcagctccaggagatacttcaagaacgtgagatctaagcgcgttggggctatcacgagttactatgatcggtggcttggctttgttcttagatcctggtggacgtccacgtggacgttttcccggtgctgagcttgatgtattcgggtctgaatcgggtcgaccctgttgatgatgatctttgtttgaatggtcagattctcttgaatcatccgacggttgttgttgttgttgatgttgctggtgctgatgatgatgctggtcgataagattgatcccgccctgcggttgaagctgttggtggtgaatctccggtctaaagaggttatggaagtatctagaagctccaccgccttgctcgtaaccgccttccatcgccgccgcatctactaattccctatcccaccactgcttattcgccagctcaaatcaatttctcgattcttgatcctgctcgttcatatattggtagctaggtgaagaagagcgtaaagagagaaaaagaaaactcagatcgagaagtcaaaactcatgattttgaggaaacaatagctaaagcattaaggtgtgatcggttacgcaagccgacaaaatatagaaacagaccaagaacagaactaaattaaagacgaagcaaaagatataaaaaaggtgacttatgttaaatgatctctctcatgaaaggtaagaggaaaccctagttaggtagattaattagggcaagagaaagaagtagcttcttctttgcataggagtcgtatttagcgattctgatgtgctatgggaaaaaaaggagagagaagcttgagattcatgtgcgactctgcaataaatttttggtcctctcattgaacgaggaaagtaaaagcaaagacatacaccgagaatttagcggagaaacagtcccctttattatatcattaatataataattattatttgaataatatgttcttttttaagtaaattaatactatttattacatatacacaaatgccgacaaaaaaatttatgtgtgtaagtggttatccttacataagatctaccaaagaaaactaggggttcgtcgcagtttttgtttggctccaatcggataatacaaaagaaatttagagaaggaattcttatatttgaaagcatgagataagattaacagaagagataacatttggtcaatttgtttatcagatactattatatacgagctaaagaaaacgtatcatttaacaaaaaaaaaaaaaaaaaaaaaatgtcaagtggaagttgggtacacaaggattaaaacgaatcctacattccctttaaggcgcgtggaggttatgtttaaacaaaagttatttgataaatgttattatcatgttactaacttatttatggttttagtaacttaattaaaaggttttcgtataagtaaaaatgagaaatagtactatttagtcttctcttacttgagaaaatactactataggtcattttatttagaattttaatttacttacgcatctttttattgtaaaacttagtataaacttgcattattactagatatttgtaggcttgtgatttgcatagtgctgctgatatatgttattattcatattcaaactggatgcagaacgtgagttatatagaagaagaaaagaaaaaaaatttacatgtatagtattattattagttttgtcaactaattttgtaaaaatataatgtataataatttaaaatagatatatagtatatggcttgcgaatacaatattctaagaagaacccacgttctataataaacaaacggatacgaaccatctttactatagaaaaagaagaagagaattagtcacttttaagcgctgcagaacaacaattgattaattctgcttgtgatgtgtttttttttttttttggttgctactaaattatcttgctaaacccgagctaattatatatcaaagaatcaatgttctactaaagtactttatattcacttttattgtcaagagggcataaggcgcataacgtagaacaatcaatctaggtaatggtcctttgttctatactgagatagtgagatctacccatgtatactcctttaaatatcgtaaaacggagtggaccctttttgatgataagtttggagaaagttaatgatccattaatgtgataagactagctgataattatcaaaatgtcaaattagttgatactactactttatattttcaaaaattattgataagtactccactttgttgccttatgtcgaatttggtgaatcactaattagaactacgctttttctaacatggacaaaaaaatataccagaaaaagacaactagacactgataatttattgatttagaatgagtaatgtattagtaaaatttttttttgatatatcatcttcatacaaatgatatcaaacttttaatttacaaaaattgtttgggaaacaaacgataatcctgaaaacacttaccaattgcatcaacccattcaaataattattgacttattcatcttaatttattgaactgactaaactcgatccgacccattaatgcatgacctcatatcggaccgtgactggttgtcttaatttttaactgcacccatatagtaacacctaagctccctcaacgtggacgcatgtggcctgaaccatggtgggaccaatctcagtaggaaagtaggaagtggatcggaaccgtccatcctcatggcatgtgggacccaggaaccgtcgttttcatcggcgtaacctggcgagtcagggctcggtgcaatgtacttgaaccggacacgttagcttggtccgcacgtgcacagacaaaagtcacgtgcggtcaaaaggtcagagcatgaaagtgaaagccaagctgtgtgaccacgtggaggcggtcggatcatcggtacttggtcaataccttatccaatcacagtactcctcccgaatctatctaacttactttcgcgtcttttgcccgtatttctaatgcttaaaagcaaaaacgtacgtgaagtcttttgtgtgcggtattttaatcataaactggtccaatttttttctatcgatcgaaaacggaatgtgtggaactatcaagatacttcgaaaataagtgagatatgttttatttgcccccaaaacagaaaagtgagaggtgtttcatgtgatatataatttaattttaagccataaagagagagaactacacgtcatccaagtctataaatatgtgactgtacctaagttcttatgacgctgtcgctactcgtctagatcatgaacacatttctctcacattaattaaagattatatatgtattaatgaattcagacgtccagttactgtcgcgtggaattcaatgttagagaactcattagagaaaactaagttaagttcttggtatccataagagtttatatatttaccaaacatggaataaaagcagttctaaattgttccgacaaacacgtaaactgatcaaaacatatatatattttttttttttcccaacgaccaaaatatctcgtaaggatgcagtagatatgtgaggttcggaggcactaaagaatatcaatttggtttcggttcataattgatcccttgatgatcttgtagctgttattgttcttctttttattgtggctagctattgcttcttcagcctacgcccctactccatatatgtatctccccagtctgctctcatgcgatcacgaaagggtatctcttttagggaaatccaacaactggtgaataaaatgctggctctttatatctagaaaaaaaaacatcaaacaaaaagtaaaggtcgtgagactaaatatcataccctctttaacaataaataatatgggcaaaaaattgtgatgatttagggataccgtacccatcaatcagtatgctaatttaacttctatatttatgttcttttgttttttttgctttcttttctcatcaatcaaaataccacgagccagatgtatataagatattaatgccatccttaaagtttatacttacatagcgattctattctctacagcacctttaaattttgtttttatagttttgaaagtgtaagcaatgagttcgctgtatataaaatgaaaaaaaaaatctagctagtcttgaactctcagttctcattaattttatgtacgttagttaaaaagtattgatttatcaattcgtggctttttttaaaccaagtaaagaacatgtattataacgagtttctaactcagctaagtttgattatattttctccaaaaactcgaacatcaatcgggtgaagactttcccccttctatcaggaattcagaatttaatttactaaatatcatactttggaaatattattcattgatagttcatagttgataatgaatatatggatgcataaaatccttagataagaaaacaatcaacaagtctaatcgagctctttatatcaaattatcaatcaaatcatactttttagtttgtcgcacggaatctaacatgccccgcatgttagctttgtacaagaagaaatacgtaacgatgagttgcacattattagagtaaattaaattgctttagttaaaatatttggcaatgatcttctgataaagtggatagatgaaaacgcccctgatattcttttctattttttctatattaaatcttaaaattgtgcctcatttgttttggtaaaaaataaataaattatttttatatcttaaaaaaaacgatttgattccattgacctacagtattgcgtattgtatgtcgtatgataataaatctacattactcgaaaaataaatatgagaatctaagtaccatgatatgattaatggtttgtgataacattatcactatgttatcatttggattcaaacctaaataaaatacgtgaacctaactaagtattcatcaatctatttatctaacaatataatggactgtaaatttgttctacagatcaataattacatggtcatatccttaatcatagcgttttgtggccatctcttctatttctctatatattattaagctatatatgaaggtatagtatatatatttataaataactcttacgactttgacttgacatttgattctacatagacaactctaatagtatgaattgaaaccagtattttattgctcctatcaacctggagaccttggtttcccaaatatacctatgttactataaaaataatatgtgtataataatattttttacctacgtaatgatgctcacaagtcacaagtttttacaggaactagtaaaaatcaatttattatcagtggtctccagactctccactatatttttttttataaacaaactcaaaagtagtgtgatcaatcagaaattacgggtcaactttttcgataatgcccaatcccattctcacatctttggcgacttgtgatctaccaccaccccatccaccaatttttaaattattttataataataaaaagccggagaataaaacaaaaccaagtgtcttttcaaaactaaatgcctatttattgtttttttctagtcaatttgtggagaaaacctatcaaactaaaaggtgttagaaaatattgttggattaaatattataatttgtatatagtaaacattaaaaggtgattttattgacgtataataatctaaaaaccaaaaataaaggtgatatattgaatagaatttaactatttagtaggaaggaagcaacatgggcaaattgccaatttggtttataaaggagcccacatgtttaccttactattttggactttctgagttagtgtcgaaggcctttgggcccataaatggaccccacaaaaagacaggacaaaatatccttagaactcgccacgtagatatctcgacgtggagatctgaccacgtgtacagtttatgtcctgattttcgcaagagtgacgtggacgggtcatgatccgcttatattttcactttgtctacaagccaagtatattaaattgggcctcaaattagcccaatcaatatatcagtacattattaatcaaaggcccaagtctcacgctagcgatcgtcgacaacgattttgagtctttctccgaagtcgccggaatcgtattcgccgatccaattgtcgcatagaaactgtcatctccggcgagagactgatctctggtaagtcaattcgatttcgcgcgttttataacttctggtattttcgtattccgttgctgagagaaaatattgcagagattgcttaacatgaagctgatactttaaccgattcatcaaattgacaaaaatcgttttcttctttagggattgatacagaactcgtaggatgatcgatttacgctataaagaatgctacttgctcatctgtcttatcgtcttcataaattttgtgacttgttatagcgatgagagactgtaagtgttgttgaaaaacctcacattatccccaaactcatcaatttggattcttttattggtactgtagaaatgatgttatcaggtttctcttaggtttggtggaaaaactttatatgctgggaaggaactttggaaagagacactgccattgaaatctggatctcgagtttacaaattacaagggcttaagtcgaactcttggtatgaagtcaagatatcatacccagcttctgtatgtcaaatttgttatcttgttctatgttcttatgtttccaaggttcttgtgcttgttaaaaatctcatccttttttgttatgataacagataccggctctattttcgctgcaattactgaagaacggtgtaatgggtttgaaggttaaccatatgaggagattactaaacactgagaagttgatcttcaaaacagaaagtattgaagaagttgataacaaggtattgccatcttcttcagttagttcctaaaacttagaaagaagaacgaatacaagtttaggagtttgtttctgatttaggagggattgtatgttttggtgacggtggaacctgaaggaatcgtggctataccaaatgttaaagaaagaccgtccatcatttacaacataggcaagcttttttttctacttactatctcatcaatcttcttcttttcacaacataagaacttgtattaagtgtagtgcttcttctagagtctgaaaactctcatgttgacagtttgtgaagaacagctcttaggcatccctcactcaagctggtcagtggtggttttagtagttttgtgtctcgttgtcgcgttgattcttccccggttcctcccatcttatcttctgatcaaagatgtagatcgtgatcgttaagaagaagcatggttaatacagtttcctcacctctttgttttgttactctgttcgcattttgatgtttgttcatctaattttgtatggtttttagttcttacatgtccactgcctcattcatataccttaccttaccacaccgcactcaaagaagagtatataagtctacatgtgttagattgatttcatgtttttcagacgcgggaagtcctattctgaacttgtatggtttgatcgtatatagttaagtaacgcttatccgtttgaatttcaatccaacaaacaacattccacaagatgaataactctaaagtacaccgtattatcttttgggaatagggagtaattaattaaaagcaaagaggttacacatatttttaataaataaatgaatttttttttgttcatataatgtatgaaataaccgttaatttcccggcagtaatccgctaaaataactccaaccaactgtgataataaaagaaccaaactaggattcggacaaaaccacaatttgtgttctaattaattacagcgttaatcataattactagatgatttcgagtgggacccagggtgaagaacaactccttttgttttctctctctctcgaagaatttatgaatcataatcacgcatcatcgtcttcgtcatcaccaacttcttcaccatcatcatgaatgttaaaacttccataaacaaatccttccttgtccccttgtatttttctatctaaatccctaaaaccactcaaaatcatccctctttctctcctccccattttccccaacgcttgattcgaattcgtctctctcgttttctgttgttctaccaattgagcaaccctagaatcattcttgtgtacctaccggaaccgagtcttctcttcttccgtggcacatctttcaaagttttaaaccccttttcccctaacttcttttcatttttctgtttttttcccgggaaattttctctctctctctctattttttgtttctctcgtcatgatcattacttgtcaagtatgatcctttattaggtttctttggggccgatctcactttttctgtttctcaccctcttctcttcgaaggcccttgtaaaccctagaatctcctcttttcaaatttatatgttctgtttcttcatcttcaggtttaatcattcaatctatctctagggtttaccgggtcaagtcttaggatctgtctctatccatacttcatcaaagtttccgtctttggttctaatccatggcgtatcattcgattccgagctctgggtttcattacttgaattctccttttggtgacacaacctttactaaagtctttgttggtggccttgcctgggagactcaaagcgagactcttcgtcggcatttcgatcaatatggtgatatccttgaggctgtcgttattactgataagaacactggtcgatccaaaggttatggctttgtgagtatcctactttttgttcatgctttggtttctaatatctgaagttggtttattatactgcttgtaataaacattctctgcttccatggtatgcttatagattattgggtactaaatgttgctttagattggtgaatgatctgcttgacttatgatttctagttctttgaataaactcaaagaagttgaattcgaaaatacgtgttttgatgaaacttttgtctatctttgctaattagaggagtctctttcatttgtttgttctgatgtatctgttggtttatgttcatgattgtagaatgacttaccgctatgtttatgatttgtatggaggatttaggtgactttccgagatccagaggctgctaggagagcctgtgtcgatccaacacctattatagatggcagacgagcgaattgtaatctcgcttctcttgggagatctaggcctccaatgcaatatgcagtgataccccatgctcctggtcagtcttacttcagtattcatctattcttttcttcgcattacatacagagacctttataattttggtgaagtattcaatttttcaaggattatgaccgtgttaaccttgaatcactgcattgcttcttttatttggttaggacgggtaagacctccttccccatatgttggaagtgtgcagagtcctcgcggtttgcattttggaagccatccgtatcaccaaccccctacttataactaccaacaaggagtggtgtacccttatgggtgagttatgcaatttgaagctcagaacatttcgttgctattgtaaatctgctataacagacaagctttgatgagtgtatcagttctaatgttctacatgctagtccttcagtcactttgatcaagtggcatttaccaatcacatcatggacaatcatctagagattctattgcgttaggggttgtatcttctgccacttagggttcttgagtgtagcactatcatgtgacatgttgtgattggtaacttgcaggaatacaaaaatataattgcagaggatatgtggccgagctcaatttgttttggacaggcaaggtcatgaatgtttttggactttgatagggcaaaattacctagatttttggaatggacattttggagtggacttaggtttttcccccctagcttagcatctttctttcgtagcataacatattctagctgttttgtataagtgttactcttcttttcttaaagagtgtttagccaaaactttactcacctgtctctaatattagctgtgctttttggggttctctcagggttacaccatatggacctgactacatgtactcacagtctcaggtaggcgcttgaaattattgcagttccttcttaccttctttatgcattttaaactgttgtggctttagttataaactcatgtcttctcttcatggtgttgtagggtttctatggtccttacatgggtcaacagtaccttcaggtttatggagtacctggggcagttaactcaccgggttatcaatatgggcaactgagccatactattcctggtgctcacggttatacagcgggtcaaggttattcacatccaggaagtcatgttctacagcttggtgccacttcacctatgtctgctattcaatctccatacccttctccttcagctccaacgcaccaacgtgtcatcgtccagactcctcctcagtatatacagagtagcggttctgatcagacaacagggtgatcaacgtaagcaaattcttggattcttttttgatggtccaaattggattgaagttcgtacacacttacacgacctcattgttatttatcggttttcagttagtaatccttaaagattgcagaaaagggaagaagtccaggacaaatgctactctggcaggcttcctgtttaagcttagcacattatttattttcgcattctagaggtaagcttgtttccttaggtgcccttttaagtttcagtacttgcaaatgttttcgatctcacctcattaccgtcgttacaggtattaagtagtcttgctcactgaagaagtcaaaaaagggggaaaggagaatggaagtttcagggtttgtgcttctgttatctttaaccctctcatcctatgtatatagcccacaacaagcttgatggcataaactatatgaatagtttcaccccggaaacaagggttttcgcggtaaactggtaggaataagtttggtgtacaaagaaagttcatatatatataaacacatacataaatgcatatagaatggtggaatcaacatctgattcttttgggtggtaaaagtagtcttcttactacacactctcttaaggcatatgagtgttggtaatattactaggtagattctcacgtcctcttgagtcaagtcctctgcattgtaagtaaaaaattaatgactatggagctcacttcagcttctttgtctgtgcataaattttagctccaggattcttctcttttctatgtctgtacagtttctagactgataaattgttcttctcaattgtttctgtctatgactcctatcttctactctgattcctctgtttatactccatttatcacttcgtttaccacttgctttcaagatgatagattcgagtttttagttaaattcatcgtcatttaaaccatttttaaagagtccaatttttgggggtggatgtaattacgtttccttctttgatccatcaaagtaaaaattgatcaacacataattaaaaggattacataatgaggtagtggcatagtaatgatgttttgatgtccgagaaaactgatttagagatagtttagtcagcacaaacaagattaatgttcccattttcctacaacttcctctcgtttaaaagaataagctttatcaatgagaataagacatacaaaacatttgggccttatactttttaaaaggcccaaaagtgcttcaacaagacggcacgtggtgagccaggtgacaagtgatacctccaaatgcggttatttgcgggacccacgtggtagccacgtgtagcaagcaaaggacccccatcctcttttgcatttttctccttacaccaaacatttctttctcgcagagaaatctctcttctcttcacctccatcatcctcctcaacccaaaaacatcacgacgaaattaaaaaaggtaaaatctgccactgagaattttctgtcatgcttaagcttcgaatttcttctcgttttttctccatgaatgttgcttgaattttcacaatcgctggacttgtaaggttgaaattgcataatccctatttatcttctgtggtgggaacaatgtgggatcgatttttgctgtaaaaagtacaaactggttcgtattcaagcgtagtaacctttagatttaaggaaaattgttgactttgagctaactagtgaaaaattgttggattgcgatattttctgggtaaaaattggttttttttttttttttgtattgtgaagagtatatatgaagcagagttactaatctttctcaaaatatcaacatagtcttttcaaatgtagattttgctgttaataagtgaagtttttagggtttaatttgaagatgttttctccttagtaatgataaggcaaaacattatggagactaaagtcattgttagaaaagggttaaacttaagagatctagggactaaaatgatggagattttcaatgctatgactaaattggcaaatttgagacacttaattatgtcctgtaactatgtttttggaatgtccttattgcttccatttgtgacaatgttgccactttcatatgtaatgcaggttcattgatatcgaagatatgagtctgtatagcgacggattatcgagtgatcagtatttcttggttaatttcatcatgagcaactacttgggtcctgatgtctattctgataacccaagatgttcatcttctcaaagattagctagaggtttgccaccttacactttgatgcacattggatcttcctctctaactgtttcccagctacagaacttgtactataatgtactcagaaacgccaagtccagcctccttcttcatccagacatgatttatatgtatctcaagggatatctaccattggaaccaagtggaaagtttcctcagttcacgcattttttcccgacgaatcttcacccgcagaaaaggtattccccgagccacgagattgtgaaaggaattgttgttattgatgatcctgcagtagggttcataaacaaggaagaactccaaaggttcagatgcttgtcgcgtttggacgacctgaaaatcgatagagtcacgtctttatctcctcgggttaatctggatgaaagccgggaaactgagcaggactgttcaagaaatggtgatgcgacagctaatggagttgtcactaacgaggactacaattcatctggtgagcttcaagaaacgtgcaagagaaaggaaggggaagacgcggttgctagttgcgtaatcagtgaaccagaaagactttcgggagacataccagaaagccagggaatgaagcaggactgttcaagaaacggagaatctgcattcagtggaattgtctctgaccaagactactattcatttgtaaagcttccagaaacatgcaagcgaaagaacaaggaagaagaagcagttactggtcatgctgttagtggaacgagtaaaacccctgaaagatttcgtgagacatacaagagaagacggttcaagaactcatcaaaaaaggcaacaaacaagaatggtgaaactcttatggaaagagaaaaaacagataagcctatacctttttcttcggagatgaaggaaagcgatgcagaaccgtcggttgtaactactggaacagccagtaaagaaactctaggatcatctgttggtgttgttgacattggtgtcaacaaggttgcttacttttttcaggttgctttgcccggtgtccgcaaagattacggtattattacactttgttgcacatctaactacttccatacacgccacatcgggtctaagtgctaacacatgaattggtttggtccttttgtgtgcaggtgaattcagctgtgagattgaatcagatggaaaggttatactggagggatcaactacaagaggcgaaaaaaatatcaagagacattctcgggtgttcgagatgaatatccggaagctgtgtccgcctggaccattcaagctgtgctttaacctcccgggaccagttgatccgcggctattctctcctaacttccgatcagatggtatcttcgagggagtcatcatccgacacaaaaactcttaattaaaccggaggttcctatacaagtttagaacttaggatctatgtagatcttttatctttatgttactggacatagaaggaaagcgaatcaaacagcatgcaaggataaatcttttacttttaggacgtgactctgtagattttgcatgattttgctaaatatccgttttcacaatgatttcatcaaactgagaatccgttaatattgtttctgtgttggcagtgttgctgttacttgttagtagttactgttctcatttctcaataagtgatcaaaccgaaactaaaacagtactgaaccgacggtttaatttggctagaaaaattcaaacaattatgatgttgtgccttaatgtgacaacatagataaaaagaagctcttacaaacaaactgactaagtcttcctcggagtcaaaatcataagcatattccatgctcataccaataaagtaatgaaaatgacaaagagacttattaatcgttataaagatccttgttctgtttcactcatcatgaattcgaaatttcgatataacaaaccaaaaggaaagaagcaaaaaaaaaaaaaaaaagctctggattcggaatctcagataaaaaaaccaacgatgccgataaaggtattgtcgtcgcttgatgtagctcgaacacaatggtaccatttcaaagcgatcatagtagcgggaatgggtctattcaccgacgcatacgatcttttctgcatagcaccggtcatgaaaatgattagtcatgtttattacaacggtgactcaatcaacacagccgttctttcaacttcttacgccatcgctttactcggcacagccacgggtcaactagtcttcggttacctcggtgaccgagtcggtcgtcgccgagtctacggactttgtttgattattatgatccttagctcctttggttgtggcttttccgtgtgcaccactcgtcggtcttgtgttatggttagcctcggttttttccggttctttcttggtttaggtatcggtggtgattacccgctctcggctaccattatgtcggagtttgctaataagaggacacgtggcgcgtttatcgctgcggtgttttcgatgcaagggttggggattttggttagctctgccgtgaccatggctgtttgcgtggcgtttaagagaagtggcggtggtttggaggtggatgcggcggctccgacggaagctgacttggcctggagacttatacttatgatcggtgctcttcctgctgcattgacgttctattggcgaatgttgatgcctgaaaccgcaaggtccgtccactcttttcatccgtttgtctttttatatattttacctatgacaaatcagaaaggacgtaatgcacaaagaatggtcttgaaaaccttgaaatcactatttgtcccacattaaaaatcttgaaatcaactagatttgataatatcgttttatagaaacataattgcattatttgttctgtttatgtgaacgtttctctagtttaagaacatatagtacctcatttcaacccataaaatgaacattaaactatttttttcaagcaatgatataactgttccgatctctcacacacggacacgcacacacatactattggattccttaaaagaagtattactagttttgacatattttaatagctaggttttataaatatatgtatcaaatattgaaagggttacaaattagtagtttgcttcaatggagtcattgactttataagggatagataccataattctgtggtatatactcttgtccttacgtattcaacattagcaatccaaagtctacaccaatcatgtatttactctcttttttatccatacaaaatttcatttatttattctttcatctaatatttatacatacctcaggtatcagatcctatcagctccagctaatcaaccaagttttattttttgatcacaacaaatttaaattatcctcacacgtactcttccacttattacaacatacactaacagaaagtcaaaagcaacaaaaaaatcgatttcctaacacttatgttttagggtaaattgtacacagtagccattgacccacttttaatttcagattttgacaaagtgggatgggcctttcagcttttagccattaagccaaaaactgaccaaaatgcccctgacgacctgacgaaactgaacccggtttgtacgtacggaccgcgtcgttggaatccaagtgaaccgggttcgtacgtacactgttcatcgacgagaaatgcattaaatgatttctcggtttcggcgaatttgacacttgagattggaattaaaaattttaaaaattggttgggcttagaagtttttaatgctaaaaagttttgacaagactaaaactcatggttacctattataatagagattatattgtaaggtatttacataattgagattagaattctgggaaaaaaacgaaattcgaaattgtgttacggtgaagaatctgtagttttcagttgctgttttacaaagtttgaaagattgaaggggagacaatctgtgttctgggtaagaaattcgtgttaatcctattaattacacttgagaacgtgatatgaaagtaatgatacgtttttaaaaatttctgggttcataaattattttgttggagattctttttgtatttgtaaacccaaaattatccaaagcaaattgagaaccgaatgggtattcaaaatatagttatatacttaacataaattatatttagacttttatattccaattacccaaattataattataaaatagaagttaacgtacactcgtacatttatcaaagaatatgtatgtacactactaattatgtatctggtgaattatgtaaaaatgaatgttttacgtacacgaatacatataggcatggtagatgtgaaataaattgtaatggtgtgcaatttagtattggaagatcggttttacatgaatgagagtacgattcgttgaaatattatatatgcataatctatattaaaatatacagcatacatataatttacataatagcttaatctggatgtcaaaaaaataaaattaaaattttttcgtagacaatggttagagaatttttaaactcattttaatgttgtaccatgtacgttccaataaatatttttgtgtacgtacatagtattagatttatgtgatttagacatttttatgatgtaactgtttagagcggtcgtatacgtgtacgtgtatctcatattatcgtgtatgtttaagggtttagtttaaaatcttgtttattctcaacaattttaactcaccaacaaagatgtacgtacattattatacatgtacgtacataacatttttcaaaagtatgaggaacaactatactttgaccatatatttttatttaattattatatatgaatagatttatgatgaaaaccccaaaagatattttatctaatcaaaataaccaaaggtttctaatgtacaaactcaataaatattttgtatgccgcatttacaataaaacaaaatctaacatgtttatttctattttaaataatattttatttattatcatttgaagacaattcacgattagcaatatcatataaacatatgtgcgtaacggtaataatatatacgtacacggtagtaatgtgtacgtacacggtagtaatgtgtacgtacacggtaataatgtgtacatacacggtagtaatgtatgtagtaatgtgtgtgtacgtataccgtaaattacatatacgtacattttttttaatgaagggtataattgtaattttgcactcatcttcaacctctgcaaccctaattttgcagccgcttgttaactcattaacatctgaaactcctcgccgccgactactcttcttcatctgcgccatttgagtatgaacaataattcaagaaaccagaaaatcctctttttgttattctttatcacgagctcgatcgaaatttcctcaacttaagcaacgactagaactcgcacagagcctcaatcgaaatttcactttcgatcggagtttgtgtttcgtcggaattgttcttcgtcttcgacaaacagtttttgatttcctttggttgtcagaaagttaataacgtgtttttgatttaattttaaatttaaattttgtaaccagaaaaataaagaaacgaaactgaaccgcctcctttcatttctcgttccagggcaaatttgtccatttttggctgaatggctaaaatctggttgggcgaacccactttgtcattttgtgaaagaaaaagtcagaaaagtgtcgaagggtgaaaatttctttatgttttattaattagtactaatgcatgcagatacacagcacttgtagaaaacaatatcgtccaagcagcaaaagacatgcaaagagtcatgtcaagatctcatatctccgacgaagccacgacggatccacctcctcctccgccgccaccttcctacaaactcttctcccgctgcttcttccgcctccatggtcgcgacctcttcgcagcctcctttaattggttcctagtagacattgtcttctacacaagcaacctcctcctgtcccatatcttcagtcattactccaagaaaccttccactgcagaaaacgtctacgacgcagcctttgaagtggcggaattaggagccatcatcgctgcttgctccaccattcccggttattggttcacagtttacttcatcgacaagataggtcgtgtcaaaatccagattatggggtttttcttcatggccgttatttatttagtcgctggtattccgtacagttggtattggtcaaagcacgagcataataataaaggcttcatggttctctacggtttggttttcttcttttgcaattttggtcccaacactacaacttttattattcccgcagagcatttcccggctaggtttaggtctacttgtcacgggatctctggtgccgcgggtaagcttggggctattgtgggcactgttgggttcttgtgggctaccaagaagatggaaagcgatgataaaaaccagatttatcccgaagtaaaccgtatgagaattgctttcttgattcttggtggcgtttgcattgctggaatcttggtgacgtatttcttcaccaaggaaactatgggaagatcgttagaggagaacgagcatgaccaagataacaatgctgagtctgaagatgagccacagattgttgacgggcaatcctccgtgagcactttgcttcagacacgatgatgatctcgacatattgaacacatgatcagttcaagttcatacaattgtatatttctgctaatcttttctagattttgtttacattttgctttgaggtatttttttccaattgcttcttacccaagaagctgtttaatctacatttcctctgtttttttcagttgcttattaacctgtaaactgttcaatctaaagattgctctgtttttttcaattatttcttccccaagaaactttttgtttttcttcaattaatactctgttcttttcttcaataatcattatttttaatattctctgctttaatttcttcatggttggtactagaaatttgtcaattctctgcttcttatatataggtattattgcacatagttgttacaagacttccgttgataaatcaaaagagaaaaaacgaagacactgtaagatgctgatcaaatgcagataagagagaatgatctgatgatcacttagttttggtggggaaagaagccatcttgttgattccacagagaccctctggtttcccagtgttcctcttcagcctgatgtaacctttttctccccattttggtccccaagaattcttcacaatgatgtaatctgaacccttgcttgatccatacccaaccgcagccacaccgtggtcaagatcaaccccgcaccgcccatcaaacacgcccttcatataccaaatacaaaatgattcaacatcaacaagagcaattaactaacaaccattttctttatttataggtttataatgtacttacgccgctatagaactggaactctctaccagatgcatcaatggcgacactgagaggctgatgagccaatgccttcaagagactcttctcatcattagtaggtacgtcttggtgtccattaatggttactgtttcagattcatcctgttttcaaaacagagataattagaatgggaccacctttcattaacacatcagagaccaagagttgatattagaatgggaccttttgcatctcgcaagttccttcttccatagagtaaggataatcttcttccttgcgtagacctccgttcttaacaatgtactcaaaggcatagtccatgagaccaccgttgcagccattgttgtaggtcgtgtcacagtctatgagttcttgttctgacaatgttgtcaagtttcctgtcacaatcttgtttataccttcgacagctgctactgtcgaaaacgcccaacaacttcctgcgaaacaagttttttaaagttaaatggtttagttaagagtcaaaacttccattaacagatcagagaccaagatttgatattaccacaagagccctggttcttaacttccgccacagctcctttctttctccagtcaacagacttaggaacagcttcgacgtccctgtaagcgaactctgcgtaagatctttcttcatcgcgtctcactatatcagtcttgagccctaaatacattttcttgaactcctcatggctcaaatccgcaaactcgttgagcccgagccagtagcttttccctttcttgttagtctcatcgatgtgctttagattatccttgaaaacttcgaacctaagaaacttctcttcaacggtttcataagctttctcaaaatttgagatccagttttcgaagagttctatgagtttgtcatgagattccaaatcctcgggggagtatccaacgatggagtaatcgtgggaagaagcgaaagagagggagagagaagcagcggataaggcaagagcaaaacagaggattcttgaaggtgaagaaagagccatttgagtacgtttgtttttcttttgtcacttgataagaggaaatggaagagaagagcctgtttatataggctggagactcgatagaggtcgctctttttgctttagagtaaagtagtctgaatctgtaacttgtgtaaagtctgtgtctttaagcttagttttgtctttccatgaggttactttgactccaagtactaatcgtatatgcaggccggctttacacatgtgctggaggagctgaggcacagggtctacccaaaatttctttttttttaaaagtaaatctattatagttagggtccaaaaattttgatatataacaaaacacaaaaatgagaactaatttttttttccagctctaggtcctttattattctgagccggccctgcggtatatggtttgtttaattatgtgcagaactagaaacctctgtctcggtcagaggtaatcatttaaggaaggcctcaatgataaaatgccaacctcaacaataagaaagcccaaaagtgggccaactatgtaattaactgatgaaaaatgttttgatcaccaatcttaattgaacaatatacaaatcatggatttgcggcccataatcactaaccttttatggtatgaatgaatgttgaagtttagttgattataattagctcttcttttgttcactgttctaaattgtttaaacataattcttaatgagacaatataaaattcacaaaacatgagattacggtgaagtatatttctgtttttttttataagatatttattctgtaaagaacaaagtttgacctgtcaatccaccaagatttctgataacaatgtcaggaggataaggatcttcgttttacttagtttttaatcagctaattgttgaataagatatataaaatttaagaacctaatacgtaaaaacttgatttttataatgatgacccaccaaccactacgaagtatgatctaaattaacaccatatttttcataaagtggattcatttaaaacatgaatcatgttaaagttacagttgaaaactcactggttctaactttacaggacatctacttgactgcttgtacaaaaagaaataaatgattgttatttcttatgcagggaaaaaatcaacaaaatatataagaatgaaaataaaatgataataaaacatatcataagatccgtttgaggtggagccacgtggtcggaaatgctcaaatgatttgggagcacgaactctatcaagaaaaagaccattgtcatatttttctaggtcgtactcgtacatatgtaatatctatccaaagttttcttttttcacataaaatctcattccagcgttaataaatatgaagaggacgttagatatttttatatattctcaaatagccttgtgctgagaaaagaaaatcatcaacttgtcacagaattagaaaactatacgtatatgctatcaatgttgcatttttctaaaattgattgtgttgtaattaatataaaaaatactagtagaggagaagtaattggtagggcataaaaaggtacgtgagaaagtgacaaagcactaatattataaatcacatgccctctcattgacgccatgttcgtctcctattgcatcaaaccccatctgtctcttaatttttaatttttgttttaaatagtagttttattgttattattgtatagtaatctttgtaatttccttccaaaatctataatattttttagccgcaaatttatagtagatccactattgtgtgtgtgtgtgttttatgtttatagctgaggttattaagccacatgattacatgtgaattcctgtaagatattcgcacgatatttttatccccaccaatcaccaatctatgattcaaagtgtgtgacatatactgactttcgaaaaatgaaatgagtaagcaaataagattacggaaaaataacaatgaacacgttattaacctgcgacgacggtgatttataacgtggatcctctgtatttgcatgttccacactaatccggtcctaatgtttttcaccttcattgctgtttctttttggtcccttctgctaattgagatatcataagatattatatcctcattttcaatatataggatatttgagttaaaagcagatagtttaagattttttttctaaaacaataattcaatattaaatttttaaaaattcaaccaatcacaaaaaaactacataatctaaaaagtcgtaaaaaatcaaatacattaatttgtaaaacatcttatataatgaaaaaaaattaaactctaaaacatccagtatagtgaaaaagagggagtagtactcaacaactactaatttcataaggtttccaactcgcgatatagaaaaaaaaaactaaaaaagaatttgattagtgatcagattttaaacagtgttataaatactgtttttaacgttatacaaaaaagctggatatttacgctggttaaaaaagataacaatataatcttgaaacaaaatattttttgagataaatttagcatatttatgtattagttgctaaaaatgatttatttaaatataaattaaatgtgacaaatattaggttagtttttatgaatgaaaaaactcatttttacatatttgtactttttagtattttagtgagtttaacatcaagacaatcaatttaactatttttttaacgacgcatcttggcgggttctaccaacttaaataatattgttcgttgttctttattccatgcaagttaaattttcaagcaacgataaattatgatatttagttttgtcgtttatgaatatttattttttagtgtcggcgattaaactctcgttttaactaaaattaaaaattgttagttaatttaacatcaataacatcagattaatttgtccatcttcttggccaattcttccatcttaaatgaacattaactagtttgatatttcaatgataatcgcaagaataataatagaaaggtatttaaaaataatttcttagtatttggggagtaaaacataaatactattttttttttgtcaacacattaatactagtattaaatttgccaaattttatgacacatattggagtgttcttccattttaaatgattttttgttctctcacgtaaattgtttattaaagaaaccacaaaatatgatatcgattcttcattttctggttttaactattgcaccctcatttttaagtaaaagaaattgctaatataacttttttttttggtaatagtttagtttataaagaaaatctaccctttcaattatctatcaatgttgctttttaatcaatttttggaaggtgtatctctgcaaaatataaataaactttgtttttctagtaaatttagagaaaacaatgactaaaaaggtccaacttttacacgaaagtgatagacatccggaccactcttaactcttaatataaatttgaaaaatctgactttcatattattttttatctaaacgaaaaaaccaaaatgttagtcgtaatccatgttgcaatgaacggaccccataaataattatcctcccaaaaatctactcataaacgagtcatgacaatgattttttaattaatattcagatattgtttcctcagatctctaatttttccccagatacttccatccgaaaaaaattgataaaataaaaaagctagattttattaatttattttaactagtcaattttttttcttttatgagtttctaactttctatataaagtttcgaaaacattaccaataatcgtcgtaaatcactccccacctcattcatatttttagccgccagaagaactgattggtgtaaaatccaattttcttgctgttgtgagttttcacttctccgaggtaaaaaaactaatcccggcggtgagaatctcttgggaacttgctctgaacgaaactttttgttgcaataattgtaaccaaaaaataaagaagacaaaatctttttgtccttattgtagattccatcgccggagcctgtccgaaaataaaatttaactaaacttggcaaaattcattcaaaacgagtccaaatcaaatcaacccctatttcaacgcctctttttctccctgatttatatatcggagagatttcaaggcaaagctttctcatttcctcgtaattgccggcgaattctactaaaggtgagacctttttcattttcccagaaagtgaagcaatctttttggggttttattctctttagctttcttaactgatcaaactaaaaaagcaattctgttttttctttcttccctcctataggttagttactctgcatttttgattactgtttgatgatttttatgtttagggtttttaattgagcaaattcttctgggtttatcagattttatatttttgtgaattggttaagatttagatctggatttagatttttctttgtttcatggttgactgaaagtttgaaacttcaaatggagaatcactgaatctgactgatttgaattttggtggtgtttctagagtttgttgagcaatgaagggagcgactctcgttgctctcgccgccacaatcggcaatttcttacaaggatgggacaatgccaccattgctggtttgtttcttttttcactcttgttggtgcaattgtgttttgttttgatcaattatcatctgagatttgaaaaatgttacaatgatgttgtattggatttgattgcaggagctatggtttatatcaacaaagacttgaatctaccaacctctgttcaaggtcttgtcgttgctatgtcattgatcggtgcaacggtcatcacgacttgctcaggaccgatatctgattggctcggcagacgccccatgctcattttatcatcagttatgtatttcgtctgcggtttgataatgttgtggtctcccaatgtctatgttctgtgctttgctaggcttcttaatgggtttggtgccgggctcgcggttacacttgtccctgtttacatttctgaaaccgctcctccggagatcagaggacagttaaatactctccctcagtttcttggctctggtggaatgtttttgtcatactgtatggttttcactatgtccctgagtgactcccctagctggagagccatgctcggtgtcctctcgatcccttctcttctttatttgtttctcacggtgttttatttgcccgagtctcctcgttggctggttagtaaaggaagaatggacgaggctaagcgagttcttcaacagttatgtggcagagaagatgttaccggtaaggtttcttctcgctatcttttttggttatatcacctgaatccacttttgacggttctttttatattaaatgcagatgagatggctttactagttgaaggactagatataggaggagaaaaaacaatggaagatctcttagtaactttggaggatcatgaaggtgatgatacacttgaaaccgttgatgaggatggacaaatgcggctttatggaacccacgagaatcaatcgtaccttgctagacctgtcccagaacaaaatagctcacttgggctacgctctcgccacggaagcttagcaaaccaaagcatgatccttaaagatccgctcgtcaatctttttggcagtctccacgagaagatgccagaagcaggcggaaacactcggagtgggattttccctcatttcggaagcatgttcagtactactgccgatgcgcctcacggtaaaccggctcattgggaaaaggacatagagagccattacaacaaagacaatgatgactatgcgactgatgatggtgcgggtgatgatgatgactcggacaacgatttgcgtagccccttaatgtcgcgccagaccacaagcatggacaaggatatgatcccacatcctacaagtggaagcactttaagcatgagacgacacagtacgcttatgcaaggcaacggcgaaagtagcatgggaattggtggtggttggcatatgggatatagatacgaaaacgatgaatacaagaggtattatcttaaagaagatggagctgaatctcgccgtggctcgatcatctctattcccggaggtccggatggtggaggcagctacattcacgcttctgcccttgtaagcagatctgttcttggtcctaaatcagttcatggatccgccatggttcccccggagaaaattgctgcctctggaccactctggtctgctcttcttgaacctggtgttaagcgtgccttggttgttggtgtcggcattcaaatactgcagcaggtaagataaaacttttgattgttcagacacgagtactcttggatctatcatttgatcacttctctgattatctcgagttttattttgtatgcagttttcaggtatcaatggagttctctactacactcctcagattctcgaacgggctggcgtagatattcttctttcgagcctcggactaagttccatctctgcgtcattcctcatcagcggtttaacaacattactcatgctcccagccattgtcgttgccatgagactcatggatgtatccggaagaaggtaaatatcaaaacctataagatattttaacatgtttccttgttttctcatgatactaaagttatctctgtttcattttgcaggtcattacttctctggacaatcccagttctcattgtctcacttgtcgtccttgtcatcagcgagctcatccacatcagcaaagtcgtgaacgcagcactctccacaggttgtgtcgtgctctacttctgcttcttcgtgatgggttacggtcccattccaaacatcctctgttctgaaatcttcccaacaagagtccgtggtctctgcatcgccatatgtgctatggtcttttggattggagacattattgtcacgtactcacttcccgttctcctcagctcgatcggactagttggtgttttcagcatttacgctgcggtttgcgttatctcatggatcttcgtttacatgaaagtcccggagactaaaggcatgcctttggaagttatcacagactactttgcctttggagctcaagctcaagcttctgctccttctaaggatatataacttgtaactttcttcttcgtcaattgctctgtgtacctaaagattctcttcatcccctttttgttttgtttttcagataccttcatatcgtttttgtttctttttttttttttttttttcctttgtttcgttgtcaaaatcaatctaataagtactcaattttctctctttccttgaccaacaccgatagttacgaaggtttaaggataaagctttctcttgtctttatgacttggttctgatggtaaagcaaatagagaaaaacatagatttaggtaagtgtgatctactacaaagaaaatctccagtttcttggaacgcaagtatgactctcgagggaaaactgtatttacaattagattagtacgtctcaggacttgtgcgtttcctcagaggatgaattgcctgtatgattctcctgagaat

SEQ ID NO: 47 - DNA, 98581 bp, Arabidopsis thaliana
gaattccatatcaccgaactgttggtgcatttattttgttttacgtgtcattctaagtgattcatgtaatttttcaagtgtggcaataaataaagatatttgtattaaaaaactgaatagggaagttaatgttcggtggtcacagaatgggccaatggaaccaaccacacaacatgactgctctgtcggcgactttgacatttgtaatcccactcacgtgaaaatccaatcgaccgaacatgataccgtacacgtgtcttttcctgatgtcatcattaattacatcaaaaagtttagaataacagactacctgtcgtttttagtagcttcgtataactaaaacgacacgccggctacaagttctaactagtccactcaacaacagtcaacaccatcccaatttctcaaatacaaacactttgttccaatcttgaatatgaaaatatctcatcacaagaataatacaagccatcataatcatcaattgaaaacttgaattaaacacctcaaaacttgcaaataagctagcttctctagtcattgaatgttagtccatcaaactattgcatctacacacttttttctagaggcccatattcatctaataacacatccatctctgctgctagtgcagtacctgaggtcaccaaaattgtataccctccaccatatcatcgatttagatcatctgctctcgttttccatctcaggaagaaagttatgctgacttgtcgtttggtgtctctcgagttcttctagaaccaatttgagacactgaagtctcgtagcttcctgagatgtttctccatgtcttctctagtcttggtccactcttctctttctattaccgttgttgggtcatctctttcaccctgaaagaatggaaatatatagacatagagtgaagatgagtaaagctagatgaaggaatacaaatgactgccagatgaaatggatttggtcatttggaaatggaaaggtaccacgtgtatgatcttaaaggaggttccattatctcgtatcacaagcaagtcatccttcctatccctttttcttcctcccggaactgtcacctgaaacaatctaaaaccttaacatcggaaagaagattgtcttcatagctttgagctatgcacagtatttaaagaactcataactcaagatatctgattcagaactagaggcataaatagcactaatataaaccagcatttcattagtgttatagcatgaaaaatattctataagaatatgtcaaaaaacccaattggctatggtctacggttgaggtttgtgctcagactcggaatgagaactttgttaataatgcttaaataacttggaagataagaattagtcataccagaactctggctctggtgattgactttgtcttggaatcaataacatatatctcttcaagatctagcacaaattctggatcgtttgtccttctgttccggtaatgttttgtcaagaaaacctgcataaaaaataaacacgatgaagacaatttgtatcagaaactgtaactactaaactaagtagtttcgtgttgatctcatccttaatgcttaaaaaacatatttcctggtgtggtttccaaaaatgttgtcaaatcaaaactaagtacatccttgttaatacatgttgctcaagactccctgcatcaaagacctaatggatttaacatcaatgtacatggtccaatatgtaccttggatatctccctctcagatttgtacagtggatctctgggggcatcaataggtggttcagtgacattgtaacatccatagtcactcattgcacatcgaatatactgtacttgtaacatcattaaacaagcccttgttagcaccactcactcattgtaacaacttgcttataaataaaccttacaatgtaaaacatacgcaatcatgaagcagcaaagagtacaaaactggccacagaatgaaaggaaagtgactaaacaaacacccagctgctacattctgactctctaatcatactaaatgctgaccatttacggcactttttgagattatatgttcaaaattccagtctatcagtgtgagtagaagttccaaacaataccaaacgtgtacagctctgtgtagataagatttcttaagttatacaattactaggtagagtgaaggtatatgggttatacaattactaggtagagctctgtgcagataagatttcttaagtgatacaattactaggtagagtggaggtatatgggttcaattagcaattaagcacaatatgaaaagcaattatcttgctgaacaaaaggaagtctcagaacaacgcataggcattacaaaaacagcaaccgataaggataaatgactgaccttttgaggcatcggtgcaagaactctcggaattgagtaaatatctgtatccggaggagtaacatacatctgcagccacccacacaaaacaatttacaattgaagaatgagcacagactctagagaaatcgaagaaatgagcaattagagtcactgggaattcacacacctctctgaaatcataaacatcattatctggatcaggaggttttctgataaagaaatcacagtccattaagctgagtttatgaaactcatcttcgtttatccgataatcaaccaccatatccgaatcccatccttgtgtcgatataaaactcttactctgaacaaaagcgatatctccatcaccaccaccgcctgcagcggctatcgcggcggccaaggggtcatactcgacatcatagtccttcttgttgtcaacttcctctacctcctcatcatccatatcatactcgtccgctccacctccatcagcatcgacgtcatctactttaacgactataccacggccgcgtcgggatttcagtgttaaaggcgcgaaaagaccgtccgttctgaatgacgcaaatagccgctgagagccggagggataaggtggcttcgaggtgaatgagagtagagataaggaaggagaagcggcggaagacgccattggaagcggataaagctcacagagtgttctatctatctgtggattagatatttcgaggaaaaatacaattaaaaaaaaaagaaaaactatataatataataataatcctttttagtgaataaaacaacaaaaataaattaggaaataattaagagcgtcatttttggtatcccgcgcaactttttcttctcagtttcagtttctctacatcgattcatcgattccactctcttgattgctgtttagatcaatccgtctcgaacccaggggttagtatatagtggatcaaactgatccgacccgacccgacccgaattattaatgtcggaagttaatgagatgagtggtggttctattggcggcgaattgttgagagcgtcgccgaaggttttaacggccggtgatcggaaattactcaaggtggagcttcggccaggggatacgacgtatgtttcgtggaagaagcttatgagggatgctggtaaggtcaatggtttatcggcttcggttcccgacccgcctcctaatgctaaccctaaccttgagtttcgaattgcaccggtgagtttgatgttgtaggaattggtaatcggatatatatacttgtaggcatttgtgggtttcgtttgctgttattggagtaagcatttgtcttgtttcggggagttgtaatctttgttagggtttataaaggagctttactaaattcgcagattttcagatttatttgttggggaaaatgcttgaaatcgatatggtataggaggaattctgttgttattgctctctgacgtctgtgactagagttcaataagcaaactccttaaacggagaaagtctacaacctgatatatgatctttggcttcatttctaattgctagctacattaggctaacttcatcgttatcaatgtgaatatgccatcaattatacttgatctggaaaggaatttggttcacatagttgcaatggaaactatagctgtaatagtgaagaatatagagaaagttttattaatatctattagtgcaagagaatgaagcatataatagtggatcttcatttaagatggtataatatgcttgcagcttcctcacaatatattcttcttatgcatacaatatgggtggttaaaatcattttcaacagctgtattttcgtatataatgtaggggcatccagtagagattgaaacgaatgaacaacctcattctaaccgtttcaacgctgttattgagaagatagagaggctctataaggtatgctactctttgttaaaacacttttcttggtaggttgttatatgtttgatttttcacattcacaacatttttgcataccatgcaatagcactgttgcattcacacatctctgaaaagtgtatgcttacttcagagaataaatctcaggggaacgatagcagtgatggggaagagttagacggtgctcctgatgatgatgagtatgacactgaagattcatttatagatgatgctgaactggttggtgttgatatctttcaaatatttttgatagctgagaaatcatatctctgttttactctactccttgcaggatgagtatttcgaagttgataattcaacagttaaacatgatggattttatgtaaatagaggcaagttggagcggatgtgagttatcttcctcttttcattatctgatgtctcttaactctttggtggctttgtcacttttcaatcactcagatcatgtttagaataggcatgtcgtaagtttttgaaataaacatatgaaatcaccttgcttttcagtttttcttcctatttggatatgtgtagtctctccaaatggtaaaatatggttggcagtcttgctactactgccttaactaatgtctgtagggtgtttggtatgggtaaagtccatttttcaacttttctggttaaaaaacgttcatatagatgtaggttttgcactttcgataggatagagtttttctcattttgcctaatcatgctatatttcatttacaagttatctaatccctgattcattttcacaatagggaaccttcaacaacatctaaccagcaacccaaaaaacggcgacgaaaagattcagcaaaaccctgtcgtgatgcagttgacgtatccgataaacacaccaagttgtctataacagctaggaaaaaggtaacatcttttattgcaaatcatactaatttatgtcggagtttgagtctgataactgattatacgaatggggaagtccaggatcaatcaactgctcctgggtcctggaaaacacaggagtcacctttgccttctggagcgcaagatgcaaatacttcagtacctctggatgatgtgaagcattctgatagagcaaatcatcagtctaggaatgatacaagtcacaagtcaagggaaactggatcctctagtgcccttcatcagaaatacagcaacaaaagcttacaccaacaatctacgtccctgctaggaaaatctccccccaatgtctttgcagaggtaacagtagtccgtcagaaagaaaacaatggtatgcatcagctggcaaatgtaacgggaagcagacaatctagtcaagcgtctgtaagtacattccaactgtgtctacaattacataaaatacactcagtaagttggttgcattctaaggtcgtagttttgtttctccagttttcatctcggttctgtgatatttttctggtcaatctttgcttccatgcatttttcttaccacaaagtttacatcagtcttgctttataattctgcaataacctgtctctactcagaaaaaagatggttctaatgtgaagtctaaaacctcaatcctcgagaaagccataagggaactggagaaggtggttgtggaatgtgagttttaatatttttcaagtgtgaccaactagaatagcatttggtgattttcaacttacaagaatttatgatttataagcagcaaggcctcctgctatcactgaaaatcaagaagctgatacctcatcccaggcagtgaagagaagattgcccagggatgttaaattgaaacttgctaaagttgctaggattgcggtactagagcttttccatttgttcttctcatttttttgaaacttgaaacggtatgagaaaaaactaatatgccttttgtggcagcaggcaagccagggaaaacattcaacagagttaatcaaccgtcttatgagcattgttggtcacctaatccagcttaggtctcttaaggtaaaattttctgtctcctgtatcctagtctttctgttactaaagcagacttgttaggactttcgtcaaggtgtttaaatagttagtcttcttcaggacattcatgttccagtgaaaaactcttctgtttcaggtacaagcaaacaaaatatggtttcttactctttgtaatgcttattttgcagaggaacttgaaaatcatgattgatatgggagattctgcaacccgagaaaaggatactaggttcaagcaaatcaacaatgaagttcttgatatgataaaggccaaagtttctttgatggaatcacaggttctctctctctctctctgttctaatcttaagttgcttgataggcatttctttcatccatggcttttctatcttattacattcttggaagtgtcattaacttttatgaaatctggagttctctctgataatggttttccgtagatcaagctcttcattcttttgttttcgatgttccctgtgggtcaatctgcctttgtagcgtattttcctcctattaatatgttgaggcacctgtgacatttatgatatttcttgcactatcattttatgttccataggcaatcaaaccagaaggtgcaacatcagacgattttcaggactcagtagaaaagccatctttgaagaagtttgtcatggatgcggcattggaggataaattgtgtgacctatatgacatatttatcgacgtaattatcatttacctttataatctgccatgccaattctagacatagaattagagtcaaaacggttttgttcctgttttttggtatattagggattggatgaagatcaaggtccacaaacaaaaaagctatatgtcaatgtaagcccttctccattcccgattatttttggtattctggttttttttgttccaagcttatctcatgtcttaaatcaccaattagacctagccaaaagctcaaggtggtttgttagagcttgatgaatattgttttggaattattcatgctccagttggctgaactctggccaaatagattgatggattatcgtgggatcaaacatgcaattttccgggcaaaggagagacgaaaagcattgtatggaaaccttgcgaaagagatggtagttaaagaattttctcagccctttacctctttgcattaaaattttcgcaatttgctttgcttgattagattctgctttgttaaaggatcaaacaaagatgaagaagagtatgaagcagttggtaccaagaacagactgtactgctcagcccaacaccgaattagtggttcagagacaacacagtggggaaaaaaaattgattgttgatccaaatgcaaccagcacttccgtggtcactagtcaaactatggttgacagatcaaatcagcagcagcctgagaagctaaagggaatctcaagctcttgcaatcctacagaggaaacaagagtggtcaagagaaagaacgaggctgtaatggctgagaaacaagtcgttcttgccctgaagaagcccgaacatccacagacacgtgtaatcccagctcctcagaatctgaacatcccacgaacaaccccggacctgaacttgccaagttgacatcacgattgacaaaggagctcttagaaacgccggagacaataacctctggcctcttccttccttgtattttgaggtggcacggcattagtcctggcgatgccgatgcttggtttttttagctacaaagcatggtttataaagttgtctgtattccagtttggctcttattaagttagttactctatttacgtgtcctttttcaaaactctaatgtataaagttatgattttacgggcaactctttacttttgagtaaaaaaaacagagcaggttttagtactgaattttgggtaacgtagttgaaaatttgatttcggacgataatgtaaaattgatgaaatacatcaaaatgactacattaatccttttgacacaatatgaataatcaattttaattaatattattattacttgtaaaacagtataaatatggctcattatttcacagattctcaacactctctcattctccacaatttacgatggcacaccagctccgttttgccgccgcaagagaacccatctcagaagagtatccggcggttgctcttcctcatccacgttgcatctccgtcgcgtttcctcctccgagattcacaccatctccgtcgcctttaactaattactcattcttggccgcattaactcctcaagaactggagatgcgtttgcaaattgcaatggatgtccgtaatgactaataacgaagatcatgttgcggctccgtttgaagagatgatctcgaagttagaccaaagaaagcttcaaacgatggcgtcattgctgacatcagatcccgattacttcttgatgatcgcaagaaacatgaacggctccaaacgcattcagaaacttctcggaaaaacagatgacgtggacgctttattcgccgccgctatcttgcgccgcttcctccacatcatcaccgacaagtacgcgtcgtacgtggtgagacgggggatgacagttttcgataagaagaagaaaaaagcaatgtacgagcacattctccactacgcgagccacatagcgcgtgataaacacggtaacctcgcgctcaacgacatcataaccgacgcggtacagaaacaagctctttgacgtaatcgcgcacaaagctcttgtactaagcaacgatgcttatgggaactttgtgatacaacgcgtgcttaaactgaatgacttgcgtagcaagaacaacatcgtcgttagtctacgtggccactttgttgatctctcgtttcagaaatatggaagctacgttgtggatgtacttttggagacgaaggagtcaatggttgtggtggtggaggagcttatggaatgtgaaggagatatgttgatgaggttggcgaggaatgagtatgggaatttcttggtgtgcaaggcactgagagtcacgcagaaggagatggttaggactgatctgttttggggtttggtgcataagctcaagccttttcacaatctcttgcgttggtctcgtggaaagaacattgcatccatcttaaactcgattcgttagttcgtctcaaaactagttaacattgttcagttattaaaatctctgctgaaagttctcgatttgatgttgttagctaactcttttaaggaggtttaccataacttgtcaaaaacacaaagaaagggagaagagggattgatatacagtatatagaattctctctttcgtgttattacttattagaacaagtttgaaagctgaagcactcacagtaatttctgtaattaaggacgttttgccttatgatcaaattctacaatagatcacctgaaattttaatacaaatcctaaatccatcaaggtatgtatcaaattgagatttctgtaactactagagtttgaccaaacagttttagttaacctgaatgtgtatgcctaattgcctattgcctcataatgcatcaagcaataccatctactaagcgaaaatggctcaagaaacaaacgtagagaaatcaaacattaggcattaagatttgggatagatgtgctagaattttctttgattgttacgataaagaaacacaaccctccaaaacatttttatatgattgctttttttaggtcgggtttttatatgattgttatttccaaggaaaactaaacacaaaaaataattatgaaacgtttttcggattgttattattagtaatagattaaatctgtatttctaaattttaaattttattaccaacaaataaaatgatatgatttcatatatcaaattgtaagttttgtgagcaaattttcaaaaagaaactgtgggtattcatcaatgataatctatatttggattattatcatgacaaaaaaaggttacagaaaaattaaacaattgtagatattgtttttattttagatgaaaccttctgtccgtattataatttgcatctcgaggttcttatacgatttgtactgaataaaacatattttttttgtttttaatcataactttcccaaaaaccatctcttccatcgctagctgtaccggtttcaatctcaaatcctgggaattgaaatttgtttctctgtcggagaatcatcatcgacttctctgctacttctctccgcgctctccttcgtcgtcgtcgatctcttcagcttcaccgatctcatttccaatcctgaaaaatcgatgtggtactgatctacgattgtgctccgttggtagccttatgaattagggtttttcttacgcatcttcgtatgtggagattggatcgtgttcggaaaacttctggacactgtcttcgctgctagatttttggatcatccttttgcgaaaatggcagcgccaaggccgactggaggccaggatctgttcgatacgtatttcaggagagcagatttggatggagatggtcatattagtggagctgaggctgtcgctttcttccagggatcgaatttgcctaaacatgtccttgctcaggttcttcttcgaaatctgcatctattttcttcttttgtatggattattgagaaacggcggagaatacttgtagttcctataggttttgaattggatctttgatctatgggatcgttggttgtgaatgggatgtattttgtcaaatttgttctttgcggggtggttaataggacctctcttttcatttctggagcttgtagtcaggttgatgtagttctaatggagaatcctttttctaagtgtagaacgctaaatgtgtttgctatccactgtactgttatcagattggcacatattgagctggtatcagatcagacattgtatttatgtagatatgaatagttttaagctcttttgctttcaattggagagtaaaatttgaatgaaaatagcttgttaaatgacagagaagcaacctagatgtgtatacttgtctgtaccgtgcataagccaagaatattgcgtgcattgaaggaattctgcatattgaattttaacatacgtttctggactgtagacaacagcttcagattagttcggatagaagctctttctgagcgcctattatacaactattctttggattgttaatgctataacttgtttctgttttttaatctcttgtaggtatggtcctatgcagattcaaaaaaagccggctaccttggccgagcggagttttataatgctctaaagttggtaacagtggcacaaagtagacgagagttgactgctgagatagtaaaagctgcaatttatagtcctgcttcagccaatatccctgcacccaaaataaatcttgctgcaacaccttctccacagcccagaggagttttgcctgctacacaagctcagggagttacatcaatgccatcagtagcggctggtgtgagagggcctcacatgggtggaactgtaagcactagtaaccaacaagtagtcccaggccaacagaaccagtttactgggatacctccatctcagacacagcaaaactttcaaagcccgggaatgccagctggagggactaatgcacctcgtcctgcaaaccaacctatgccatctgattggctcagcggcagaagtgttggtccctctgggaacgtgaattctcaaattccttcgagtcagagtacatatggtttgacagcacctaattcaactgccaaccatataacaaaaccacatataacacctgcagtaacaagctctacaacaaccagaccccaagagtcagcgcctgtgcacaatccccaagaatcatctgctactttcggttctcgtgtatcaaatgttccatccaatcaattggtgcccaaggatcccaaggaactggctgcatcaggaaacgggtttacctctgactcacttttcggagatgtcttttcagttacttccacgcagccaaaacaacatcctacgggaagtgcatcaacaacaggcatctcatcggttactactggaactgtcgcgggccctgagatcacacagtctgtagttaggcaaagttcaatcccacaacagggttcattgagccagcatgctgttggtgttcagacccagcttactggaaactcagggcaaccatatacttcctcaggtgcggcttctggtccacctggctctactgttggagttggaatttcagctaccagtcagttggcccagcgtccgccccacccccactctcaaccacaaccccggccccagggccagtcccaacctccttggccaaaaatgactccagctgatgtccagaaatataccaaggtttttgtgcaagttgacactgatagggacggaaagatcacagggaaccaggctcggaatttgttcttaagttggaggcttccaagaggtaggctacacttacttttttgttactttctccgttaacaatggtttagtttcaattttatcttcttagaatggtgaacggggattataatttagtggcacttctgaatatttgtttggatattgattaactgccgtttctggttcatcttgagtatttcatgttttggtcctcctgtagactatactatatgtggatagagatttaatgttcctctagcacaatttgttgaaatttccatggggaatattgaggaatgttttatgtgtctcatgctggtccttggtgttacagacgctttgaagcaggtatgggatttatctgatcaagataatgacagcatgctctccttgcgggagttctgtattgcggtctatcttatggagcgttacagagagggccgaccacttcccccagtgttcccaagctctataatacatagtgagagcatgttcacctctcctggtcaatctgtggcaccacatggcaatgcatcctggggacatcctcaaggtattcaattgcacatactgtattacttacctttttttccgttacactagataaattcatatgtaccaaatattgtagggttccaacagcaaccacatcctgggggcttaaggccaccagctggtcccaaaggaaagcctccgaggccagtgcctctgtctcctagtgatggaatggtccagcccactcagccaaagcgtaaaatgcctgtgttagaaaaaccgctggtggatcaacttagcaaagaggagcaggattcactcaacacgaagtttgaagaagcaactgctgttgataaaaaggcactctctggtttctctctgattttcatttgttaatgtggtgaattgcattagttatcgtgagttttcttttttcgcattttctatccgaagatatcttttaccccttccatatggcatttatatgaaatatttgtggatttgcgtagccatagtcaagattagaagatattctctcaacttatgattggcagtggcagtgaatcttaatttcattggcatggaagaaatcacatcgccattgagaactatgaataatttccttttctaatcctgttttgagtttcctttctctatcacatatcatccgtacctttcccgcataattgatcagttatccatgcaatatttgctggcgtaacttaaaaacttgcgtggctgcctttcatttttttaattcttgtgttttggtgtttaggtggatgaactcgaaaaagaaatagctgattccaagcagaaaattgatttcttccgtgctaagatgcaagaacttgtaagtatctctgcttcttcagcttggtctttccttttaaattgttttctggaatggaatccgcttatttgataaccagaagaagggaaaattgctcgaactatggtcgtatataagtgtgttgtttgatctggccttttttgaagtaatctcaaaagttctaggaatgtagttgtcttcaggttcctcctacatactatcaatcagtttgtttctctaacctcatcactttggttccgtggattacaggttttatacaagagcagatgtgacaaccggtacaatgagatcgcagagagagtcttgggtgataaacgtgaggtatacagtttctgttattgagcctcttttgtgatggtattagagatctagattgattaactaacataatcaacatgtactccagcttgaatctctagcaaaaaaatacgaggagaaatacaagaagtctggcaatgtgggctctaaattgactattgaagaggccacattccgtgatatacaggtagtttagaagtatcatcccaggaacaatgcttactttgaattgtctgcaatgttggatgtctccttcaaaaaaaaatgatgaaccttcctttaaattgcaggagaagaaaatggaattgtaccaggcaatagtcaaatttgaagaaggcaaacttgatgatagtatagttaaggtaagccaaacgtgctatctggttgattgaatttggttcgtagttgtattttacggaaggttgtcttgtaggagcgcactgaacacatccagtcaggccttgaggaactgataaaaaatttgaatgagcgctgcaaacaatatggagtacgtgggaaacccacttctctggttgagcttccttttggtatagatttaccccttctcctctctggttaaaaatcacgtttagcattatattcctgtgatcagtggcaggagtggtttaccatgtctttttctgtttaactttaggatctagcaatattcttatttaaaattttgataaaacgttgatgctcatttactagaggaaactcagtattgtatttttggctagttggcaaaagaacttctacatgtacaactgtatatatgtattcctttgtttatattcataaaatttcctctgttttacaggttggcagcctggaatccaggaaggtgctgctgattgggatgaagattgggataagctagaggacgaaggtatacttgctgtttagattttgattttgttgtcagatgagattattgtggaagcatggctgtagatataatatcgatatcttgtgtctttataatttttttttgggtgacctatcttccaaatttggctatggaatatgcagttgaacacttgaaattgacatcttattttctcttcacttccagggtttaccttcgtcaaggagcttacacttgatattcaaaatgtcatagccccaccaaaggaaaaatcatcagcgtggagaaaagaagttgatgtctcttcaaaagaaggtgaagatgtttcattctcagatgctgactctaaaacggggaaaaagcaaagcagtggtgaagaagattctgagcagtcagagggtaaaacatccgatgttgatgccagagataaaaacggatctctggatgactctaaagttagaaagggcattgaagctgatagttcacctcgaacgaaagatacgaggaggtatgttttttgtgctagacctaatgtgttttggattgcatccttcttagctgttttgaattcatgtgtttccgtgaaaagtactgcaaatagaggaaaaacaggttcttttctccagagaagaatatatctcggttatttacattgtctatgttaattttccagtgaaaatggccatgatgatggtgaatctactgcttctgctggcaaaactgtaaattatgactctcacgacgagacagattcagtttcaagcgtcaaccctgacaacggcaaggtaaaccattttgaacaccccgaagttttgggtttgttgcgtttgataatatatatatatttctttaacctttgtatttcgacatgaaagaatcgttaatttttacgtaactattttttgttatgtttttaccaggacaaggatcatgggaagtatgacagtggttttggatttggatttgggtttgatgacttcagtattaagcctataaaaactggttcgaccatttcaaatgacttcctccctcctaagttatctatatttgctgattccgtcccaagcccaccggcaaatgcaagcgacgtttcccctacaaaaccttctttgtttgctgattcagttccgagcactccagcgacgaacaatgcctcttacccaggccagaaatcattttttgatgactcggtcccgagcactcctgcttatccaggcaacttgtttgctgagaagaaatccttctttgacgactctgtcccgagcacccctgcttatccaggcaacttgtttgccgagaagaaatcctatttcgatgactctgtcccgagcactcctgcttatagcacgtctgattttggtgggaagccatttgcatcagagactcctcgttcagacaacctgttcccaggaagaagcccctttatgttcgactctgtcccaagtacacccgccgcacacgatgacttctctaacaacagcttctcccgcttcgattcattcaacagcaacaacaacgatgctttctctctatcccgcacagactcgatgcgcagcacaagcgagcctgacccattcgcatcaaggtttgattctttcaactatcaaagatatgattccttcaatgcacaaagctatgattcctctagcaacaacaatgcatcggagacgcctaaagcctcattgacaagattcgactcaattggaagcaccagggactctgattacagtcatgggtttgggttcgacgaccatgacccgttcggttctacaggaccattcaaaacaacgacaactacagcagagacacctcggagttctgataattggaatgctttctagccagaagcccacgtgcgatatgaatatgatcacatatcatatactttgctgcttttatagtttgaatttaccagtcgaagagttatatgtatcttcatttctttggtttcacctgcttgcttcattttttattgttaatatataatagtcttttttgccattttttcttttaaggatttttcgaagagtgtcctttgttggtctctgcgtagtgtttctttttatttgtgtctttgtttgttaacttgaataatgaattattatttgtccctgtgaaaacttctattgtatctttgtaatcgtatggatacatttcagatgttgttatattagattgattggtaattttgggaataatccgtatccattttttgatttatactttctattttgtaaactgaaaggtaagtagatatactattagcatttctcaaaatctaatcaagtgttataatatcatacttttgttgatagtaattatgccagaatcatatgcaataattttcttaagagcatatatgtgttggaatttacgaattcaatctgatgccgttcaaatttgtttgataaaattagtgatttactgtatataaataattttccacagtaatatagtaaaaacgaagaaatggatgaacaaatgaaatacgagaaattgaaagaaagaaaaaaaatcattttccttatctttttatggtcataagaagaagagatggaaagtgaaaggcgcgtggagtgcacgcgcagctcaagtgtcaatccagtcacaatcaaatggaagaagcacaagttttaattcaacctcttcggcaatgaagaagaggacgaatccacgaggtccaccaaattcctgcaaacttccaaaacaccatctcaaatatccacattctccgccattaccctgaaccgtttctcgagttgtttctctcatgttcctatgcttttgcccttgccacgtacctatcatgagtcgcctttctccggccaccggaatctcttcccgcctccgcttctccattggtttgagttccgatggacgattaattcccttcggattccggtttcggagaaacgatgtcccgtttaaacgccgcttgagatttgtgatcagagcgcagctctctgaagctttttctcccgatttaggtttggattctcaggttacttacttacttctctcgacttccttgcttgttttcattcactttgttcgatcaatctaaacttagagagacagagtttgcgaagctgaatttaattgttcttaggatctttagattatcgaatcgtttcatgatttttaagcgaaacttttgctgatcagagttgcttatttagtatttcgactgacttcatacactttgatattgaaggctgtgaaatcccgcgatacatcaaacttgccttggattggtccagttccaggggacattgctgaggttgaggcgtattgtagaatttttagatcagctgagcgactacatggagcgttgatggagacactatgcaaccctgtgactggtgaatgtcgagtaccgtatgatttctcaccggaggaaaaaccattgttggaggacaaaatagtatcagtgcttggttgtatattatctcttttaaacaaaggaaggaaagaaattctctctgggaggtcatcttctatgaattcatttaatttggatgatgttggggttgcagaggagtcgcttccaccacttgctgttttcaggggtgaaatgaaacggtgttgtgaaagcttacacattgctcttgagaattatctgacgccggatgatgagagaagtggaattgtttggaggaaattacagaagcttaaaaatgtctgctacgacgctggttttccacgcagtgataactatccttgtcaaacactttttgcgaattgggaccctatttactcgtcaaatacgaaagaggatattgattcctacgagtctgagattgcattttggaggggaggacaggtaacccaagaaggattgaagtggttgatagaaaacggatttaaaacaattgttgacctgagagctgaaatcgttaaggatacattctaccagacggcacttgatgatgcaatttcccttgggaaaattacagtggtgcaaattccaattgatgtcaggatggctcctaaagctgagcaggtcgagctgtttgcttctattgtatcagatagcagcaaaagaccgatatatgttcacagtaaagaaggtgtttggagaacttctgcgatggtttctaggtggaagcagtacatgacacgaccgatcacgaaagaaattccagtttcagaagagtcaaagcgtcgggaggtttctgaaactaagcttggatcaaatgctgtagtatctggtaagggtgtacctgatgagcagactgataaagtctctgaaatcaatgaggttgatagtagatctgcttcaagccagagcaaggaatctggaaggtttgagggagatacatctgcatcagaatttaatatggtgagcgatcctcttaaatctcaagttccaccaggcaatattttttcaagaaaagaaatgtctaaattcctgaagagcaaaagtattgctcctgctggttatcttactaatccgtccaaaatattgggaacagtgccaactccacaattttcatatactggtgtgacaaacggaaatcagattgttgataaagattcgataagaagacttgcggagacaggaaactccaatgggacccttctacctacaagttctcaaagtttagattttggcaacgggaagttttcaaatggaaatgtgcatgcgtctgataacaccaacaaaagtatatcggacaacaggggaaatggcttctctgcagcccctattgctgtgcctcctagtgataacttaagtcgcgctgtaggatcccattcggttcgagagtctcagactcagagaaataatagtggttcctcctcggattccagtgatgatgaagctggagctattgagggaaatatgtgtgcttctgccactggtgtagtaagggtgcagtcgagaaagaaagcagagatgttcttagtccgaactgatggagtgtcttgtacaagggaaaaggtgacagaatcctctctggccttcacacatccaagtactcaacagcagatgcttctttggaaaactaccccaaaaactgtcttactgctgaagaagctcgggcaagaactgatggaggaagctaaagaggtaaacgcgttgctttttaagtctaaaagattctattttctttgttccacatttgaggttgcctgcaatttaggaagtccatgaaaagttgttggtctttcaaatttgtttccaggctgcctctttcttgtatcaccaagagaatatgaatgttctggttgaacctgaggtgcatgatgtatttgccaggattccagggtttggctttgtccagaccttctacattcaggacacgaggtacaaatataagttaagtgaacatctgctcgaccaatcatcaacggctcaattatgattgactttgttttgctttgtttgaatatcagcgatctccatgaaagggttgattttgtggcatgcttagggggggatggggtgatattacatgcatcaaacttgttcaaaggagccgtccctcccgttgtttcatttaatctggggtctcttggatttctcacttcacatccagtaagccttttgacatgttctatctcttaactatgtcttcgtattcttttcctttcgactgccttcttatttttatttttctattaattccatttgtagtttgaggacttcaggcaagacctcaaacgagtcatccatgggaataacacgctagatggggtttatataactcttcgaatgcgtcttcgttgcgaaatctatcgtaaaggcaaagcaatgcctggtaaagtgtttgatgttctgaacgagattgttgttgatcgaggatccaacccatacctttctaagatcgaatgttatgagcacgaccgtcttatcacgaaggtttgtactcacaagtttattcccttaccagagattcaaaaattgctacttctttaaacaaacgagaacatctaagagcttgttataaaacttctcctgcatggatacaattttactgcttgtgtgttgacgaataatgctattataggtacaaggcgatggagttatagtagccactcctacaggaagtactgcttattctacagcagcaggaggttccatggtaagtactgcttactttcaactctgcatcgcataccaaatatgaacctcatttccatctctgagaactatcatgccgtaattttagtgaccgtgagtccccgaaccttttctatatgacatttataaaaatccgaaaattgcaggtgcatccaaacgttccttgcatgctgttcactccaatctgcccacattccctgtcgttcagaccagttatacttccagattctgcaaaactcgagttaaaggtaaagactttaaatacatccgcaactcagtacttttaacctgtagaaccacactcttttcctgtaagtagtaaaaaccacccaagaagagctctaagctcatgagtagaggactacatgatggtttcagtgttaagctgtttgaaatgctgactaattctctttaaacaaaaacagattccagatgatgctcgaagcaatgcatgggtttcgtttgatggaaagagaagacaacaactttcaaggggagattcggtgagaatatacatgagccaacatccactcccaactgtcaacaaatctgatcaaaccggtgattggtttagaagcttaatccgttgcttaaactggaacgagcgtcttgatcaaaaggctctctgatgattgattggttcattttagtaaaaagcatcaacaaatacataaacatagggtcacaggtctgtttgtagtatccagccctccctctttactgtacagattcataatctctataattcactacaaagggaaaccattactgaagaaaatattcatctttttcttccttttatcagtttttcccctcaggtaataaaattgattacagtgtgtatacaatcttatgatatgaatagttcttgggattccatcggggatgaccagtactgcaagattgattctacggttagccttctagttgcgctaagcattgagatgaaaaaccgacatccatcgattttatattcttctagagggtttctatgcgcaaaacttctgacattcacctattgttgacattgaggtttaacatcactatcagataggcataacgccggaataaacaacagataatgagcactgtgcttaccgctgagcttagtttattcatgttcacaagatgatctctccagtagcaatccaacgtctttaaaagaactgctctctatttccaagaaagtaaaatcgatcagatattgtagtgtcaatcatatgtatacacgcagagaaaaaacaaacatgtacctctatttcttttatgtatccatcatcaaagccagattcttgaacaacatttaagtatgaagcaatcagataatcacctaggaacttccggagaagattaatcaatgttcggtaactcccactcctacagacgatattcttaaagagtaaagctcaaggtctttctcaatgggacgcacgtccagtcagcatatacaaagattctattaactttagtactcaccccgtcaaattatcggagcagatatcaagccaacgtcttagtgaagaattcttcctgcgaattcctctgaaagcgtttggaggttttggcaggtgcggaagggacaagtcttccatttctattgaacttccctcatgcaggttttcaagggactgtaacatggtctcttctgtgatcccagaaaatgactctgacagtgcttgttgttagattcatgtgagaagagaggtgttgtgtcctcacaaagcaagatattgttactatcataaatggaaaacaaagaaagaagcttaccatccagtaggtttcccgaaatagccatgaactctttcaataacttggccaagctccagtatcttggatgctacaacaagaaataagatattggaaaatgaacataacagcaaaacctgaaaatatttgttttagagaatggagcatcgtgaagatctacttgacagatttctttaccttctgcggattagaattcccaacaacgatttcatctacaacagcttgcatgtacctaggaaataattgtgtgttaaattcatattcaatagtcagcggttgaagtaccatggcttctttcacatgggcataacaaatgctactacaagcgtagggcttactggaatatatgctgagagcaactttcgttttcacccgtcaacagcagttgccttaagtcatagacatgcttcctttgaacctagagaagaaaaataagaaaatggtcaagtacaaacttaacttgaattagtcataatggtgtatcccaaaaacattataaacttctactcagactatgccatacatataatatttactacaaataatacaaacttaaattagtcacccgacagcatcgtttgggagttgatacataagtgtgctacaaaataaatagaaaacagctgtagtctttcaaacttataatcatgataatagatatctatttccattgttgcccaaaaaaaaaaaagaagatatatatttccatatggtcgagatgcatatccaataaaagtagttggaaaagctggtacctctagcacttcgtcaaactcgaccaggctttttcttatgccaaagaagtatttctctgcgttgatctggagagctagaagctacaaaacccagtgagataaaccagataatcagaaataagccattttttgaagaaaaagcaatggtggaaccacagagaaattaaaatttaaaacaatgaattacttacctgttttactattgtgtcaccttcaattggtaagtcttcatcgtttgtaatctttgatataagtctcacagcccactcagtatcaaaattaaacttctgaaacatctcatcttgcaagctgtaagcaaaccaacagtaatagaaatcatgtcgcagagcaaaggcaggtattattccctaacatattcagattggtgcaaagttaatatatcaaagcagtaaagaatcttttacgtaagtaacttcgctaatacagagagtttctctggttcaggagaataatagatgtggtgattaccttatcataaaccgcgtggatccaggatctccttgccttccagctctgccacgaagctataagaaataatatggaggcagaaacttagataattatctatctagtcatttgattccatcaaacaggataaaattaataatattgataattcgagagaacaaattagcatatttccctcggggaaaaatatgaatggttatgtagttcttctctcttcatcatactaccattctagatagtagccaaaattttaaaggtccgcaaatcaatataatgtactggaaattaaaggtttggggaaagggttggcttaagtatctaaaactagcacattagattaaaaaatgtagcatccaggcagagaagtaaaaccaatagcttacctggttatcaattctccgagactcatgcaatgaagtcccaatcacatgaaggcctccaagcctcttcacttcagacccttcatgcagacaatgggcctcacagtcctttaagacggacagataagccagagcaatagcagggcctaatgggtacatctctgactgctcattgataagattctgcagttccataggatccatggtctggcttttctccaaagattctgtgaccacggactttgcttttttccttgtccagctcttactttcacttttgccaacatattttgctgagccaattaaatccaacaaggatatcaactaaactaaacatcaaacatgatccgtagaatatgtgcacaagttactaaaaatgagtgttgaaagttgagaggcaaacccataagagaagctctggctagcaaagctaatgacgatggtcctacttttatttttgacaatacctgagatgatttacagaacagttcgattatgctacaatgggataaaagaatagaataaatgatcttctgacctttatccttaagaaggcctatgtaaagaactcaagttaagaattcttttgcaagtaataccttctgtgataactcatcatcgtcaatattatcagccaaaacttcactcgttagatatgaaaggatgctatcttctatgatttcccttgcaagcatctgaaagattaagccataaacatagcaggttattgttatgcaggaactcaatgtacagatcacaaaaacaaaaaaaaaatacacagctagatgctctcagaagtagagttatacatcaaggagacaatcaactgcaagtcagacaaacatctggtaaaggatgaaaacgtttgccaatataccttcggatttcctcccagaataatgtcagtacccctaccagccatatttgtggaaatggtgatggcatattttcttcctgcttgggctataaaatcagcttccctggcagcatactgaatgaaggaaaacacataatattagaactagctgaaaataatgctatgtttcttttactatgcagagagacaagtttcagatccaccttgggtcgtgcattcaggacattgtgaggtataccccattctttcagcagttctgataaatattcagaattctctacactgcaaaatcgctaacttgttaatagtggagaaataatgtagtttaaaaatagaaataagtctcctatctagtcctccttgattcattattagtttatccaacataccagccaataaaaaaattctacatgtatatatgtttctatttcaaaaatatctaagaaaagtgcgcctgaatctttctgctatatattctgcttttaactgacatcaggacattggtatatattttgaaatcctgaatacttgccaaagtctatgtgtgaaaatgtgatttaatcaaatggggctaccttgttgttcctactaaaacaggtcgaccttgtccaaacatatcttcaacttctcgacgaacatgttcccatttaccccgagcagtctagcatacatcataccagagggatgaacaagaaggcacacttagtttaaaatttagccatgaaactgatgcaaacagaaatgtgtgtttttaggatgcttaccgcgaaagcttgtattggtagatcgattcgaatatttgacaaatttgtaggaacttcaataacaggtatctgaaacattttcaaaaattctttttcctgcaagaaggtgaagaaacacgcttatctcaaactgccttgtgtaatcatgaagatgatatgtttgaaacagattagaaggtgggtcaaaataaatccccatgtacatacttctgtttttgctgtcccagtcatcccggagagctttggatagagtttaaagagcgactgataggtgatttgagccacaacaattgaatcagcctaagatcaaagagttattgtcatgagcttgaacttttttgaggcatagctttatattacaacttatgagtctcggtaacagacctgaatttctagaccttctttagcctccacagcctggtgaactccttcagaccatctccttttgtcttcaactcttccagtcaactgaaaagatttaaaatcctttaattactcaaatcctcatactttttagaataaacaagatacaaatgaaactacaataattactttgttcctcacgtcaatttatgaaatgaaacaattaatacaactgaagacaggtctacctatacggctatacctcattgattataagtgctttcccatctctcacaatatattggacatcccgcttgtaaaattctttagctttcaaagcattcataacaaacctgcaataatcataattttcagtaaacagggataacaaaaaaaattacacagaaactttgcaccaaatttgaggaaaaagactactatctaaaagaacatgataggattatgaatatgaaaacagatcaggaagcagtttcttactgaaattattgtaacgcattaaaagcggatgctcctaagaccttcacaattattctatgtaaaaaaataatacctactgaagccactattctttattcaaccataagccttttatcagcaacaacttgtacagtatttttaccccatatcttcaccaataactgccgaacatatgcattattttgtaaccatgaccactatatctaaaaaatcaccattcaaaagttttactataaaaaaaaaaacccgccaaagtcttacatcacgatataaaagcatcaagtacatcagtaatagtaataagtggataccttgcccatggatcattttcgtcccataaatcacccgtctcaagagccatttcagcaagagatatgccttcttctgtgagttccactgagttttctttcagttcaactttgtaatgctattaacaagatagtcaaatatcattttagaaaagtcagttccttacttaaaagaaaaaagctcgcaataaaacaatagacaaaggaaaagataaaactcacactatcctttacgagaagttcagccactttagcagcaactggatatcgtgcggcattttcgttagcctgttaacaaatacaacagaaaggactccatcaatcggtgaattgtgtcccaaagttatcgtttatttctctgatgcatctaccgttcttaaccttgttcaaactataattcaaatatctgaatccccggagaacaataactttctaagcttatcgaaatgaactgcattacctcaccactaattagcaaaggatttctgccttcatcaatgaggactgagtccacttcatcaactattgcaaagtgaaatggttttggcctgtacgtcataaacagtcactattgaacaacactaaggaatgaatagatttatgggatctaccatctcataacaagttgttcacggtttgaagtaaggttatctcgtagataatcaaatccaagctcctgaggtatgcaaaaagtgttggtgggagatgacagattaaaaaaaattaatccaagtagaagaatcgatatgaatgatatacttaccgagttattggtgtatgttatatcacagctatagttgaattttctctcttcagctttcatccctctctgattgttgactcaggtttataaggaatgtcactaatgttctgctttaaaatctagaaggtgagatgcaattagcacccatgtaacctacctgaatgagaccaactgaaaggcctaagaagcggtgaacacgacccatccattcagcatcacgctgtgccaggtaatcattcacagtaaccactggcaataaaatatcaacaccaaaaagtttagctagatgttaaatgatattttcttcataggtatataattgtcaatcaatattgtggggaaatttcccatacatctcactggccttcctcaaaaagaccagcaatttcaagtcgtaaagtggtcagagagcgcagacaacataccatgaacgccctcaccagttaatgcattaagatatgcagctaaggtagaaactagtgttttcccttcacctgtcttcatctccgcaatggatccatcatgaagcactcctccaccaattatctgatggaacaaatgaaacataagtatacttaacaacctctcttcaagattatagaaatgcacccaagaaatagcatggactaaaacttgagggtaaagatatagacagacctgcacgtcaaaatgacgcattccaattgttctctttgcagcttcacggacaacagcaaatgcctctagacaggggaaacacacacacacacacacacacacacacacacacgcacaaaagtgagagagtaagcgcatagactatcaaaacaacgtacattgttaaaataaagggtaactaaattcaaagtaagatattgatcaaaccagcttgcatatctgctagggactcccctcgtgctaatctttctcgaaattcagcagttttagctttcagctatggacaaaaacaaaccaaagtcaaaatacattaaagaaacatatcaataaataaaacgtctcaagcagtgaacactaagtttaacctgttcatcggaaaggctttgaatctgtggttcaagggaattgacagattccaccagacggtagtagtcccggacaacccaataattcatgctcgtaaaatcttgtacattcctcttcaaacgacccaaattcccctgaaatatgaatgaaactaaagtaaataaataaaacatgaaaagaagtaaaataccactgagaatgttgagagataaaattctcatcccagtctcagaaaagcatcgcacagaaaatcgttagtagacaaaatattcacaggaaatagagacgagacaaatgatcgaacagttggtgtgcgccaacgaacagacagagttatacgattacattactaagagagttgacgcatatcataccgttagggaagctgagacgacacagcttcttcgaacaaggtgacacctcttaatcggcgtgacggaccgatagaacaaaagaccagatattggttttgtccacggaaacttattacttcgagatgtgagacaagggggagctggatggcaaatattagggctcacaagattagaaacagaacccattttacaaaaaaaattgcttcgttatagtgactttctcgttgttgaggtcaagtatccatggatgagaactgagaagctctctgtcgtatttttcactcaaattgttttgcctccctataccgttcggtggcgctaaattactcaatttgaaggatcatctttttatgaatatttcacttttaagtccctcgacattttagactttcgcagtatgtcactacaacttaagaatttatctcttcttgtattgatttgatctcaacgcataaagatgttctaagagaaataagaaaaatgcgaatcacgtatatatcatcaacagattggtacgaaggattcatattcacatatatttacatttagatattcacacaacatgttttggcgagagtggcatctacggaggaacttatggaagaaagaatcttcaaaaacaagatgagcaaaactggagagcacaatagtttttgttagcgtccaaaatagtatacctgtaagaaatggagacaaaacttctcttgttacatgccaaatttaacaacagaggtaaatcatgaatgcaaagaaaaagacagacaatttggactattatcaccttaatggttttatctgcaaaccctgcaaagagcttgccttcccaatataacaaagatgtgattactgatgaacctgggattgaaccaacgtgagcacagtttactgatatctcatctcctgacaattcctacaaaccggtgttcggtaacagattattaggaggaaaatccgtcatcaagtaatggataaagtattgattttctttttacacttccgataaagattattcgtcactagctttgtcaagaaactagtggattacctgtacattgatggttttgtcccaacctccagtgaatagccatttaccattcacggcaatgctgaggattgcgccattctgtattttcattgacttcatcaatgtatcatccctccatatctggaaaaggaatcagaagggttcaggtttagagactggcaatacgattgaaatgaagcacatcaagtaaattgtttttaaggaaacatatagacctgtatatctccgttttgataagctgcaactagagtttgatcgtctgcagctagagacagaatagatcttacaatacctggagtctcttcccccaacactgtcaacaaactgttgtcacttagactccacaaacgaacggttccatcccaacttccactgtatagtactccatttaccacaacaagcgttgagactacagatttatgaccactcatagtgcaaagcaggcttccatcctgggaaaataatcatcatcagataatatgaagaagaaaaaatcttatcagaattacaggtgtacagggaaattaacttacttgcagtgaccaagctttgatagtgttatctccactgccagtgtacacatgcccatattctgagtatgccaatgcatgaatgccagtatatcgccagtcttttggctcataccactttcttagcggctgttcttccagaggaaaagtagtgctccatacaaagatacctcctccaccatcgccactaacacatactggttctgttccctcgatgtgtatcaaggccattactttatcctgatgacctttaaatgtatgcacatgggagaagtcctgcatatagcgtgttttgcatgacgatttatatagctcgaattaaggaccttactatcagagagctgctgagaagaacataaacaaaaatctataaaggacctatcactaactttatacgcatatgtaccttcagagaccatataaggatagttctatcatatgaagagctgaagagaaacccacctatacagagaaaaggaatattgagtacctcattgatcatctattcaacatacattgttataagatttgtacagtttataagaaagtacaaaatataagaagaaggtgtacctccaacggctaaacctgtgacagagtcttggtgtccccgcatgtctttagatctcacctttccttctgagactctccccggaaaatctatgtcaaccttaccctcctctgcttcatcgccaattttcattccaggcaactctttgtccacttctttggattccacttctaccaggcgacataattcactttgagccaaacagaactgtttccttttcccataaatcgtcttatgcaatctactcatagaattgaacctaggtttcatgaccagctccctgatgcatttccatagatcagtcaaaacgggacgtgcctgaggatcaagacagcaacattgacgaagaatttcaaccatcgatttaaacttcccttggagttcagattccaaacttagtttctccgtaatacctgtgtatagcaccaagatatcctcaataccctcttcacagccttttccatccacacaattcacactttcaataaactcctcggtacaccgttttccaagacgaagcttgaggagaagaaaacacactggccaaacatcagagttatgtgaaacaaaagattttgagctggtattttttattaacatattctgttctttcaaaaattcaaacaacacctctgagctaataaaaatccccttctgttgtaacccaacaaaaatcaaacccatttccgaagcaccaactggttttctcaaagagctagtttcttcagcgataattcgatacacattccttccagtttcaatcaactcaatcaaatcaacataagcattctcatattcgtcaaacttcacacaagaaacactcaaacagcctgtgatcaacccttccttatgcaaattaagtagtgcctcacatatttgcataccaattattcctaaacgtaaagtctcatcttcgaggctatcaaactcctccaacgaaaatccaatgagcttttcacccactaaatacaaaacaccattcttcaaatcaccccacaagccaaaaactttagaaacacctctctgtttaacagagatgatcgcatcaagctcatctctttcctcctctcgcataccccacagacaactcatcatcctctggacataactatacttgaggacagaatcacaatcaccatgctcgaacgaagcaacccgtaaaagactcaccttcgaatcatccctcagacttccacataaacgcgaagatgaatcaaaatcactactttcactctccctaatttccacggaaacggcgtcgtgcactagaatccgatccttccaagtggcgtaaaagtcgtcggaccatgatcgagtgacaaattcaacgactttttcaaaattccggccaggttccagcttaagcttcgaaatcgaagggaacaatctgagaagatcaatgtttttggggagagctgatggtccttgaggtggaaacttgacgagaacggtgcaagcaggacatcggattgtgtccggaaacttcttgggtagatttgttaagcattcttcgcacgccgtgtgtccgcaggcgagtacgcgcgggacagtagactcgccgtcgtaagactgtagacacaccggacactccggttcctccatcacctccgatgattcgatgcgacgaacaactgagttaatccgacgacgttttagactttaactaaaacaacatttagtcccgagggtagttctgtatacctagtgtgtatatacatgaaaactatttgtgttataagtcatcaattttctaaaatgtctctttagtctggtggtaaagtcttccagatgagctcataatttatgggccggctctgattctgatgaagtgaagtgcatttgcaaaggtatattgtcatcttacctctgccaatatcttgcggatcctaagacatatgaagtattttcatagtacaagctagacccgtaaaagctaaagatcaaatgtatatagaattcgtcgaagtcttggaaaagaatgatgttacaaatccaagactttatcaatgccctagcaacatgcattaataaagtcttgcattaggaagattctctcttgtccatctatgatatccacaagccctggctcactagaatagggtggatgtgtgcgataacttaaagtatatgctcacttaaaaaatttacatgagaaaaaagcttttatttttttggtaaaaaaaaaagtccaaatataattgataacaatcctaaatttcttttaaagatatattagaataacccagttcttttatatacaaaaatgccatatttttaaaaatgttaaaacactatttttttatttttttttaacactcaaaatttacttcaaaaaagttctaaaaattgccttttttttttttcaaataacaaaaggtccaaacaaaaacaaattcccgtaatacacaaatttatgttgggtcggggctggacactcagtgtcagttgaaagtttaagcatatttataacttaatactgaagttccataagtttattgatgaatgtgataagtttgtctcaatgtaacagctcgagatccactcaatgtagcagctatgttctccagattcattcgtgtttgtaaaaaatgaaaactagaggtggcttgattgttcgacgagtattgttccaggaagcagccgtcttacttcttttcaataacacatgttaaataaatcgatattgtttgttcaatcatagagagaacttcttttcttcttttattattattgtagtagtaatcatgttcattccaattgagcaattatttgctttccatctacgcccaaaaaccaacttctcaatgcatcgacatgtaagaaaatttgcttttatgttataaagttgtgtaacatttctcttggaactattgattgtctcaacgttgcaaataaagtaataaaatcctacaagatactaataatatccaaactgggcttataatcctaaaaatgacttccataattaaaacgaatttagtttattaattagtgtaatggaatattttgtcaataaaataaataatcacgaaggattatataaaggaagaaaaaaaaaggaaggtgggaattttaaaagggaaagacacctgtctctctgacccacccacccattcatttctgtggctactctatcgtcgtcgtctccacaccgtcggtgccctcacggatcaatttctagagagagagagagcgagagagacgattcgtttttctagattctcgtcaaaaaaattttccctccttcgatctctcctttttccttattcagcatttccccattttttcacgcaagatccgtgattttccagggattgatctgattgggggatcgtgaaattcgtttgtgttttctgctcgattaaccggagaaatggacgagtttggtgttctaacggagcgttatgggattaagccacaaggtaaatctgctccgatggctgcttctaagcgtaaccctaacaacaatggtcagagctggaatttcggtacaggctcctctggtttaaatgcaaagtcgacgtctttttcttccaatagctcttggaataaggattctactaatgggtctttgtttgatggtgacgatattttctttccggctaactctactaataggaaggtttcgaatgattttgatgtttttgctgggttgaacaaatcttcatcttccggtgataatagcaagtcttcattgaacgatgatttgttcttctccaattttgggaatccggggaagacaactccttcttcagctgatgacttgtttggtggtgttattcctgggtctaaaagctctgatagtgttaagaatgatgatttgtttgggtcattctcttcatcggagaagcaatatgctgctgcggttgatgatttgttgggtttggggaagaatgaagctggttatgatggattgatacctggttttggtggaagtactcagacgactagcaggtttgtgatcggtttatgaaacatttgttgccaatttctgttatattgtatgagatgctaatgtttgtcatgtatggaatatgttactgtctcgtggatggtatttgaaatctcagataacctttgtacaggaaaatgttttactgttatggttttgaatttttttgttgttgagatattttgtttttgttatgtttttcagcaagactacaccgtcgaactttgatgctactgatccttttgtggtcctagaatcaaccacttctactggtctgttcgtggatcctcttgaagaatttgctgctacagtcagctctcaggggataaaaccatcaaatacttcacatacttctacaaaactcaagcctccgcctaaaccaacacaaaaagtgaacagaggttaatttctttgatgacctgaaagtgtgtcggattagagcttttgtttactgttttcattgtgctctaactagtcatgcgattatttccacaggtaagagtgtaggaatgtcttcaatagacgaacttgaagactttgccatgggtactatgcgacgtagtgcctccgcttctgacactgctagtaaatatagagaagctgaagatgctgcaacgaagaataaacagtttggtgtagatgaccttgactccttttttagcgctcggtccagcagtgtaccgaaatcacgtaccactactgaagtaagaagactttgaaatattactaagttccactttacaagttattacaataaagaaatgtgttttgtatgtgtatccttattcttctttctgattcaagacaactcgcaagcaagcgtccaacgcaccaaaaaagacccctaatggggtttctaatgcaaagaagcctcctgctccagcaaatctggtggatgacttttctgcactttttggaggtaaatattgtaaaaacatttctattccagcaattggttacactggtttagcttactaggaaatgtttccttctctacagaggatcctatatttagacaatttgaggaaatcccaggggaaagcgaagaacgaagaaaggccagatgggatcgtgaacagagaacaaagagtcgtgtggtatgtttggttatgcttgttttctttgaatcttctagtacaatccttgtgcttgaaaatatcgcttcatattcaaaagtttacttaagttccctggagaatctgttgaatcagttgaaacatatttccaacgtcaggtctttccatatttgatttagttgtcctgtttgcacatcaaaattggtgactcataactgactggcatactgcaaccagtttctagtttaagttttacaatgctcatcaatgttttagcttgatcttgattgtataatttggtttgacatgatttttcactattcaatcccttttaacatgtaggctcaagctgtagctgatatgaataaccgtgatcatcaatctcggattgaacaagaacagagaactgtgagtaatgtttttcttgatatctacgttttaatctacactatcataaaacttggttatgaacaatgaactttatgtatttgttagtcttcgtgacgataatactgtttttgacatctacatttcctatcgtggtttacatatagtcagtctccttgttgttgtgtttaaacacaaatgatggtttcttgttaatcttgctttccagaggatttctgagactgttgatactgagataaggcgttgggcaactggaaaagaaggaaacatgcgtgcgctgttatcttccttgcacatcgtgagttttgaataataaaaaattggagtttaatgttcttttacatctgtctatccatgtgatcctcctaagttcactctgagttctggttcggatgacaggtactctggcccggatgtggttgggaggctgtttccataacagatttgatcacttcgtcagcagtcaagaaagtctatagaaaggcaacactgtatgtccatcccgataaagttcagcagaaaggagccacccttgaacaaaagtatatcgccgaaaaggtttttgacattttgaaggtatttcctcaatggatcttcatgagtagctccctttctaaaagcctatgtagacgaaagttgacttgatggtttagttccctccaaatcgatcagtagagtttcatggaaacgatgtttgatttagtaggttggatgttactctgtattagtaatttgaaggcctccggtttagtttcttgtctcttgcatagatccgctaacctgacctcgtaactgatttgccttgtacaggaagcttggaacaagttcaacaaggaggagctctcttaagcccatatactgtgaatatagttgctctctgtacaactataattcgtctgtgagtttcctcgagtcttttcttgtttttaatcttcttgtttatgattttttcctttgaccgtaacttgtcatctttctgtacacccaacaacaaaaatccatgggggatattgtatagccccaaaaaccgaaatagagtttctttttataagatatatattgaatgtttttattataatagcttatagcgtagagatgattcactgatgttagtttcattcctatggaataacaaaatgcttttgatggtatcttcatgaacatgtacgttcacaactatctttgtagctctataactatttggtaactccggtttaagcaaagttctacactttaataatatcgacttcgttaatatatacaaatgaaaatagtcttatagatgcgagagcaaatgtttgagggtaggttaaaggaatcttgagatatggataaacgacactaagttgtgtcgtagcgagacagatccaaactacgacaagtagtaaacggagataataatatccaaaccataagaatccatgaaagcaagtagacaactgcgactttgcctcaccagtcaccatactaataattggagaggtggatctcttaggaatatttacttttataaaagatcagaggctagtcagaactcagggactaaattttattttcagtagtgacatctttaaaagacaacagagatttataaaactccacgtgtacagaagtgaaacagtctgacatgatgcctgatgctaactaactatgtaagataagacatatcttacatagttagttaccatgtaatagtaagtgataacccaaaaatgcaaaaaaaaacatccaactagaacatgtgatatgtcagtatgtgtatgagatcatgtgcacaataatattatcggtatttgtatgtctagttgtctacactctacagctcttactggaaatagattttgaggaacaagaaatagttgaatgagtcattgctatcttctagattttttttttttctgtcataatatcttctagaattttattacttgggaaagcgatatatgatatattctttttccaaaatttactaattaaaaaaaaaaaaaaaaactaagcactctgtatttattgccatattgaaaatgctctttccaccaatattccttatttgcctcaaatcattactttcggattctactgtcttgaactgtgttcatgtgtgtattccctcatcaatcaccttcaattcatattttcctatttccaaaaataaaaagatacagtatctatgtatttaattatatatcatatcaattatatcataataatcataagatcctttttatcgaaataaaaaaggaaacaaatccaatcatagcaagctttttcttttatttaataaacaaaaataaaaagcttcccgaaatggttaaaatccagaaccactaaagtcaaccaaatttgtcaaattcatccacgtcatcagttccatctataaaacgctcacgccattcgtcaagtcccaaaacaagagtccaccatgaaactcacaaacgctctcttcttcttcttccttatctgtctcctctctttatcgtcagcttcatcgaacaagcctcagctttcaaatggctcgaccatcttattcacgacgatagggagacccactttcgaattcgacatctttactctccccacgagccaccgtccaccgtcacccgccgatgagcaccgtctcaccgatggcaaatctattaacttcaacggctatttcgcttctccttctacggcgttaatctcacttctacccaaaagaactcagattcaaccacaagacgtgcatctcatctacgtcactgagagagccggaactcctagcttaaactacgacgtcgttcacagcgataacgttggatctagaattcaggttccgttattttccggcgaggaacaacagagtggtatgaatgtaaattccatgaaagacacgcctgttttaacaaacggctatcttgtccacgtgtcgacacatgagaatccgggtaagcccatggcgagttgggccgctgtttactcgactgagttacgaactaagtcgactcggcggcttacaccactgggtatcgctgacttttctccggctgtgtctccgtctgggaagtggactgccgtggcttcgtttggagagaaaggctggacttggagcatggtagagaaagagattagttcagacgtctacgttttcctgactcaggatggaactcagcgagtcaaggtggtcgagcaaggcgggtggccgagatgggtcgatgactcgactctgtatttccaccggaaaagcgacgacggttggatcagcgtgtaccgagcgattttacccaaaaccggaccggttaccaccaaatcggttacgattcaaagagtcacaccaccgggtcttcacgctttcacacccgccacgtcaccaaacaataacaacttcatcgcggtggctacaaggaggcctggatcagaaatccgccacgtggagcttttcgatttaaagaagaacgagttcgtcgagttgactcgtttagtctcgccgaagagtcatcactttaacccgtttctttcccctgactcgtcccgagtcggataccatagctgcagaggtgacgcaactggacgtaaaactcctcggaatctcctccaaagcctcaaaacaacttcaaacgacctctctctcttcagattcgacggtgcgttcccgtctatctcgccggaaggtgacagattcgcgttcgtctctttcacaggcgttttcgtggtgaacccagatggttcaggtctacgtcaattgcttccacaaatgggatttggaacagtttgggatcctattcgacatggaatcgtctacacaagctcaggtccagctttagctccaggaaagtctcaaatcgatattctcgccataaacgtcgatgcacctagtccagcaaccgccgttaaaaaactaacgactaccggtgaaaacaacgcttttccgtggccatcacctgacggtaaacggatcgtgttccgttctgcgcggtccggtactaaaaacctttacataatggacgcagagaaaggtgaatccggtggtttgttccggttaacgaacggaaactggaacgatacgatagctacttggtcacctgatggtaattggattgtgtttgcatccaaccgggaatttcccggtacgttgttgatgaatatatatgtggttcatccggatgggaccggtttaaggaagctggcgcaaaacttgaccggtttggtatcgatgcatccgatgtttagtcccgacagtaagagaatcgtgtttactaccatttatgctggaatctcggcggagcagatcggtaatccgcattttaacgtcccgagtagtgagatttttaccgtgaacttggacggctctggtttgacgaggctaacgcataactcggtggaagatggaccacccatgtggttccctaagatcaaagctactggtgatgtggcttggcctaagaggtttggccctagttgctctatccaagatttcaagacgcaaaatactaccgtgaaaatgaaaatgaataagcccgcaacaatgtcatcaatgtgtgttgttccttcacaatgatttgttatgtaacttattcttctaataaaaaactccgctagttcatatcttgttaagtatttggttagcctaagaaattatatagcttgaggtttcacattttcaatattttttaaaaataatttgggtcaatattgatgttggaaatgaaatcaacggttgaattattgtcgtgtgctgcttgcaccatggtccatgctagatggaccgaccactatttttccaaacagtgcctatcctatcaagtagatattttctgaatacgtagataattgtagaatacaagaaaagaaatatcctctgtggaataaatgaataatatacttttgtcagaaacgttacaagttaaaattccacgactgattgccacgtgtaagcttatctcaaaagggccctacagtaccatgatgacgtcatctcttacaccactctctgaaaaattcctccgccttataaaaaaactcgattatcgtcttcacttagtagccaaccaccgaccaatccgccatgaatatatctcagattattttcttcgcgtcccttcttctacggcttcacttatcaacggcggaacatcaaaattcaaacgctggtgatggagacaccatcatattcaccactctaggacgatcgcactacgaatttgacatattcgccctctccacgactcaaccgccgtcagtttccggagagctccgaatcaccgatggggaatcggtaaatttcaacggctatttcccgtctccttctccggctctattatctctccttcccgacgaaaccctaattcaaatggaagattcgtctcctctgcatctcatatacgtcaccgagagaaacggtacttctagcttgtactacgatctagtttacggcggtaattctgattttaaaacgaaacgaagatcggtgttagaagcaccgtctcgagtccaagttccgttgttatcccgctttgatcatctgagtggcatgacggtaaattcttttaaagataagcctagtttgagtggtgagtttattgtctacgtgtcaacccatgagagctcaggtgagccgagagcaagctggaccgccgtttactctaccgagttaaaaaccgggttaaccaggcggttaacaccgagtggtgtagctgatttcagcccggcggtatcgccttccggaaatttaacggctgtggcttcatacggagagagaggctggacaggggaagttgaagagctacgtacggacatctatgtattcttgactcgggatgggtctcaccgtgtcaaggtggtggagcacggtggttggccgtgttgggttgatgagtcgactctgtatttccatagaagaagtgaggaggatggttggatcagcgtttaccgagccatcttacctgaaaacggaccgttgactactgagtcggtgacaattcagcgagtcacaccaccgggagttcacgctttcacaccggccacgtcaccaaacaaccacgagttcgttgcggtagctacaaggagaccaggctcggattaccgccacgtggagttgtttgatctaaagaggaatgagtttatagagttgactcgtttggtggcgccaaagagtcatcacttgaatccattcttgtcccctgactcgtctcgagtcggatatcatagttgtagaggcgatgctaatggacggagaagtcctctgctcttccttgaaaatattcaaaccactacaagggacctctctctctttagaattgatggttcgtttccttcgttctcacctggaggtgatcgtatcgcatacgttaagatgcctggtgtgtttgtggtgaagccggatggttcagggcagcgtgaagtgtacaagggaatggcgttttcgacagcttgggatccggttcgacctggaattgtgtactctagctcaggtccaacgtttgctacagagagaacagaggttgatgttatctctattgacgttgatgcagccgataagtcatcttccgtgaggaggctaacgacaaacgggaagaacaatgctttcccttggccatctcctgatggtaagcggatagtgtttcgttcggggcggactggtcacaaaaacctctacataatggatgctgagaaaggagaaagcggtggtctatggaggttaaccgaaggtgcgtggaccgacacaatgtgtaactggtcaccggatggggaatggatcgcgtttgcatcagatcgagaaagccctggctcgggtagttttgagctcttcttgatccaccccaacggaacagggttaaggaagctcatccaaagcgggacgggtgggagaacaaaccacccgatcttcagcccggacagtaaatcattagtcttcacttctgattatgctggaatctcggcggaaccgatctcgaacccgcatcattaccagccatacggtgatatcttcacggtgaaattagatggctctaatgtgaggaggctaacgcataactcttatgaagatgggacaccggcatgggcccctcggttcatccaccccaacaatgtggagctacaaaggaggaatgattctaggtgctcgttcgaagactgtcactggctcaacaagtaccctacactaaaaggccgaaaaatatcttgttaatatgtatctacagttttgtatcccagcttgtaactctacttatagatttgtatgagactgccactgtatatgcataagactttgtattatagagatcgttaatgtgatatgtatatcatattgtcaaaacagtcgtgataagatatcaaaccctcttctaaatgatagtcttgctattgcggtttggaatcctcatgaattatccaatgtcaattcaatctcagcgtgattgaagacaggtttttaaattccaaaatctcttctttaatcacgtttataaatcagttttgatacattattactatgttttgcgtacgtgtcagaagattactatccatgtaatgtctgaagaattaggtgcgagtcaaaagtcataacagtcgataagatatcaaaccctcttcgtgacttggaaggtttgaggcgggggcgggaaaatccagaaaacgtcggataatgtttataaaggagtctctccgtcaccggagaaaaattagaagaaaaaagaggcgaagaagagagaggaatggcgccagttcttcagagctcacagccatgggttgagaaatagtacgatttcttctcactgattttttatttcgttgacggaatttatgtggggtttaataaactcattgtttccgatttggatctagccggccgaagcaggttaaggacgtggctcaccaggaagaggtggttcgtgtcctcaccaacactctccagactgctgacgtaatttcactataacctctttgtttatcgcgaaacaaatccctaattattaaaatctgattttgtacaagtgtgaaaaaccctagatgtcgaatttggttctcaattctgggttttaattttttgtttgtctctctgttgtagtgcccgcacatgctcttctatggaccaccaggcactggaaaaaccactactgctcttgccatcgctcaccagctctttgggtaacgtattcatttgataatttgtgatagctgaaattcggatgactttttgattgattcatttgtgtgtacttagtttgtatgagaccttgtgatctctaatatgatacattcagatttgtgattcaaataactcggtttttttttttttttatgtagaagctgatataatatgcacactcagactctgtggttgcataatgatataccaacttctcccattaggtagctagacagtataccaagatgtgaattcataggaatagtaatcattatgatttttctatgtaagtggttagtttttgaagctgaattgtcttgttcttctttccattgcctccatgggtgtcgtcccatatgagtcggtttcagcttcttttgagagtaataatcacagatttattttcatgagcctggccttgttttgttatttcattttgctatattatgtggatttttacaatgggcatgtgaactaactatagagtgtttacagacctgaactatacaagtctagggtgttggagcttaatgcaagtgatgacagaggtattaatgttgttcggactaagatcaaggattttgctgctgttgctgttgggtctaatcatcgtcaaaggtgtcgtactttttattaagttttttttttttttggggtcattttctcgtttctgcatttcatctaagaccttcgatttgatacttcagtggttatccttgcccatcgtttaagatcatcatcctagatgaggctgattcgatgacagaagatgctcaggtacgttgaacatctattattcactaccgcatttgtacgtttgatatgtgtttaccatgagctattttattgactgtccagaatgccttgaggcgcacaatggaaacttactccaaagtcaccagattctttttcatatgtaattacatcagcaggtaattctgtcacaacagccttttattttttttccttctgttctcatttgttctccaattttctctctggttattgaaaatgattgctttttcgtttatacttttgttatattttggaacatgctcatagtgagctacttgctgaactatgaacctactgattttgatcacccttacaaactttgatctcttgttctgtaggatcatagagccccttgcttccaggtgtgcgaagttcaggtttaaaccactttccgaagaagtcatgagtaaccgtatattgcatatttgtaatgaagaaggtctcagccttgatggagaggtatgagcaaatgcttcaatgttttccgtattattttagttttgtgaaagctgattattgtagccgtttcctattcaggctctttcaactttgagctccatatcacaaggtgatctccgtagggccatcacatatctgcaggtaagataaaactatctgaaatatttgttactagacgaaatcgaccatagaaatgtgaaacactctttctacctgaatattgcagagtgctactcggttgtttggatcaacaataacttctacagatttactcaatgtgtctggggtaaggatgaagttaacccaatatttgcataagtgtatggtaggttcagccatgtcagacttgctgatgtttaatatggatgtctaacgaatctatcaggtagttcctctagaggtagtcaataaactttttactgcatgcaaaagtggtgatttcgatattgcaaacaaggaagtggataacatagttgcagaaggatatcctgcatctcaaatcatcaatcaggttttctattttcctctcttatttttaccccatttaagtcatgcaactgtggctataaccccttctatacaacactctttcagctattcgatatagttgcggaggctgacagtgacataacagacatgcaaaaggctaagatctgcaaatgtttagctgaaactgataaggtaagactttcccgtactaattttccttacttgtgtctcttttagagcctcaagtgagatcaattaccaacatcttgactcaattatattacgggttttgagtgaagttcacatcttagatttttgccatttgaatctgtagatatgttgcaatcttgctaaggatgtctctgttacctctagtgataataaaatatctcacatcttttatttttaatgtatccagcgacttgtagacggggcggatgagtacttgcagcttctggatgtggcaagcagtacaatttgtgccctctcagaaatggctcaagacttctaatgcaaattctgcttgaattggacctgtgccttaagacttatgagactatcatagtgtaggttttgataaaaagttggagcgttatgacgttttactggttacttatctgttattgttttaagaaaaactattagatatatttattgcatcattacttaagtctatttgttttgtgggtaagatcattaaatatcattacaatgtgaaatacatgatcgaatcaaaataattaacatctcttataaccaacaaaatcatgaccagatagcttgatggacattgcttctgttgtaagaattagtgaatccctttatctatatccaatattgacaccgtaaaaggagtaatgtgtttctttactagttggatatatatacagtgtagatcccaaaatgtaaatataaaaataaaaaatatagtagatttatataattatatttttctatttattacctctaataatcaaaatagtaaaatcctacgaaaatgtaataaaatacaagaggattaatatacatatccacataaaaggaagattcggatacacatccaaactatagaaaacattagtaatgccataaataaataaaaatgctgtcaagacacaaaattcgttgaatgttatagtcttcacataaaactgtcataaatctggatacgttctaaaaataattgatctaatctaaatctataagtagtttcttattagtagaatccttatgaatcttaatttgatcaagacagaaacgcttttgtttacttttacctaatggtcgatggtgacgattctttcaagagacccggagctgtgccttttaagtgggagatccgacccggtgtacctaaaacccgacccggtgatgatgatccagctcttcttcaaccacctcctcctaacaaacttcctcctctcaaattaaaatcaactccgccgtcgaattcgccatctccgtcgtcttcttcttctttcttctctgaatccagaagccgaccagtctctcccttcgctcctcctccgtctttcaagctgaaatcgccttcagattccgactccaactgttcagcatctccgactccatatttccgatcttcttctcctcgtgccggtggctcattgcctcggtgtttttttcccaagtcattatttgggttgaaaaagagtaagagcggcgatttaaaaaagaccggtcagcaggaaccatcatcaacaacatcggagtctgacaatttctatgaatcgggaacaacgctttctccgtcggaagaagattctagccagggatcgccggtatcttcgaggtggagttcgccgaaatcgtccttctcttctcgccgtggttcgccgctaaaacggactgattcggatttaagctcttatgagaaaaaaaccatgttaatgatagctcgttcccgccttggttaaatggttaggcttaaaaaaaaaaaaacatcttagagattaatcaaataaaaatgattttgagtttttcattgcgacaagaacgaatatgttacatgtagatttgtaatgaaattgtctatatattatcgtcaaaatgaatcgagttaaaagacccctaatgtttgaagagtagagaaatggttgtgggaaagagagacattaagattggtgactgttttaattcacaatgatgatgatgatggtttgatactacaagacactaacttggaacaagactacggtctcaaagccaaataacttatctttaaaaataacaaggtgaaataaatatggatactgataagctaaataagctagagaaagatggatcttagtttaagcctaagccggaccctgagcctgaacctgtggaagacctaaccatcgggtgactaaacgaaggctggttgatcgatgctgctccagctgctgcagggttatttagttggttgttgccaaacatgacgtttggtgaagctgttgatcctgcattggtctgtattgcattgagaggtaatctcgggccaaacgagaaagcttgctgttgttgttgttgttgttgttgttgttgttgttgttgtcgtgccatgaaatgcatctgtgcttgaacttgcgggttgttgctgaatcctgggattatgcttggttgagaagttgcggaagcttgttgttgctgatgttgctgatgcatgagagaattgatgttgttaccacctgtggatagagacatgccttggagattattagtctgtggagagattcctccaggagatccaaatcttgctgagagcatacgagcccgttctgcagaaaatctctgacgggttttctctacttgttcgcattctttcatcaacagtgtttcaatttctgcgaactgctttaatttcagctccatcctcttcagctgcggtttttactcagatcagcaataaacactatacaacaaaataaatcaactacctacagtaattctcatcagcaactggttctgctattttacctggtgattaacgatattagcagaaagtctctggatttcgcgttcctcatgatcagcaaacaattttgcttttgttgctgcagctgatagaccggctctaaatgctgccataaccttatcctgtggcagtggagtctgcgcttctgctccgttttggcttgatgttttgtgtgctcctgagttttttttacaattaaagcatgttggtgtcgcagattaggttaaaacaaaagagcaaagaatcactgtaaagagaacaatcaaataacttccttaccatcttgctgttgattttctccatcaagcaagctggcttctttcccttgcattccctcagatttcatcctagatcaagaagtttcagaatagtccatagtattattaaactgaatcacactacagagaatttatattggatagagactatataatacactaacctatcgtcctcagataaaaccgagagggattcatgggcacaggacgcagcaactcgaggtccaacagctgatgccaaaaatgcaacctaaaatattttggtatcaggatcctcatatctccaaacttatgtgcaatacaggaccattctccactcaaaatatgcatacaattgagctctcagatataatcgattcatggatcagagatatctctaactggtgagatcataaggataataagaagcgcatatgaaatctgcatcggaaaaaagttcacaaaccaatgccataaccggattcggagacttcacaaatggaagcttgatctcagtgtcagaaccttgctcggaatatcctgcagacgcaagcggacaattagtatggcatgtcaaaggaaataactatggaaagtaattcattgctacaaattgaataaaacaaaatcaccaggtaaatccccatttgaatctgttcctttgtggtcatatccatttgtagggttttccgtattagttacaccagaaacctcaacattatctaatagaccatcctccacaggtaatcgaagaaaatgaagaatgcattgagcttttgacttggaaccaacatgatcagcaatttgaacccaattttcattgtagagttccacagcttcaagaagcaagagagtttcctgatcagtccaattgtctccatcttgatcgccataaaatttcattggatccactcttacaaagtcaagacaagaatgtccaacaacaaatcttccatggtgaaaacaatcacagcataagagtatatccccctgtaaagtagagatgaagatcctttagttagaagcggtccagtatccgagacagtaagcaagataaagcttggagtctattacatcactgggtgcaaaaaagaatcagataatgatacacaaagaacagtacgtaaggggaagcagcctaagaaccttcttttgcgattggaagtacacagttggaagcggtcgagaacaatggttgcaatgactatcacataggtgttcacgaattctgatgtccaagtcagggctgtcaccatccaaacttggcaaggatgaatagacttcaccccccttgtgtctacagttgggcttgtcaaatttgatcaaactatcaatagatgttaaagcagcagacggcacattgacctcgccatttgtgtcctccctcacatccgatacatctctcaaagggccaggatgtgactgggcagtggcacagtaattgattattccccagtgatcaagaaaacggaaaactcgtgcaaaatcttcaatgtcaacaccatctaccaatccttggcaatcagaaatcgtcagtgtcttttcagggttctctacatatttggaaacaatggcgttcctgaattccatataactttcgggtgtatgatttggcgatttcccagagaaaaactgtggcaccacttgcctttcaagtcgatctactgtgtttggtgcaaaccaatctgctcaaatgtaacagcaaaagtagaagaataaattcgagcattgggaacaaaaatatcagaaaataaaaataaaataagaggagaatctcgatatatttgagccataggactccaggaacaaaacccaaacgaattagaagaacatcacttgcatagtctattcaagttgtacttctgagataagacacctaaggctacttcaagccagcaggtactctaatttatcatgtacaaaagttataatacctcttcctttccatcagacagaacatgggaacatagagaaacatctgatatgaaattgagtcgcgttcagattaatgtaaactaagaaccaggcactagacaaaaggaagataagaacttatacgttaaggagataccggcatacaaacctgttttgactaattctcattccaatcacaagatatatactacaatactaccaaccagcaaaagctgatgctgcataaagcctaacctctaacataaatgcgcgtatcaagaggaagaaaaaacacacctgaatgcataggcaagacatgaaccagatccccaaaccgtttaacaactccttctccatccataataggtggtggagagataacataagccgaagacgatccatcactcctctcaagatcaagagaatcagcaggtacagtagataacgcttgcaattgcccaaacgaaatgttctccagagctggaagtgaaccttgccctctagtctcccctatcaaaccagctctctcagccgccacaacagccattacagacgcgtgtggccggatcacaacacgcttaaccactgccgggaaatcagagatgcgcgaaccagaatcttcaactacctcgccaataccaagtcccggatcgggagttgcgccgccgttttgctgaagctcatcggcattttcaacgtcatccatttcttcgttgttgttgttgttattctcttcgtcttcttcctccatatcttcctcctcttgtttcggtttcctcgccgccgataacccccctctcttcttccttttccatttccctcttctatctgcgacagaattgtaaaaagtgtaattcaattcacacgaattctcgaaatacccatcactacgatctatgtgggtaagtcaaatcccaatttaaatttggattttgagagagataaagatgtgaaacagcaatttaccttcagaagctggcatttttgtggatgaagatagagaaatagaggttttgggttctgtggaatcgaagcaagacccttagtaaaaagaattgctttctttgtcttctctcctccgagtcgttctgatttccagctctcgagctaaacaccaaacctttttctcgcaatttctttcaccatttccttcattaatctctatatattaattcattctccacgacgacctaaccttctcgacaaacaagagggttctgatttcgaaattcaagcttcgttgaccaatccaaattttggtttaacttcggttaaagtcaactttacttcggttttatttttcaattttgaatgagaaaaaccgaatcaattatttagttcggttcttaaagttcaaattggttaaaccggtttaaattgatacattagtcgaccgtcgcgcattaatactggtgtggtggttccgttaacgagcaacggcgatgaagagacctcgacctacatctcagccgtcgatctcttccaccgtcaaaccaccactgtctccgccggtcacaccgattctcaaacagaagctacacagaacaggaacacctaaatggttcccgttaaaactaacccacacggagctgacgttgccgttaacttttccgacgggtcaaacattccggtggaagaaaactggagcgattcagtatagcggaacgattgggcctcacttagtctctcttagacaacgtccaggagacgacgcagtttcctactgcgtccattgtagcacaagccctaaatccgcggagcttgcgttgctcgattttctcaatgctgagatctcgttagctgagctatggtctgatttctcgaaaaaagatcctcgtttcggagagctagcgagacatctccgtggcgctcgtgtgttgaggcaggatccgctcgagtgcttgatacagtttttgtgctcatcgaacaataacattgcgaggattacgaagatggtggattttgtttcgtctttagggttacatttgggtgacattgatggatttgagtttcatcagttcccatcattggatcgattatctagggtttctgaggaagagtttagaaaggctggttttggttacaggtgatttcatcactctctaatggttgcattatgttgaattagacatttaggctaaaactttgcttgaagcttatacttttatttactctgtggctatacattcatagaattgaagctaatgtttggtctaagctagataatcattgtgtggccgtttctctgattggttctgatctcatttgaaaactctcattctggtttatcttgtggtgagcagagccaaatacataacaggtacagtgaatgctttgcaagcaaagccaggtggtggtaatgaatggcttctttctctgcgcaaagtcgaactccaagaggcagttgctgcgctgtgtacattacctggtgttggtccgaaggtagcagcttgcatagctctgttttctcttgatcagcatagtgctattccggttgacacacatgtctggcaggtaacaaagtccatcggtttctatgtattgtacttacttaattgagatccaattacataatggtgatgatgacttcgggcaactttttttttgttctgttttggataatggatcagatcgcaacaaattatctactgccagaccttgctggtgcaaaactgacacctaaactccatggccgagttgcagaagcctttgtgagtaaatatggtgaatatgctggttgggctcaaacattgcttttcattgccgagttacctgcacaaaaaactctcttgcaatcgttttcccagcccattaacaaactggatgagtctgcagaagttaatgaaactagctgtgatacgttgaagccatgactatgtgtctacctaagctacgaggaatcgttttcacaacccattcttgatgcgtcaagtccagaaacttgaccttggaagagctaagaaaattctgaagctgatgcagtatttggctccctggcaaatgagcgtagttatttgttatgatcattgtttactaaggaaccaatcttgatatgtacttgtaactttacattcaaacttccaaattaaattctaattgtttgttccctttgcaattctcttgatttgaaatgagaattttttccttttatctatttcttttgtcaaaaaacaaaactaaatttcgtcgaaattaaatttctataagaagcccaataaagcgaggcctaaattaggcccaaaatactattggaggcgaaaaagaaagtccggctggattttcctccaagccaccgtcgactttacttagtactccctctctctcccctcctccttcccagatttcgtctccgttctgaaaaaaactccaaattctactctgaaaccctaagtttccgatgtcggtaagtttgataattcccagttaattttaatttcggagacctcagctctattagtcttacgcatcaatggtttaatagtgactgaacgataaaattgattgatatttgtggcgatgcagatcttcgagtacaatggaagtgctgttgttgctatggtaggtaagaattgtttcgccatcgccagtgatcggagactcggtgttcagctacagacaatcgccactgatttccagagaatctccaagatccacgatcgtgtcttcatcggtctttctggtctcgccaccgatgttcaaacactgtaaactatcgtgcaagcttctaaatttttcatatttgtttgtttttacattttgaagtgaactgagaagattttttttcctctttgttttgtcttttgatgtttgaagataccagcgcttggtgtttcgtcataagctttaccagcttagggaagagagagacatgaagcctgaaactttcgctagtcttgtctcagccatcctttacgagaagaggtcagtgtgcttgtgttgtttacttatgtagctgtattagttacctgttgatttgcgatgctgcttctgactctagttttaattctggttaggaatgatttgcttagtttgtctctgaatcatgatttagaaagataatcagattggttgctttatttcagatttggtccttacttatgccaacctgtgattgctggcttgggagatgatgacaagcctttcatttgcacgatggactctatcggagccaagtatgttcacatctattcttggttataatctctgatttgtatggacgattttcgctcttacatgttaatgtcattagcttggttagtgtggtctgtatagtctgtatagtccttgagctagatgtcttgtgtatgttatttattttgcttttggttttggacttgttgtacttaagaagtactgttgcattttattttattttattttgttgatataacagggaacatctaataatagttgttctcttcgaaatgcagagagttagctaaagattttgttgtatctggaactgcttcagaatcactctatggagcttgtgaggcaatgtacaagccagatatggtttgcccgctaacaacctcatcatctcttgttatatttctaaatcccgacaatgaaaatgcttaaattaccacatctaggcgttgcagtttggtaggttcaaggtttagtgttactatgtagaaaagttgaatcttgaattggtgtgaacattaaggtgcataatgcccgtaggaatcacgatagccattagttttctctttgatatcttcaattatccctctctggcatgaggtgtttaatagtctgagcttgttagccatactccattgtactactctagacttatgtatcgagactctggcttaacacatgaggattttcaggaagctgaggaattgttcgagacaatatcgcaagcacttctctcatctgttgaccgtgattgtctgagtggttggggagggcatgtttacattgtgtaagttctcatttcttctcttcttttccacacatttgttatccaaaattagttcttaaaacaaacttccatggtgatgtgttgtacagaacaccaacagagattaaggagaggatcctaaagggaaggatggattgatctgcttcttctattcaagttgttttccgctgtaatccggttttaagtagtgtaaccttcacatcccggtttaattatatgatcattccttggctgaaattatgggttatgtatgaagtttgattttcctcttggataatggattatatgattttaattcgtagagttatcgaagaataacacttttaactcaattgtttccaactaaataagaaaaaacaggggaaactaaaatatcacagtaaccgccagatcttagagcagttacagcgactaactcctcaaaggcctctctaatttcctgtcctaattcgatcggcttgttatgtctgttaatccgcataataactaatctagaataatccaaaatcggaagttggtcgtgatgggtaacgtaatggactcattcttcaccggattctctcattctatcggaaacttctttggttctccacttgactttttatctggaaaatcttgcaggtaattatacacaaaaccatcacttatattacaataatcttcaaagtttattggtttgcttaacggaaacttaaaactaatcttacttggaacagttcggtttgtccatcaccgtgggatttcatatgctacgttgagaatttctgcgtggctaatcttgcgaaaaccgccttaatcctaatcttatcctacttctttctattcttcatctacatgctatacaaagttggtttttggcattgtatcatccacggtttcttcaaactcctatgggttttggtctcttgttggttctacatgcttggctattgttgtagtttcttctgctatgatctgctacactctaaacgtagaagaagacgcagacacaacagatatatagaggaagattatgatgataatagtgatgacgatgatgatgttgatgatgatgggtcgttcacgtaccatagatcgaagcgagaatgcagaaaagaagaacgtcttagaaagtctctgagaccgaggaaccatcgtgttagagttggtgtgaggaaagaccatcgttctgactcgggtttgagccaacatgctgatggtggtagtccgatacatggtgttagagtgagtagagagtctaagttcgcacggaaggtttcaaaacgcagaaatcgagttcaccatggtgatagaatgaaccatgtcagtcttcttaattaatacatcacaatggaggaattacctgcaactgtcaatgatctcctctaagctttataattcctcttcttgaaagttgaccagctgcatgggtcaatttttataaaccaatctctctgtgtttttggaccttttcattatgtttaattcttgcttcttcggtttaataagtattgtaatcaacataataccaaatatttagttttgttatgacttatgagggcaaaaccaaaacatgaatgagaatctttagagtgctcgcaaaatcttgaatcaagaatcatatttatggtaatgggctcctcaatattgcttcagggacaacagctagaatgtgtgatgtacctaaaggaccacaaaaaaagaacacaagtttcagcaatttgttttcattggtcaacacatcaattgttcacaaaactacaaaacaatctaactgaggttttactaacatgaatcatgtaaatatgataggttgctcgatttgtgcaaacacaaacaataagaaaactataagacttaaggaatttcatcacacacaaaaatacaatttatttttctataatctataatgttttgctttcattccgattatacccttgataatgatgattaggtgagggtaatttcgttatttacaattaaactcacataattacaaaataatgttgccttgccctgagataaacatcaccaaaaaatgttttttttttctttcttagagcaaacaatttgttttcaaaaaattattatttttggcagctcagcaaaattatttaattctttctgtcagttcatcaaataatttaaatattttgtccatgtgataataatatgtagcgcagagagtaaaaataaataaattcatttacagaattgttttgtaaccaattagatagcagtactttaatatctgaggctattttcgtcattttcaaattatggtgtgtttttttggagggagtgggaaaaaaaaaatcgatacatgaatgacgtgacctccattgatttcggcgaacgagcttcttcttcttccctctctctctctctttggctccatctcttacagtaactgtctcttggaaccatttcctcttcactagtatcttctaacaatgtctgctactaggtcacagagatcatccacgatctcgccggctcgtcctcgtagatcgccggcgactattccgatgaaacgtccggaaactccttcttcctctcacttttctgcttctccggttacttcttctagtccattactacgttctagtcctagtccgtctacttcctccgccgccgcctctagtacggctgttgcttccacgaaactgaaggagaatattacagtcacgattcggtttcgtcctctcaggttaggttaatttgattagcaaaatccgttttttttgttttttttacttcagttttgtttggtttattgacatgtttttggtgaatttgaaaatagtccacgagaggtcaataatggagatgagattgcgtggtatgcagatggagactatactattaggaatgagtataatccatctctttgttatggatttggttagtcaaattttacaattcataagattgttgaactctttagatgaattattttcttttgtttcgaattgattaagtgtattttgcagatagagtatttggtccaccaacaactactcggcgtgtttatgacattgctgctcaacaagttgttagtggggcaatgtcagggattaatggtatgtttcatcttaactagttgttcttctggttctaaaagagaagatttcttatgcgtttggacaatttgatgttggtagggcttcaagttaggtgctttttaaattcattagcttgaaaaatgcatcctttccttgcccatgtgcaggtactgtgtttgcttatggagttactagcagtgggaagactcatacaatgcatgtaagttactaggctgaaaaatatctttatgtctcttattaggtgttaaagtaagaaagatatccaacaaagtgtttctcttgtgcacatccacttttgtgacacatgtgccttgtagaccttggctaatgatgtattttgcatttagggggagcaaaggtcacctggaataattccgttggctgtaaaggatgtatttagcattattcaggaggtgataggttactctttagttctgttttcttaaaaggattttttctactctattctttagctaattatgtttcagctatccagacaccagaacgggaatttcttcttcgtgtttcgtatctagagatatacaatgaggtaggctcttactctgtttatttgcatggcctgcttgtaatttaaactgttgtaagtttccatggacatggtatccatggcatcaatttgatattgcttagaagcttagaagaatgctataggatttagccctcaaatgtgattctgtgtccaacctacgactgtgagtatgctcaagtaattgatttcaggaaggaattccatttcaattatacatgtaactgtaaactcatgaactgcgaagagacaattggctgtttgttctgaagcagaactagatttttcagtttctcattgattcctagtacaaccacctggtgcatgatttgagggtcttttgaattattcttacaggtcatcaatgacttactagatccaacagggcaaaatctaagaatacgagaggattctcaggtaactggtggattatgtcgcagaaaacctgatcaaatcctaatgtggggcttgcgcatttcatttatccaagcttcatttgtatcttaagtttcagtattattagtgtgatgtgtttatgttgatagggcacatatgttgaaggtataaaagatgaggttgtcttatcccctgcccatgctctatccctaatagcatctggagaaggtataagatcctgaattaaatacctgtttaccttcagcgtaagctcatctttcggttaacatagtttcataattatgtccccaaaacacagtttcctcattaacaatatctacaaatcatgtgttttaaggtcataagtcatattcttttaactagtgattttgttgactttatagtattatcattcagtatcacttggtcgcaacttctgcttctctttagaaggctctacctctcttatttatgttctgtttggttctgtgatactttgtctttgttggagttattgcagaacacaggcatgttggttcaaataatgtcaatcttttcagcagtcggagccacacaatgttcaccttggtgagtcctattacttagtagtgtatctttcttgtctccatctcaactacacatatgccttagatccttcgtgtacagctggtcattatttttagctctttcccttagagttttcagtgtgtttcagactatagaaagcagtccacatggaaagggagatgacggcgaagatgttagtctctcacaattggtaattactagactcatactgattttgctattgtatatgaagccatgtcccactttattgctgggaagtgtattcaggtgcttgtccgtatctaacattctgattcttggtttgatgcagcaccttattgatcttgctgggtctgaaagttctaaaactgaaataactggacagcgaaggaaagagggctcttctatcaataaaagtttactcactcttggcactgtaaggaagttctttttcagtataacatttactcttctcgatatatgcgtgtgtaaacttctaatctccatcttcaggttatatctaaattgacagacaccaaggcagctcatataccctacagggattctaaacttacgcgtctcttgcagtcaacactaagtggtcatggacgagtgtcagtaagtgctctaagcttccctaattaatcaatctctagacgagcctgtcaataatgatttgtttgtgaagtttcttaaggccaggtttttgtttttgttttgtttttatgaactttcatttgatgacatagctctctcttgtaagtatgagaccgtgtctcaatattggcgttctaacccctctgattttgtttttttctagcttatttgcactatcacacctgcatccagcacaagtgaagagacgcacaacacactgaaattcgctcagaggtgcaagcatgttgaaatcaaagcttcacgaaataaggtgcatttatgtatctatgtctctgaagttccttagattcattagagctgtcttcctgatatttctaattttttatatagattatggatgagaagtcccttataaaaaagtatcagaaagaaatatcgtgtttacaagaagaacttacgcaattgaggcacggaaaccaagatgatttggctgatcgaaaacttcaggttggtgtatgcagatagttccttcttttcttgttgttgcggccagatattacaaaactctgatgacaatgtctttagctattaggctattactagctaaacatttgaaatgattaatctttaatcaaattttaccttttagaatatgttggttatatctgtgaatttaaaaaatgcattccccagaaataacatgccttgctttcattgtgctctctctcattttagaagctgaaatcgtgtcaggttaaacttcagtcaaggttggaggatgatgaagaagccaaagcagctctgatgggaagaattcagcgattgacaaagttaatcttggtttcaacaaaaagttcactccaagctgcttctgtaaaacctgaccatatatggaggcaagcttttggagaggatgaggtatgcatgttaaattaacgttgtttgcaagacatcattccattttggtggaacaataatatttctgtttcagcgtttacaattacaccatttgatattgatgtataatttaacattatggttcctacagctagcatacttgcccgatagaagacgggagaacatggctgatgatggtgctgtaagcacagtttctgaacatttaaaggagccaagagatggcaatagtagtctggacgagatgacaaaggacaggagaaagaacaagactcgtggaatgcttggctggctaaaactgaaagtaagttctaatcttcgttgatccctctgttgtatcgatatttatagatggagttagtcattgtgttctgatatataaaaatgacacaatccaaaaacataaagagtgattagactgtttcggcattagacatgacccataatgtatatgctgcagaaatctgatggtgtggccgggacattgccgactgatggtaaccagagccaagcaagtggatctccttcatcttcctccaagtatacacaaacaaaaacaactagaagagaaaatgcagcggctattaagtctattccggaaaaaactgttgctggagacttgttcagtgctactgttggaccagaagactcgtctccggtaagagaatattgttccttcacaattttcttgttgcttccatgattatttttttcttataactattgcttccatgattacccttgagaaagtagtgacgccttaattgttattcgttgaacaccatatcctgtggtcggttcgtaggttttaaagtggtcattgtgtatctttttactgacacataaccatcaacaatgacatacgacagactggaactactattgcggatcaaatggatcttcttcacgagcagacaaaaatacttgttggagaagtagccttacgtaccagttcattaaatcggctttccgaacaagctgctcgcaaccctgaggattttcacatcagagtgagcttctcgtgtgatcttgcttaacaatatcaaaaaaattagcatataacatcttgcttctttcatgtttgcattgtcgactgcaggatcaaatacagaaattagaagatgaaatcagcgaaaagaaggatcaaatacgtgttctcgagcaacaaattattgagattttcggaatgactccctatgcctcagattctcttggaatgccccaggtaaaataacagatgacgaacaaaaacaagagtttagatgtagaaatagtttcattcaggattatctgcttatatgaatccatttcaatacacttattggataatttcctgtgtttgcttgatataggttctgtcaaagctcacgatgcaactaaatgagaaaatatttgaacatgaggtactcatcctcttttctcttttctctcattacttctcactcggtattgttatagatcagaatatcactgactcagtgacaatgtcttttgctatgaaatgcctttttcaagataaagtctgcagacaataggatacttcaggagcagctgcagatgactgtaagctaaaacttcatataatgtttctgtatttttaaagtgtgaaaggttgagaactaccagtttgaagttcattattaccctaataatatacacagaaatcagaaaacgctgagatgcaagagacaatcattctactaagacaacaactagattcgttagccgagagacaatcaacacagcaaatcgcaggagacgaatcatcagggaagaatattcacaacagaaatggtgaagagtcagaaatatactctggagcaggaacaccgaccagcgtgatgagtttaaatagagtatttgctcaggaagagactaaagagatctacaacgaaacagctctcaactctcaggtatcattcccatacaaaatttgctccttcattcatctacccgacacaccaaatcattgtgatgaacatttttggggtttttgtttacatcactaggcattggaaatagagaatctgaagaaggagaagatgcgattaattgaggaaaaagatgagcttggaaaacttaacaagaaactcactgaagaagcttcatatgctaaagaattggcgtctgctgcagcagtagaacttcagaatttggctgaagaagttaccagactctgcaatgaaaacgcgaaactcagcaggtgaaaaagtttcaggtctctctgttgttgctcggagactcccagcttcaagataatgctgcaaagtaaatcatcttcgttgacatataatgcaaatctcagactctacttggaaggtaatgatgttgatccatcaaagggaacaagagatcatgatgctcccaaaggcattcaatccagaaaaaatggtttgtattgcttggatagtattttgattacgtctgatgacaaacacatgatgtaaatattcctcacaaatttgttttcttgttctcagtgaccactatttttgtatgttcttaggttgaatcaatgatgttgcaacaagttccatagttagtttttcagcttaattaactttgtttagctatatgtaactgatttgatattctgaaaattatttggtcaaaatcacataatactattgaaatatatgatgaagatatataaattgaacataaacaaagtttgcaaggaaaaagttttataagaaaggcaaagcattggaatgatgataatggagatgaaagcatgatgttgtttgtgaaaagagaaagagggactagaaataggttgatattccacaaaatccaaaaatactaaagtacacacttacaagttacaacaccaccaagcttttatttcatttctccacaaccactattgtttttacttcaccaattaattaataaaaaaagactcataaatgttcacatcatcatctttgttcttctttcgtttttttctccaacttgaaaatggtcgttactctattcacctataaattatgtctttttgtttagtttctgctaaaactgaaaccacatttggctatcgagcgtagtagctggatggtgtgcattggaaataagaaactcaatacaatgaagatagtattaccttattttaagacttggtcttaactattttatagtatttctgtaagtcacaatatcatgaaacgcggcagtcttcatggggttttgaatcacgaggacgtctaatattttcttttcaaagataaatcggggtttggtgtaaattgttgagcattcaagattcaagattcccctcttatgtactaataaaataatttatccggattaggttaaccgttgtacttgctaatgttcaacgttagggcttttaaggaagttatcaacgccacgtgcgatatggatatggacgtgcttgataatagtaatttttttttctacaagattgacaaataaaatgttgacaaaaatatcttcattattaagcaattcatgctctcattggaatctttactggattttttttctatacctagttgacgtcaaaagtaaaactacaaaattaatgaaacataatcgagaactcattacagaaaagaaagaataaaaatggttatccacctcgtattaaccacagaacatacatttgcatatagtactaatttatcatatatataaactgtaatgaatgagaatcgatcattgtttgacataagtcaaacttttactgcatacattaatccatagttactaccacaaaaccataaaactttcaatcaaagatgacgtcaaaactttgaatgttgatcgggttactgcttactatctaagaaatctcgatactaattgtgtttccatgcaaaaaaaaaaaaaatggtcgtttctcagtgtacttttgatagttttggacaaagtgatattcatgaactgtctatgaaaattaaatttttgtaataaaagtcaaaagagtggtggggttaagttagacgccatcaaatgatgatgcatcaagttggaaacttatggtgagcccaagcgattggttttgaactcatttcccattcttccaatttaggggcttaaatgatatcatgttccaattcttttaatatatacagatgtaaaatggtgttgtgtattttggataaaaactaataatacaaagaaccagaagaatacaaaagtgataatgtcatcaaaaatagtttgaataccaaaaggaatcggtaatattaaagttaaggagttaacgtaaacaagaaaaaaatgtgggagttagaaacaaccaccacctttctatatcttacctccgtgcagctcaccatttctttggacattagtataacaaccattaagaatttaatattcaaaagtgatatcatcacttcattaattaattatctcactaacttgtaaataaatttattcatttgattttaaaaaaattaatagttttcgtacacagagtactctttcaattcatttttggaacttttaaaacgatatatattctgatgtgagctttcaaaaatatgattaatgataatggcccgatatatagtggatgtttttttttcttaaagcattttggtgatagttaaagatgatataataatatgattcttaagtttcttcaaatacaaaattaaaatactatatgtaggtaaaagcgattaaaaaaacaatttacaaaataactcgaactagagatattttaaaatatctaaaaggtgaaattaaaatctttgatagtacaaaattattggcgtaacacaaaaaaaatacagataaagcctcctatgtgaaagtgaaactatactgatctaatcatttactaatagaaaaccaccatttttcccaccagatcgtatgttatcattcgttaattatcaccacatcttaccgtttttgtatgtaactcttgagatgctatattttttaatcaccatgttttactcaatgaaaatcatgttatttttaaaatgaaacaaagatcagagaattcttttacatatatttatgttcaaaactaaatagtaattaatggttgtatacacacttgatcatgatgaggtgagtagggggttacatgcatatataaagacatggtaattaaacagagcaataattatgaacataactctattgttgcttttttcttttctttttgccttttttctgataacctactgttgcttttctttgcatatctatttgcttagatgttgattattatgtcgatctttgcatgccaaatttatcggtggccaatttgttaggttcggtttttaagagtcaattaagatagtcctaattaaatacactaactagtttaaatacacgtatagtgtattaacgtgactacacgtgtttatgtattttttttgagaaaatgcatcaaggatttcaatgaaatatttgacaaaacaaaaaaaaggatttcaacgaaatatcaactcaacaagttacagaaactaaaactgtataaatcatcttgtaattttgtaaacggtgattactagttaattttagtaaatctaatatgttatctacagtctaataacatggaactccatgaccaatgataaagcggttctagtagtttctcttacaacaatcttttacacattgaaaacatataaatttagggaatatatatatatgtatgtatattgtatcctgatattccatacaaaagagtttcgaagtgtttttttgtattttattaggaaaaagtgcaaaaattcaaaatttgaaacttaataatatttgagtgaagaaactagaaaggtccgaattgacaaaacataaaattctgtcataggggccataattttttggagccgtgcaacaacaagggtacaactttaacaaaaagataaaaataacaagggttaaaggggcaattcttagtgacaatgttaatgtagatcaactatatgaaattttatgatggtagaaaaatacacactagctagacggtagaaataagcacatcaaagcaccacaaagccactacactaaattgcaataagttgaatagttaaaacatttgtgtgatttgggacgagaaggtgcatgcgaaccggatttgacaaagcacgtgagaaccggatttggtagcacgtgagtggcacactttcctagtggcatgtctcagctttttcttatagctctctctctctcagcttcgtaacatgttcatgtttcctgcatgcaattgtttattacccctactggctactactactactactagtatttcgagcatcgaagctctcccactccacaattttatactgaaaactttaatctttacatttccaagtctccataatgtctatctgtaaagtgtaatctaaaaaaactgtactgtagtttatttctttcagtaacaatatacacagttactggtggatacgaataaacatttctatatgaaaatgaagtgacccaaatccatccgagtaacgtcgattccaacatcaactatactctgtttctgtttacgttttatagatttttcaagtcatgggactttataaagaaaacataatcaataaatataaccataattttataatgtttgcctcattactttccaattgtttttttttaaaattacagattccgtttactgttatactaaaaagaaacaaaaaaacctgtcaattcataacatttctacctaccaaactagcaacactttttactgttttcttcttaataattatagagtcacatagcttaaacctttttcttttcttcttgaaactcgttataaagagtaaaaagataaaagtaaaagtacagggcaaaagggtaaaaagtggaaagtaataaggcccaaaaaaaacaaaattaagacacggtcttatcccaaatctcctttcgtcgtcgacgttgtttctcttctacaatttcccggaaaaatttattgttgaattctcacaaacaaaaaccaaattcgcctttgttttttttacctctgtttctcgtctctcacactttcttcttccccattttccaatttgcatttaagttttgcccaaatccctagctttcttacacacatccctatccgttaaatttcgtagagatcgaaatcgaaattaattgcaacaagacgaatccttttttctctttttagcttatttacaaaaaaaaactaaaaccccattaaattttcttttatttaactagttgctatcagtctctctcttctgattcctgtctgctacggtcacgtttaaagaaagaaaaaatcagcaaaccccatggattcttctgtctctcctcctctctctgtcactctctcgcatgcacgagacctctcttcctcctttcctcttttgtttgtttcctctcattctcactctctcataacgacaactaattaatcatccctactctgtttttccgatttgaaaaaacaaaacccagatttcgaatttggggaaagcaatggtctttccattaaccaaagcatgagacttgaaacagcattttgtagttgtgtggcgacaacgacgacgatattaaagttagggtttttctcacatgggttgcggaggatccaaagtagatgatcaaccacttgtgattctctgtagagagaggaaacaactcatcaaagctgcttctcatcatcgttgtgctttagccgctgctcatctctcttactttcaatctctctgtgacgttggtgattccattaaacgtttcgtcgacgaagaactcgtcctcgttgggacttcttcttcttcttcccctgattctcctgttcttactcttccttccgacgaagggaagccacataaacacaagatctcctcttcttcaacctctgtttcgcattcggttattgaagacgacgacgaaggagaaggagaagatcagcatttgcatttatcatctggatccgagttagattctggatcggaatctggatctgatgattcattaggtcatatccatattgaaactagccctaaagtgaaagagaaagaaacacgcttaccggaaaattaccagcccggttatcaatccggttatcaatccggttatcagcccggttttacgccgggatatcaatatcaaccgggttactcggctgggtatcagtatccggttgaaggatggggattcatgggagagaatccgaatttaaacccgtacccgaatccgaaccagaatccgggaatgtactttatgaagaagtctgtgcaaccgtcacgaccggtagtgtttcagccggagaatcatagagtggagaatgggcaatggttgccggagaatggagttgggtattctaattattacccaggaaacgctaatactgggtattttggttacccggagcaacgtagagagccaccgtctccggtgaggccgactccagcacctccgtctccgcctaggatttcaagttgggattttttgaatgtgtttgatacttatgattataatagagctggtggtggtgaaagttccggtgccggagctgggttttttccagccatgggtggaggtaagtcgaattcaagtagtcctgattcgagggaagtgagagagagggaagggattcctgagttggaagaagaaacagagcaagaagttatctttgggcagacgtttaaacatatgaagagaaaaggcattgagaaggtgaaagaacaacacagacaggagaatgagattcacgagagaaagatcaagaaacgaggagattcaggtgaaggaacttcaagggcagtgcctgtggtagaaagggctacggagagctcttttggttcaaagactgtgtcgtcgttttcgagcagtgaagaagagtcggagtttcatcatgttaatgatggagaagggaagagtagcagtaatgatttaggtgggcatgagacggttgctactaagagtgttggagaagtagaagaagaatatgtgaggaagaaaggagttagctttgagttggatgaaaatgtaactacttcttttgatgttgaatcttccaagattagtagtctatctgcattgtcggttcatgccactagagatcttagagaagttgtgaaggagatcaagagtgagtttgaggttgcttcttcacatgggaaggaagtggctgtgttgcttgaggttagcaagttgccttatcagcagaaaagttcggggctcaaaggtaatgtttttacatgttctgtttgtatctgtgattgcttccttaattgcataaatagctgcattttgaaataacttatacatcagaaaccattttttggagatcaatcttgttacttgtggagatgataatgcattactgcaaatcatttgcagttagattagagctatagctttaaattagcagtaatttggagctcttcatgcaggagaaatatatgtatactctgatagtaatattagtagactttcgtgaattttcttcattttaccttggatctgttcaaattaggaactacatttcgatgtaatgggaagtaatgttgagctcttgttgctttcgattgaactgttatgggctttttcttctctgatggagcttctagattatgaaccatagatttgatttgcgtcacttgagtcttaccttggtgctttttttctaatgatatttacttcattttttctctagtcatcttctcccggatcatgtatctggttgcaccatccacagtttcatcgcgctctcagcctcaaccgtcaatacgtttaacatctaggatattgaaaattgcaaaatcatacaatggtcaggatgttagagaaggcttaactgggaacctctcagcaaccttggagcaactctatgcttgggaaaagaaactgtacaaagaagtcaaggtatgtatgtgtttcttgattttgaatggattaatctccttagattggagcatcttttgacagatgtagttgtttgttgatggcaggatgaagagaagcttcgtgttgtctatgaagaaaagtgcagaacactgaaaaaactggatagtcttggtgcggaatctagcaagattgatactactcgagcagccattagaaagctgctaaccaaactcgacgtctgtataagatctgttgattccatttccagcaggatacataaactgagagacgaagaattacagcctcaactaacacaattgattcacgggtataaattgatctcaattcttttactattcctacatttatatattttcgtttgtgtgatccgatacttgggatttgaaggttgataagaatgtggagatcaatgctcaagtgccaccagaagcagttccaggcaatcatggagagcaaggttcgatctctcagggcaaacaccggcttacaaagagactccggtttgaaagctattcttgatttggagatggagctacgagaatggtgcattagcttcaacgactgggtcaatactcagaaatcatacgtggagtctctaaatggatggctctcaagatgtcttcactatgaacctgaatcaacggaggacggaattgcccctttctctcctagccgtgttggagctccacaggttttcgttatatgcaaagattggcaagaagcaatggcgagaatctctggagagaacgtttcaaacgcaatgcaaggctttgcctcgagtctgcatgaactatgggagagacaagatgaggagcaaaggcagagagtgaaagcagagtatgtgtcacacgatttcgagaaacggttgaatgatcttcggatggagagggcgagagtgagaatgagaaacgatcagctacaagacggtgcatcagagaaaagcgtggtcttgtccgagagcgggatctcggcgttggatgatttgaaagtggacttggattcaatgaggaagaagctagaagaagaaagagcaagacacaaggaaacaattaaacttgtgaacaatgcagcttcaagcagcttacaagctggtttagtaccaatctttgaggctttggggaatttcacttcacaagttgtgaaagctcatgaagatgttaggtttcaacaacaacaacagcctgagtctgaagattgattttgcacgaattaaaaagttttggtaatgaaattagattcggatttaggaaacaaattgttgtacatattttagcatttatatattcattgattggttggctacttgcttgtagattcttaatctttttctattttaaggttctcagatctttaaattaaattacttctgaaatctgaaccttataataatcattaatctatgagaaaattgataataatcgcaagaaaccaaacataattggtcagatttaagatctatgaccatttacttgcacgaagtcacggacctgagatctcacaacaagatcaacgaaagagaagaagccacgtcattgtcgatatcgtgacgcttgtacattggtgcggaacagtgtgtcttcggtttagacaatttttctcttcttaaaattactttttactgctggtaaaatggagtaaataactaaataaattttataacggcctaggtcaaaattatcaagacactgtataaacattaaaattcttgccaaatccctataaactatgacgacgtaatacccaattagagatagccacgtggatgtatgaccaatttaggagcattcagttttcgtgttttgcagtgataaatatctctgagagctaaccccggagagcttacagaattcaagctaaacattgttagagagaaagagagagcgataatggcgatgaggggcttcacgttgttttcgatccttgtgttgtctttgtgcgcttcgtctatcagaagcgaagagacggagacgaaggagttcgtgttgaccttggatcacactaacttcaccgataccatcaacaaacacgatttcatcgtcgtcgagttctacgccccatggtattcaaattttgtgacttttcaatctttttactatttctgttgacatggtttttttttggtaaaaaattgacatgggttttgtgtcgtgttcgtgaatctgggggatctgaatctatcatttgtgtttttggatttgcatgccaatgatttcttattctctcgcttgtgtgatttgaattggcgtagctgatctgttttactaatcagaacttttgttgcagttttgtaatttgtaacgatttgatctattccgatctatgttactatgtaactgagttgtctgatttgaatagtggtctcattttaattttactctgtaattgatttgtgaaagtatttgatctaaatcttcatcatttggtaatccgtattattgcccatcttcaggtgtggacactgcaagcagcttgctcctgaggtactatgactttttcaatcacttaaaataggatttgcaagtggagttttttttttactggtctaattcatgtagcgatggctaatgggtggttttatttttgtttacagtatgagaaggctgcgtcagctttgagcagtaacgtcccaccagtggttcttgctaagattgatgccagtgaggaaacaaacagagaatttgcaactcaatacgaggttcagggtttcccaacaatcaagattttcagaaacggaggaaaggctgttcaagaatacaacggacctcgtgaagctgagggtattgttacttacttgaagaaacaaagtggacctgcttctgctgaaattaagtcagctgatgatgcttctgaggttgttagtgacaagaaggttgttgtggtaagtacaaaacatgttcttcagcttttctctctgttttatgattttaatcatgtatggtagttaaataatgtctatttctattgttttaggttgggattttccctaaactatctggctccgagtttgattctttcatggccattgctgagaaattgcgctctgagttagatttcgcacatacctcggatgccaagcttcttccccgtggagagtcatctgtaacaggacctgtggtcaggctattcaaaccctttgatgaacaatttgttgattccaaggtttgtatattacattggttctgttatatagtatattgttgcggaatgtttgtttgatttgcttctttgcattcaggatttcgatggtgaagctctggagaaatttgtcaaagaatccagcattccacttatcaccgtctttgacaaagatccaaacaaccacccatatgttatcaagttctttgaaagcactaataccaaggtaactcatcctagagttatcaaatatctcaattccattatgctgtaaccagttcatgatatactacatagatggattcatattatgccatttaattttactggagaattatgtttaaatttatgaaaattctgaaatgagtttatttgtaaaagttgatatttcgtactaaattatgttatggctatggaaggagctgcgagtgtgtgccatattagctgagtcggactctagtgtctataatttactttttgaatattctcagtaaaagcttcaagaatcctcagtctctgcaatattttgattttcaggcgatgttgttcattaacttcactggagaaggagctgagtctcttaaatcaaagtaccgtgaagttgctacatccaacaagggacagggtcttagcttccttctaggtgatgctgagaacagccaaggtgcattccaggttagtcttattcttctatcttcaatcgtttatctccaaggtagcattggtttcaaattgctgaacacatttctctcctttctaaaccattaacagtactttggactcgaagagagccaagttcctctcatcatcatccagactgctgacgacaagaaatacctgaaaacaaatgttgaggttgaccagattgaatcatgggtcaaggacttcaaggatggaaaaattgctccccacaaaaaatctcaacctatcccagccgaaaacaacgagccagtgaaggttgttgtttctgacagccttgacgacattgtcttaaactctggaaagaacggtgagttactttacattgttaaatcacaaatacctgtttgctcgtagcaaaaacttataaatcagttttcattcctcctatttacttgcagttttgcttgaattctatgctccatggtgtggacactgccaaaagcttgctccaatcttggacgaagttgctgtgtcgtaccaaagcgactcaagtgtagtcatcgctaagctagtaagtcctttctctttcttcacatttgagagtatttgttcttgatcaccggattcttactctttcacttgtccaggatgcaaccgcaaacgacttcccaaaagatacctttgatgtgaagggattcccgaccatttacttcaaatcagcgagcggaaacgttgtggtttacgaaggagacaggacaaaggaagatttcataagcttcgtcgacaagaacaaggacacagttggagagcctaagaaggaggaagagacaactgaggaagtcaaggatgagctctgaaaagagaagtgtgttgtgtctcttagctgctagcttagtttggtagttttgaggaaaatacacagaagaagacagagcattgagtagactgagagacagagagagagagacgacagacagacagagagaatctctttatctattcattaggtttttatatgtgcactcttcagaacaataatggctgcctccttttcttttttttggttgatgttacctttttttgtttgaattcagttctcctttaatatagtttttgaggcatttcttgggacgagttctaacactaaaaatatattaattctgaagcatataccaagataatatactagttgactcttaattggttccactatttgaaaagaaaacaaaaggctaatttggttgttgaggaaagtatgagagaaaggaaactcaagcagatcgtcgaggagatcaaacgttacttttactgtccaagcgtttatcaacatttacaattttattgacttgttcaacatgcttgttccttttttggtcctaatactttcagttttttcactaaacaatctaatggaagaacgagaaacagttaaactaaaccaattggttaaagatattgaaaccgaccttgaactgatttaactcagaaatgtcggtttcgttgtttgtctgaattttgtgaacctcgagaaaacaataaaataatattaaaaaaaagacagagaaagagtctctgtttctatcttcttctttttttttcccggtaacagggagctcgcacgggcggctacgaaatcgctgtattttcaaatcgtctctcagtttccatgacttcaggtattgcaatcttggattcaattttattaattttgacgaattgaatcagatcaatacatgacaccgagaacagatcaattttgagaaattttctctgttgattaaactttctctatattttcattcaaaaatcattatgatgggaaccgtttggctttgagtatccttcgaaactcgtatgattggaggtgaaaataatttagagattgatctggtagtctcgtgaatgtgttcaattacaaaattgagaaacgaaaggtttttaatttattcatattgaacttgtattgatgctatcactgagtttcaaggtgaaattgtgagctatttattgattcttttgtgaaagaaagaaacttgatttcattggtgcttgtttgtcacagatgctctcactataccatctgagcttgaatctgccttgcggctcaggactgtacaatactttattacaaaaaggccttggcttggtacatctctaatcatttaacactcattctcttgtctgttttcatcttatcaagaattgggtttatggtttgtaatgagttacattttacagatctttatggagtccatgtgaggcctgtgccaccattcggaagtacaagccgtaaacctcattttgatccagctttgattcatcgttgcttgcctgatgagcttcttttcgaggttggagctttctttatactatgttttgtcattgtactgaaatttgtttttcttatgtactggagaagttgattcttggatatgttacttgtaggtgtttgctcggatgatgccttatgacttaggtagagcatcttgtgtttgtagaaagtggaggtacacagttcgaaaccctatgttctggcgtaatgcctgcttgaaagcttggcagactgctggggttatcgaaaactataagatcttgcagtctaaatatgatggatcatggaggaaaatgtggcttcttagatccagagttcgtactgatggtaatctttctttcttcatcctcttgcttcacgacattctagcgccaagtgattgttttcttttgtatgctctgactaacatcgtgtcttgttatatctttattgattaaagtaactatgtatcttcttctcaggtctttatgtgagtaggaatacttacattcgagctggaattgctgagtggaagattacaaatccagttcacattgtaaagtctttgtctttttctttcttttcttcttcatctgtccaatacagacacatataataatctgcgtcttcttttggaaaatttgttgcaggtttgttactaccgctacataaggttctacccttctggcagatttctttacaaggtttgcactcttcgatataagtaggtataaacgttgagctactggtgggatctagtctgataatgatccatccgtatttgttgttattccttcagaactcttcacagaaattgaaggatgttgccaagtacatgaactttaaggcttctaaatctgaaaatctttacaaaggcacttatacactgtcaatgtcggatgataaggttagctccctctactgccttttggctggtaatcaacaacattacatcttcataatcctgattactgaaaaacatgttctttttgcagatcgaagcagctgttctgtacccagggacacgccctactgtcttaaggattcgtttaaggtacttcaatccctcaaaatatgtggatagagaagacttctttttagtaatagcatttagaaccttggtctggcattgggaagaaggcctgttacttatcttttaaagtaccgtgtctagtacattcatctaagacttatctgatccggtgaatgtgatggggttgaaatttttagtagctgatagtcattttgatcttcttggtgtggatatgttttcgggtgtggttaggttaagaggaacagctattggagcgaataacaggatggatttgctgtcacttgtgacaagtggtgtgaacgatgaggaaataagcagcacagaagaagacattcttgggttagttgaaggttgggaagacgatgaaactcacaacccggatatacctgccgtctcacacaagaggggtatgactgcattcgtcttcgttcctttcgaagaggtaagtaaactataaattattgtatactcttcccacctataatcttagttacattgatttgatctgaatatcttccttgatgttattaggttgacgaatcggttctgaacttgccaccggagaaaatggattactatgtcactggctaaagagacacatcgaagtttctgtacaaaaatgtatcatagaataatgttttcacgttatatttattgttacgacaaacattagtgtttgtttgttgctgtcgaattgtgaaaaacatacattttgggatttttgtttgtttacagagattacttgaaacaagctttactattgtaagataatgttttcaagtttttattatacaccaaaaggctttaaagcaggacttgatcagatgctagacttgaggttcttggaatcatcctctgagtgaaccagacgctgccacgttgggtttcgatgaagaaacgtttcctgcaaaacacgacatattttcataagaatctgattcatctcaattttttgaggaaagaagagatgtatacggaaacgtaggagcaagtggggatgatggagaaagagtgttcagaggcgtgttcgaaagcggcgacgcatagatgcgaagctaaaccaagtcctgcttttgacggcggtacgaaggttcgaaccagatccatgactttaccgtcattcttcatcttgtactctatgaaggcttcgtgatcatcagtctcgaatctatgtcttccttcgttccacacgatcttcggtttctccgtcgccgtccccgtcgccattttatctgttatctctctaagtctaagtccactctctttcatttcaaaccgagaattgattttaatatatcgttagtaaaccggtttaatggataaaaacgtataatcgtcgtacacgtggcaggcgatggaggcggcagagtgttttgcttgcttcgtcgtgttatttggcgtgaagtaaagagttcagagagaaaaggaagtcaaaacttcagagagaaagtggatgggggacacgaaggtagagacaatctcgaggttagctcaatggagaattgaaaattttggtccttgttctttcaaaaagtccgatcctttcaaagtcggaatttggaattggtaagcttttcatttttggtttattttggtaaattttcttcggaattttgatttttgtttgttttgggatatgatgaaggcatctgtctatagagaggaatcgctatctatcagtgaggctattcccagaactttctcgagtatctaaagagcaacctcctgttgccaaatttgttcttcgtgtctccaacgttggccccaatcgtagattctacatctctcctggtatgtcttgtctttgaattgacttttctggatttggaatttgaattctattgtcgagctcgaattaggtatttcaggaaagggaattaccttttatgtgggaactatattcaattatgtggaatctgaaagatattaatttagatgttaatgattggctgatgattagtagtaccttatgggatggttacaactgaattaggtttgtttaagctgagatactctgtttatttggtgcagtttatgagaagctgctgcgtacaactgatgattgtgtgtggcatgttgactccagtttccacggtcgattcaccattgatgttgagtttcttgatctcaaaatctgccctgtgaatgtaagcttaatgattctatttatactctcacaatttcttctctttgtaacatttgtacttccatggttgatcaaatcaaatcataatccagggtggtgaagcttctcctgtttggccaaccgatgcaacaatgcaatcaatctctactcaaaccactctcaaatgcttatcccggatgctagaggaaagcatactaaccgatgtaatcatccacacagccgatggaacactctctgctcacaaagctatcctctcagctagctcaactgttttcaaaagcatgttccaccacgacctcatggaaaaggaatcatccacaatccacatagacgacatgtcgagagaatcttgcatggctctactaagttacctctacggaaacataacccaagaagagttctggaaacacaggctcgccctcctcggcgctgcaaacaagtacgacataacggatttgaaagcagcctgcgaggagagcctaatggaagatataaactcgagtaatgtgctcgagaggctacaagaagcttggctttatcagctggagaaactgaagaaagggtgtttgatgtatttgtttgatttcggaaagatttatgatgtcagagaagaaatcagcagtttcttcaggcaagctgatcgagaactgatgctggagatgtttcaagaggttttgtctgtgtggaaaccggtctaatatacacttacacacatactttgaacatttcagcttgatggtgttttgtttatagtcttcttgttctcttctgtgtgtgtaactaacaacaactctggattttgttgtatcactctgtctaatgtatagtattgagtggatttgcctctagtttggtgtaccgagcctctcaaatgggccgagcctttcaaatgggctgtgactaggcctaatgactgtcgacatcgaatgtcggcacaaaatatgataattttgtcgatgttgaaatcgtacgttttttgttttaattagatgagtcagcatcaggaggatgaagtatcgaccgacacgtgtccgttgcgtcccaaagtaaagcttataacgtgaaggcatttgtatcgtctcttccgccaaaattggaaatggatatcgaagtttgagctaagaatccaatttagggttaactttgccggattctcaagcaatctccgagagagacagtgaggtttcgatggcgaggaacgggattgggagttcaggagggaagaagaatggggctgggcagtttttcttagcgacgctgcttctttggcttgtctccgtcgtgtttgagattgctttcaatctccggacggagcttctctgggtgatttgcggtggatgcttctttcaattgatgaattgggttgttcgttcatggatttctcgtgaccctatatttgttaatacctctgtctcgcttttgcactcaatcatcacctccgcatcaggtccctttctctcttctcttatatttgagttcttactataggattgtgctctgttagtggggaaattttatcataggtgtgcacattggtcgttggtattagtcaattttcctttggtgctgtgttttcacggtttcattgcttaatgtgattcttatttccgattggattagtcttatgattgattgccatagcttgagtataatgcagttctttcttcgttaagccttactgattatgatttttcatcttcaacactgctcttgtgttactacagtggttttcatacttctcaatcaatgcttagccaaaggtttagacgagatgtttgatcattctgagttggttggtgggacttggaaatgggcatatccagctttgtgtttctcatgcggctactttgcatatgaccagtgggatatgcttcagtaccggttatacagcggcttaataccttctattcttgttcaccatctagtcctccttgtttgcttcacattggcactataccgaaatgtaaccatcaactaccttattcttactctcatctgtgaggtacgttccacttttttcttcctgaaaacttgccctggcttttctctgttctttaccgaatctatgctaacattctctagttaaactagactagtttcatatataacaatctagttagatatagactcaactctacaacatctacttgttcgaacaaaagtgacacctctgttattcggatgtgtaaacagatgcattcgatctttctacacgtgaggaagctaaggagaatggcaggaatccgagacagcaacacagcattggtgaaactggagtgggtattaaactggacagcctttgtgtttgcgagatgcattcctcacattctcatcactatcaagctgatcaaagacgcacacaagtttgggaaaggcgtggagttaccactcgctctgtctggtatggcaggaatgaacattcttaatgttggcctcgggttggatctgtttcatgctttcagaagagagagaagccacagaagaaaccaagagaacggcaaccttcacgaccatggagaataatagctaatttagaggcaatccattaccgaatctatggtttgttgttgtatgaatactacccactcatctcttgtttatatctgaggctttgctactaagttctaatagctttcagatttgtatgtatctctctataggaaaactacatgtaaatgttatttcttgatgattacagtcaacagactttttttcttcttgtgtttggggaaacggaaccaaattagaattttggtttgatctttggttgtgatttatatatcataatcattatataaaagttaatcttaatgaactttggtttattcagttaaattttggtataatcttttcaatctattaggaaagtttgtttagtgttgagttgatgaagtttggtccggttcagtttccaccaatgtttggaagaaaaaaaaatgcaagagcatgagaggtcctaccgggagtcgaacccaggtcgctggattcaaagtccagagtgctaaccactacaccatagaacctcaggtgcttgttctgttgcatgtaccagtttagaatctaatccaaaatattgtattttagacacgaccaatgaatagattcaacatcagcagttcagcagcaccacagattgcagttttctttgtctttatctaaccaaacaaaacaaaaatcaatattttacttggtgacaatgcatcatatgagaccatcaaactggtgacagtgaaataacaaagatgaatctcacaagacataaacgttaagaagattacactatgtagcaaaagaaacaagggtgatctttttgctactaacaagtcagaatctgaaaattatggtaagaaatccagcttaacaacagattgattctagctatactccaagaacgaacctattgcttctcctaaatccccaaatttactgagtttctacttcgagtgaaaaccgtggcaaatccgttgcgattcttctcagaactccctcggtttgatgacataattaatgacactgttgttgagtccgaagaagatgaacaaggaggtgaggtcttgttattgctgttctggattgcaagaaactcaagtgatcttccattgattgttttgatgcactcatgaggatcttttcctaacaaagcttccttgttgtgaactgaccttgcagaacctggaatgctagctgtatcgatcaagaattcttctagtgttgcaagagattgtagctgtttcccaagtgatgctattgttttctgacaatctgcaaattttcctgcagctgttgctatgtcttcctgcaatagaatcagcttttagtgaaacaaggattaagaaaaagaaaaaaagactaattggtgatcagaaaaataaaaagctatacctgtttgatctttggttccactttttctctcttgatcattgtcttctcttctatctctcttctaagctcttcttcaaatgtctcacacttttcctttagcccatcagagacaatcctctcctttctcacctctgcttccattctggtcacccgagattcggcttgtgttttcgattcattagctagtttaagctcccttttcatcgcttccaacttcatctcaacttcttgaaaacaaactctagattcttgatattgatctttaattacgtcaaaagatatctttagctcagctttctcagcttccatcttctccaactcatcttccatctcaattttgtcaccaactacagcttcgagttctaagctgaatctcttctctgcttctttacaacaaataacttcactgtcaagctcatccttttctgcttgtagcttctccaactttgtgtcaacttcttgaaaacaaactcttgactcttgatatttatctttgagcacgtcaaaagatgtctttagctcagctttctcagcttccaccctctttaacatatcttccaactccattttgtcaccaacaactgcttcaatctctaagctcaatctcttttccgcttctctacaacatttaacttctctttcaagatcatccttttctgcttgtatcttctccaacttctccattaagctcaattcatatccatccttggagtttttagcctgtgtctcagtaggaagagccacaagacgttccatctcaaggaaatcatccatgagatcaatttcagttgatgaagtagtgccctgaagacttctattgccgcctttttcattcttgatttgatctaactcagaaataaatgctgatgatgcccatgaatcagagcaactcccctcaactctctcccttcctccatctgaatgactatccacagattgattagatgatagcgatgatgatgttttagccaaaatcctaagcttcctgcactcagcttcgagtttcgccaacttctttatgatgtctaaatgctgcttactagcagtttctgctgcttgagtgctcaagtccctctcaatcatcacaatctcaaggtcttcacgctgtgtaagaaactcgcgtctcagcatcatgttttcagatttagcagcttctgcttctttctggagctcaagaactcgcttctctagaccagtgttagcagaatgcaactccttggtgctctcagtcacagctgcttgaatattcttctcttgttcatctctaaactgccttagttgtctcacacactccttaagcgccccatcaagatgacttaccctatcttccaagacaatgttcttatcagccgcatcctcgagcttttgcttcagctcaaccacttcattctcagctttctcccacccttgaaaaaaaaccacaagagaaaatgctttcactataaaatgctaactccagaagcaggatcagaaaaggagtgactaattaccagcaacagcatcttctgcaactttggcatgttgtttcactagctcatctttggaatccataactggttccaatatcaaagtagtaccagtcatcatcaaatcacaaacttaagtaccttaagaagagaaaaataaaacaaaaccaaacaattttttaggaacttttgaaaacatatgtataaaaaaaaagaggtaacttggcttatcagctttcccagattttgctttcaggacactctgacaacaaatcttaagtacttaactatataatggactggaccacaacatttcccagaagaacacaaaactggtaatgattttagcaatcacttcataacatgtcattaaaaaagaactacaacaacatctttctgtttcgtttcgtgtaatgaacaatttgttacagaacattagaaaaaagagttgaggagaaaacaagattaccagactagaaaacagttgcaatatgatatgattcttcaaaaccaagaataaataacatggccaaaaaagcgagaatttctttctttttgtggttgtaattctttacagttttgaaatgtctttttttttcaattttcaaaagaggaagagagggagaagatatctaactttttcttcagcatttaatggaagaatacaaatttgaaaaactttttctagttccatgaaataagtgggctgctgtaagatatctaccacatattatttggtccaagcccattagtttagatatttcaagcccaatgagatatattgcacattttattcatatttcacattaacatatttatttatctgaaaaaagaaaaatacaaatacaaaatgaaagccgaactatgatcaataatattaaatttttacaaataattaccattaaaatgcaatatattgtgatgggtgttgttgctatgtaagtaacaaagcagcgctaagtggataaatattgatacaaactgtaatgaattaagtatcgtctaataaacttttggaaatgttgtaagttgataatagttccaagtatacgtcattttctttagttcaagactttgaaatttgaatctcacatgttgttgtcactcatgaatcacgacctacgtttatacatatagaccatacattatcatttaatatcaaattattgtcgtaaaatctcatattttgtacatatatatactataatgttttaaatataatccccatgtcgttttataccattcgcattttcgtatatgctatagtgtctatatatacgcagaccaatggggcttacgtcctgatcaaggattctttgtcttggtgctatattttttttgtgatacttaaatttaagattttctggatcaatataaatgggactattttatgaaaattttcatttaatttttcaaaatcttttaggttaggtaaaagaaaataggtaggtggtcctcctcctaatcttgaatacgatcatctattaaaatggtcccgtttaaccctacagccaacgctctcgacaaaagaaacaaaacaattacgaaattcatgcaaaacaactattaaaaaaaaattcactcacctattgatatcaaaggtcaaagaaaatttgtcaaacggtggcaaataatcttagattaccataatcaacaaaactactcgacaaaacattcaattacgtactatttctctttgagattcttgactatccaacttcgtttaaacttgtttcgagagctaaaaattacttttaaaacagctggttaagtttcgatttttcaaaagaatgctttaaaaagtttccaaaataaagtagacaaaagtcacaaaacaaacaaatgtctactcgtcctttaattaacctaaaaattaggttttccttcgcatcagtcttaccacattgataaattcttatataattttctttggaggagtcacattgctttcctacttttgattgaacttagacaaactaaagccacttttttctttgagttgtcacctcaaacacaataaagttcaaatatcaaaatcagttgcaaatgaatcaactattgatttcaacattttaaccaatttcgttcgaatcaaaatgaacttggtaaaacttacatacatatgatatgaacaactctccaccataaacggatgtgctatacctatctcgataatttctaatatgaatgtatcacaaaaatctttagatttgggatttggaaataaacaatgtatagaaaagagacaactataagacaatgtgaatggggcaatgctttggggtccattttttatgctcaaatgtttcccactattgtgaacaacctaacatggactcttcttcttgcattataacttgtactactctctttttttctttaggaaataataaaaaggaaattaaggtgagcactaaaagtcatagaaaaaatttcaagaatcccatgcaaaatatattaaagcaactcacttttctagttttcttctatctttaattatacctttttcttttctttcctttgctcaaaactttctcttttgtcatattgaaataatgataaaaggctattttgacgagtcctattttgacccttctctcatcttttaatggctttatcacattcagaccacatgcctacaaagaggtatggtgtagggcaagactcttgtccctttacatacgcttaatacatctacatacaaaaacctaattaattcaataacttaatctatggatagttcaatcgcttttaaatccatgtctcgtcattacttacaaaaaaaccttccacataattcttcttcaaacagaagcatcaatcattgaaaaaacgaccaaaccaaatattaaactaaaaaaaaaaatatgtagaaaaatatttttaaaagggtaatcaaagtaatgaaaaattcaacttttacttttcctggatttttttctggttaaggtcctcaccatccaaccctgtttcctcactttggttccttcgaccttagatggtgccacatggcaagaagacgtggacgatcctgatttgagtttgatgacgtggaatagatgaccaatacgcttgcgccatctaagcgatgacttggcactattgtgctctacgatactggtattgctcgttataggagattgctgcttcttgcatgttgagtttgttgtgttgttgttgttgttgtctacacaaacctttgtcactactgctttcttttcccacgacgcgtttccgtcgttttcgaattttatcgatataaaggaatctgaacaaaacatgaaacttttcaaatttatcataattgatcttgtacaataattaagatattatattaagataaactacattattttaccaactataaagatatagttagccgtatagcacacaactcattatatcaagtagaaacaaaattttcagctggctgtttaaaataatattttattcactcatttttgaatataaaaatatataaaattattgtgtatatgaatgtgtctatatgatccttatttgataaatggctttctattaaaaaattatgaacatatatatcattgaaaatagtgttaaatcccacacacacatattgtgtgggagaggagtttataatcttaatcggaaaaaagaaaatcccgtttgtcaagggaaacaaaaaaaagaggaaaattaccaattagaattagatcttgggtatgtgtataattaaagtgatattcataaaaatactgtaccttcttggcttgtggagacgtcaagatcggaggagggatggaatttccggtgacggagatcgaggcgactgaggagagagctcaaggcgaatatcttagggaggctgatgattggtgaagaggaagagtgtttggttcttgatgatctctgttttgaagctaaaacaagaagcctctcgttcaaacagagaggacaaactccaacatactcttcttttggatggaaataacagtatggtgagctatcatctttgtacatatccatcttcacttccgaagagagctgaaaagagagaaggagaagagggagagagggagatatataagatatgtaacaaagagatgggcttaggtctgaaatagaagctttgtaatatatatatcgaatatctttgtatatattacatattgtttttaagtaattttaacaaaaaaagaattcctagtagataagccttttagttgccggaaaaaaaaaagagagaaaaaaagacaagccttttatttttattttgtcaacaagacaagccttttagttatgattaattatggcgacttaagggatatgacatgattttaattaatatctaatccacaatcctttaaaagctcattttaattaatagattttgtttacatcattgttttcagataatgacataatctagaaaattagtgtatatagtataatagtatataccctagatttagagtttaagttttatgtgtgaagtctaagtatagaacagatctcgaacttactactgttatcatggcctacgagtattcgagatatcataaataaaagtatttataaaaaaaaaattaaaatagtttataaattgttgatcgtcagacaaatacttacatagtttacattgttaattaaccaattcaacgtagcatgttctggtcgtcttactagatatagactcgaacagatagttagagaaggatgattgatcgcttgtggatccgtggcatgtgtaatagatattatttaaaactagtaatcagattttaaaaaaaatactgtgaacagagaatctatatttgtttgttaagaaaaaatcaaattagtttttggacgtgttggccgagaaacatccacttgtagcattcgtaattaaaaagagaatgtatccgaatataagggacccattaatacaagtcatcttcctttggtatgtatgtgtgagtgagtgattttggaggtctctctccatattcgacaatatattcaattctatctcctcactttcacttcaagtttatttctttctaacaacttgatcgaaatttcggcgtatagttgtttacatttagaaacaattgtcaaaatatttaaatcaaatcctcaaactttttgtttttagaaactcaattttcatttgaacttagaattcatcatgtcgacgttcagttcaaaccaacattttttgataattaatgaatagactcatgcatgtgttagtacaaatgattttagttttcattatatttccgtgtgagaattattatgtttcttcataactttaaatggctctcacatccatcacatgggcaattctccattatcaagactatatcgcttcataagcaattctttcttctttgggcgaaacaaaagatcagatttagcttcgggtttgatgaaacttctccctatttgctaatcatctcgaaaattgctcaaattaagtcttctatttgtcttcacaaatttcaaatcacgtgcttataatccaaatgggaattgaataagtaagtaaataaatcatgattaaagcttaggagctagattgacctagtttataaaagttggggtctggatgtgaacataaaaggggtccattttatttgttggtcaaaaactttgagcgttcacgtgatcttaaaaaataaaaagaagaagacaggcttcaatatcaagagctaaagacccaaacacttagagagacattgacaggtgatttgttatgtgtagtgatgagtttcaatgtatcatcactttttcaattagaccaccatcccacatacttcctctacactatatactactactcacaatgatcaaagcttttagtgtatgacttgattaaataacaaatgcttttcaaaccaatttggaccggttccgtcggacgggtccgaacatgacaaattgaagaaaatcacattttaaacaaacttttgtcgctgttcatatatgctgattttattcaaaataagagataagagataattaactttttatattcaaggaaattacctgtctattgatttgtggtccgaatggtttgatcaattgatcagaaagaaaatgttgtaatgttgattaaaaatagttgttttgggtcttggacttatttgacgttttgagaacattttttgctaatatgtacgattatctacaattttgtccaatatacctttttctaaacataacgttatgcctgaatatagatttcaacatattgttgcatagttaattcgataaaaaaaactcttgctcagtccacttcttgatagatcttcacatggccattattcagatccgtgtaattaattatacgatcttatcaattttgaaggaataaaaggagtcctagaaggttatctataaaagaacacacaaagaaaaaggacctttttatataagaaaaagtgaagttaagaacaaaatactaaaaagaatgatcacatgggaggaatggagaatctttgggtaggattcaagtaatgttcccattatgggattttatggtatgggtatcatatttgtgggccacttctctgttttcaatttgagtcttttaccaaaaaaaatctgtaaggtttttttgtaaagtgttttcaatttaagtatttatcatcacatggggaaagacaaggaaacaataggataagagacgacagtagcgatcaagatcctacgattatgtctcttttgagcttagagatcctgtgaccaaatttaattaactgatctggatttggtatcgttacagtattcatatccacataaccatttaatagattttaatccaatagatctatgttgctttacaaagaaatatctgtaataacatgtggttacaaaaaaaccaaaattggaatatggtatatctgtaagctatgatttgttttttcacagtaatattttgtttggacaactaaaaaagtaaagtacaactaaactctacagaatttgttggctatatacagagagaaacaaaaaacatatttaaaacaattgctaaaattgacaacattagtttcactatataaatcacctagactaacccaatattacccaccaaatcatcttcttcacaattataaacaggaaatacaaaacaagttgtaatactcatttgtattaaatcatcactagtatttacgttatgacgactcaaacatgcaatgttttcatgttcgtagctatattgacgatgatgttttctgcacacattgctcaatcaaacagtctaacaatgtgtgtgaaacattgtgcacataaccggtgtttgaaagcggcgaaaaattctactcctgaaatttgtgatgaaacttgcaagaaaatctgcaacaatcaactattcggtggtaaaaaatttattgtacctcctcctaagggaagctcccacttctgtagatggttgcctcagttttgttaattccacgaaaaaaatttcgatgttttattttttgcatgactattttttttgtaaaactttatgcatgactaagttattaatttgtatctacttaattcatcgtccttattaaacaagcgtttatgtgaacaaaaacatttaccctaaaaaaatatttcgatttaactaaactaggtcaactcaaatatatacataaccattggttattagatcttttgagtcttctccaaagacttaataaccatttgtcgcgataacatcgatacatcaagaataaaaatgtgacttgaaatcatcatcaaacaactattacaaaacttattaacaaacaaaacttttattaaaaaaaaaaaaaaaaagaacaactgcaattcaataacacagtatacaatcaaacaatctatcagcaaacagtttggttcgcttagacgcaaaccggtcggttatcgtttggtttcgaagtgaaccgtaaaaaacaaatcaagttgaattaataatgtttagttccttcttctcgtcttccgtcggagttatatctctccgcctctgtctccgtcgagactctgaagtctatatctctctatcactcatcttctccgacgcctctcgttcatccaaaaagctttcctatctgtagatttttcaatccctttttttagcgattcagatctttagattatttttttcccgatcgatttcattgagcatactctgttttcatctcacctgttcaatggaatcaagactccgaatttatctaaagagtcttgatatagtcacttttgtatagttttgtttcaatttcttagattatcaaagtttcaaaaatcgcttttttagatcgaaacattgctctgattgtttctctatattaatgcatcattgtgtgtgtttaacttctctttagaaagaggtctcattgatggaagaagacgaaagacgcgacattgttatgtcaagagcttcttcttgtatgcagtggagtcagtggcaattacttgattcaattttaccaacaggaggatttgctcattcgtttggtctcgaagcagctattcagactcggttagtttcgtctcctgaagatttagaaactcacatcattcatgtgttggataacacagctagcttattgcttccttttgtctactctgctctcaaatctcctgatatagagacatggcataaacttgatggaatacttaacgctactttaactaaccaagtttcttcaaaggcgtcaatgtcacaaggatcagctttgtttcgtatagctgcttcggtttttactgaggtaccaaatcttaagatgattcgtgatgcttctttggggtcaaaaaatgtatgtttccaccatgcaccgatattcgggcttgtatgtggtttactcggcatggattccgagacttctcagagagcgtatctgtttgtaacgctcagagatgttctttctgctgcaacgagattgaacatagttggaccgatgggtgcttcggtgatgcagcatcgcattgccattgttactgaaaccgttttagagaagtggatgaatcgtgaagctggtgaagcatgtcagacttctcctttgctggatgttgtgcaaggttgtcacggttacttgttttctagactgttttgctcttgatgaaaacatatgatataacctcacttaggttacatcgattagtgcatattgttaattgtttgtagtttatgtgcttattgttaatttttcagttggatcatatatgtgtatttgtagacaaatctgtttttatttcgttattactaatcaacaatatatatgtgacctagaatccataaggaaatatgaaatgtgtttcagaaagtcattgcaatcgtctatcaaaacctctcacttccttcactcagaggaccgggtgtcgtggtgtggtggccagtggccctgccgcagagaagagcgttcttcgggatcaagtactcatctctgagggaagtggagggtgtgtaaacacgcatgtaaaactgttgtcccaggtattgtctttcccataactctgatcttaggttccacattcctacattgtccagtgatacgtatatggcagtccatgatcttggatacacctgcacaaattcatccaatgatccaccttttttataacccatactgagcttttatggctaactgtgtgatcaaaatatataaggctttagaggactctcacctgaacagtgcaccgtgagactgcgtcgtttagattgtagacttttctactggcagcactccacttcccaagttccatcctaattgttaccaagtgatcatcagtcaatagtcttgaaaatgtacacaactttcgattttcttaagaactctatcttggtttagagaatgctaccaaattttaccgtgtggatgcaaatatgattgtttaacttacccaaccacgaagaaagagtaaccgtcgaggtgccaggtctggacaatatcttcccaattctcgaaaacaatctccacaaaagctttgtaatcagtttgcataacagatgtgacagggtatattgctccatgtgtgggctgatcaggtatgcttccagggttgtatacaccggcaattttgaagtagtccgctagtttcaaaggtgtgtctgttgggtagaatgatgcactattcaccgcgtatcgttgcttgccattgatatttccagcagagctagcaagtttgattgttcgagtgacttttatcttgccatagtggtatgtaccttgtgggtttggcctaggtccactcgctgcaaggttggtcctataagacacaaacaaacccgctcaaacacggttgtataccactaagtaactaacaaagattgtaattgtcaatgaaagaatgaaacaatacaaaaaaaaaaaaaaaaaaaaaaaaaatgaaacaatacttgatggctcgtgcttggtcaaaagaccagcgcaactgaattggtgcttctggaataggtccagaaacaggtccagcagaattactgtaatgaagaacaccagcggtaataaggatcttcgaggtaaacctactagagaccacaatgtaataatcttttgcaggctggtcagctgttataaggaccgagtaagattgaccgacgtgaacatcaagcgaagagaatggagtctgaatagtgtgtgtcccttcgacctcaactaacttcatcttgtggttttggattcggaagttgagagagttttgcaatccaacatttgatatcctcagtctataagtcttacctacagaaaaactcacatcataacttattaacacttacagtcagagaatcaccaataaacaagacaagaaaggtgaaaaagcaaaacctggttcaatgttgagggtggcgccactaccgcgcccattgatgagaattc

SEQ ID NO: 48 - DNA, 107200 bp, Arabidopsis thaliana
gaattcctaaaatacttgtaaaggttgtaggttaggttatttgaaattcaaaatgtaagtggattagtatgttaaaatcaaaaaaaaatgaagagaagacatgcgaatagccaaaaaaataggcaagaactaaaaagcacatacaaaaagtgacgacaccaaaccaaacatcatttaggtatggttttaacgtctgcatcaaagttgctctgcgtattatctgcttgaaatgactcattcaatagtataatctaattaataggaacacttcaaataggtgaaatttgacatcgaattatatattgtctccacatttttaagttacatggcttggaattattacatattttcagaaactatttgtgacgcaaaaaaatgtgatttcatgatttcatcgcttgaatttggtaatttcattaaaatttacatttcactgaatttaattgacatacgtaaattaaaaaatgaaaacattaattctacatagaaatttgaaaccaaaaaaaactcttaaaacatatgacgtatatcatataacaagattaatcacaaataaaatgtagtattaaattaattagtttgctagattatgaaattataacatttataaaaattaccgttttttagcatctgcaagtacaacatgccctaattgttgtttttataaatttctttgagcacaatcttttggctttgccatcaaataattatgctagtttcttacttgatgttacataacaaatgtgaacaaaaaaaaaacacaattgacgatctaaatatataaaaagattcctaaagaattctcgattgactctctaatgagttctaacatcagaaacccgacaattccgacacgactcattacgaaacaacccaatccgacaacacaaacacaccgcatcactctcatgagctccaaacaactcggaaccccaccgtcgagtcgactcagccgagtcaacaacactcactttccgagtcgactcgtaccgataactcggtccaacagagagttccaaattcaacacccaatcttcctcgttcccataatccttctccgacgtcgttccactactctcacaattattaaccataccaatctcttcacgcaccggttccggtttaaccggtccagagaaatcaagatgtatagtctcaacgacatcgttttgaagagacgacggagacacgacggattcgttgatcagacggtgagagtttggatcaatcccacggctgagaagcttcctcttgatatgagtgttccaatagttcttgatctcgttatctgttcttcctggtaatctcccagctattaaagaccatctataacaacaacacaaagtttcagaatctttcacaaatataatcatattcttaaaaaagtgtgagagaaagagactaacttgttaccgagcaagctatggagcttgatgatgagttcatcttcttcttcagtaaaattgcctcttttgagatctggtcttagataattcatccatctcaatctacaactcttaccacatctttgtaatcctgcacaaagttcaatcaaaaatcaaatctttacctctctgtaaatataaagaaacagaggatgtatgaataagtaccagcggcgcgagggagagatcgccagcaaccttcaccgtgtttacggatgtaatcaacaagaagctgatcttcttctttagtccaagctcctttgttcatgtgagctttctcgcagcatggtgatcttcccatctttgttgatctctatatgtatatatgtatctctctacgtgtatttggaggaaatagtgttttattttttttgcaaggaagagagttcctgtaggatggtgttttcgttttgaatgttatttataataactacctaacattattttaataccaaagttaaaaataaaaatgtatctaacaaatgaaatgatgtgttcgtttttttgtgcctaaagaatattgtaacaccaaccagaaaacacaaatttgattgtagtacactcacaggaggaacgtgggtggagtttcctaactttttttgttttttgttttctgagatgtagatcgtacggttttggttattgactttttggctctttagaatcatctcatctgctcaaaaaaaatatcataatcattttacaaattccacaattcattgcaacatgtactgtttttaaccattcttattgcatataaaaaaatatagtcacgcgtaactttcgtataaaaagatcgattataaaagagaaaataactaaataacggtttaagtaatcactaatcagttagtgaataaagtgtttttaacatcatcaaatttacttcttagtttctgtaacgattttgtaaactcgttttaatatcaataaatttgtttagcggaaaattaaaccaattttttttgcattattgaattaaacaattgtttactgcattattaacaaaaaaaagtacttaaacctaattttgggaaaatgttaaaaagaacaaaaaaaaagtagatctgggagaaagtaggtagatagattgggaagatgagtaggtagctgtcttttttcatctctctcttctccaatcactctctccacacgctacttccttcacgtacctccacgtgtcctttcttatgattttatcacattcctctctcctttgtctcttcaattataaaaacatgaatattatttagattagttggataactgaattattgggtttgggcatgtgtacttggtccttcttctactgttgtgtctcttaagtttttttttatattttattttcggatttcacattgtaacgacggtccaattaaagaatacatttttaaaatgaatttactagtaacttgtaaggtacttaaatggtatcaatcaacattgggatgatttttcttggaaattggaataacgtcgctataacaggcgattagataaattagtcgcatagaatcgtataaatgttaaatgtttttgtctcacacgccccatacgtattttagtcctttgcacttttgcagaagttatcagaattcttttcaatatttaaagaggagttgaattttacaacagtgatgtaattctatctaaagcttaatttcataagtttattatagttctgtttttctttctcaatcgtaaacattttttcttatatagaaaaccccgtacaatctaactactattcaacgtaatttaactactgttcaatcttcaatgttttgtcataagctagtaatctatgcttaattaagaaagaaacataagaagagtcatgagcggatgggccttttgttcatagcattgtattggtcatgggccattacttgcaaagcccaacatggctaaccgcaaacaagcttctaatttcatcacgctacgccaaatgccaaacattgttgtacaacacttctaccttctgagtcttcctgactattggctaacatgaactacgacgttcaaagaaaggttcttcggaggtacactgatcgatatggaattggaatcgaaggttccctatgcacaaaagaacatggcgaaaacacgattcaaaaaaacataacgtccgaagcgcaactaaaacttaatatttcgtgttaaaagccaactaaaagttacatttccgttttgtaagcagaaagtgtgactattttatgtgttcttaacaatatatcatttttttttttactttgttaatatcactttctcatttctaaacgctttgtaatattctagcgaaaatataatttattaatgatttttatttttacatgcaaattatacgactgaaatgttataggaatagagacatgtttgtatcacaaaattaacttatgtaggaaaaacaaatagtataagtctatcgttcccctctctgttcaggcgtcaagcctcccttgccacatttaggacaactcttcataccaaatccttgacaatcaaaacatctgcacatattcaaaatcccaaattaactctccttaagtactcattgaactgtaaatttttagattgatatttgagaaccatgtgacattgttagttattacttacttccacctctcaaacatatttccgttcttcttatttttacctgttccctgtagacaacaagagaattttgtctagtatatgcataaatatagagtaagaaagagtaaaatgaataggtatggtctggaaaagattgatcatacactaaaggtattagtttattacatagtatctagtaatgaaaatcaaattagtaccttgcaaccgggacattcaattgctcctttggctccacaagtctcacaacttttgaatatctgtttatataaaccttttgaagaattaacaaaactcttcattgacgatgataacatatcatattgtatatggatgtatagtgaaatcttaccgaaccaagagagaaatttccgatttttcccgcagaaactttgattgtatcgcgtcgccccgaaacaagctgactttcaaaagctagaatcttcggttctaaagataactcactgcaacaaagtggaaatttcaacatttttgtaactcaaattagaactaggaagtaagatatctatgtacatctatatgcatatctatgcatacaagtgatagtgaatatggatggtgtgagaaagctaaagaatttgcttggttgtggtttgtggatattgaaacggatcatgtggagggaatatgttgacaaggattattgacttaaaatacataagtgaaagaagccaaaagaccctacaaatatccattgaaacaaattaaattataatttttacctaactaataaacaatatcaatcacaatttaattctttattttaaaacagtaaaaagcataaacaattaagagcttaacaatcattttttaatcaaaatatctaaacagtatacattcaagtaaatattactttatgcatgcaaaatgtaaatctgaattctgaatatgttaatttttctttttacaatgtatcaaattttataaattaagaataatatattttcttataaatttatccaattttaatttaagagtaagatattagttcaaaaagataaagaaagggacaaaggataattaattcaatgaacacgatcctaaaatagaaaagtacgaaaacaccccttatcttccgaacacttttccgatcgcaaaatgatcgcctgaaaccatcgccggcttcagagtgtttgatcgtttctccagatagatagattgatccaatatggcgaaatcggaaaactcaacgacttcgactttctcttctttcgccaacaagattcaaccgtccaacgatgcagagtccgatcccgattcgtatgccctcgagaaattcaaactctacgaaaccagagcggtaagcttaaaccgattcagaaattgttgattctaaagactaatgaggaagattgcatcaaacgtttctcatttgatttcaccatcgcttaggcactctctaatgcgaaaaatgtgtgttggaatgattggaatcgttaagggaaccctagattgaattgcttgtcatataattttctttgtgcagaggttttatctagtagggagtgataggaataaaagattcttcagagtgttgaagattgatcgttcagagccatctgagcttaatattagtgaagatcctgttgtatattcgcctcaagagatcaagagtctgcttcagcgtatcgctgaaggcaatcgtgccacgggaggattggcttttgtggccaaagtctatggaattgctggttagtctttggggaagcaatgcttgtcttgtttgtatattttggatcttgtgtagtgagctaagttgagtaaaatttgtgccttgtaggttgtgctaagtttatggagtcatactatttagttttggttacaaaacggcgacagattggatgtatatgcgggcatgcgatatatgctattgatgaaagtcaaatgatcagtgttccacatgcaactattcaatctgatgttgcgaattccaaaactgaactaaggtctgtatctaggaattttgatttccctttctgaagtttgagtgaagctagctattcccacttttaaattcttattgcaccatatattatttcacaaagttctttgtatctttcctttatttgcaggtacaagaagcttctgtcaagtgtagatttgacaaaagatttcttctacagttacacttaccctataatgcaaagcttgcaaaagaatgttctatcatctggtgaggaagggatgccttatgataacatattcgtatggaattcgtatctgacgcagcctattcgatcaaggtgcaacaacactatttggacactggcattagttcatgggcactttaagcaggtattgtcttagggcttcaatcctatgtttgatgccaggagttaaaatggttctaactaactttccccatcattcagataagactatcaatatatggaagagacttcagtgttactttagtctccagacgttctcgacattttgcaggcacacggtaagaattctttcttatcaggcctctaatgtatgacaaattcatggtgaccgtttcgattttctgatgccctttcttagttataccttttatctttaggaactttggttagggtgaatataattagtgatgtgaccttttctagaccagtttggatgattgtctccgttttttactgtaaaatatatatagcccttttcattctgtaaaacttgtatttcagttacttgaaaaggggagtgaatgatcgtggaagggttgcaaatgatgttgaaacagaacaacttgttcttgatgatgaagctggatcatgcaaaggaaaaatgagctcagtggtgcagatgcgagggtcaattccactcttttggtcacaagaggcctccagatttagtcctaagcctgatatcttctgtgagaaactaacctagcatgcgtctgttatctatattacaccatttaatgtgtatgtattttttgatctacttgcttcttataaatgactcctgattctttaattccgttgttttggcctcagtacagaggtatgaccctacatatgagtcaaccaaaatgcattttgaagacctggtgaatcgatatgggaatccgatcattgtgctcaacttaattaaggttactctttctatttattaatgtccttttttatctagagatggttatgccttttgtacttatagacaaatatccatggaaatattcagacagttgagaaaaggccaagggaaatggtgctaagacgtgagtttgcgaatgctgtgggttatctaaattcaatttttcgtgaagaaaatcatctcaaattcatccactgggatttccataaatttgcgaagaggtaaaatgttgtggagttgttttcccacattttagcctgaactcacattgctttatattgtccatgttatagcaagtcggcgaatgtattggctgttttgggtgctgtagcaagcgaagcccttgatttgactggattatatttcagcggcaagcctaaaattgttaagaagaaggctagccaacttagtcatgctaacactgcaaggtaattgtgttgatgatatggtctgctacttatattcaaccagaaatttggttttgttttgtaacctgctatatattattttacacactggagctatttgttacctttctcgctgtaatagagataagtactgcagggaaccttctctgcgtgatctaagagcttactctgcggaactttcaaggggtgagagtgcaaatgatatacttagtgctcttgctaatcgagagaaagagatgaagctaacccaacaaaaaaaagacgagggaactaattcttcagctcctcgttaccaaagtggtgttctgcgtactaactgtatcgattgcttggatcgaacaaatgtagcacagtatgcatatggtttggctgctttaggccggcagctgcatgcaatgggtttgagcgatacacctaagatcgaccctgacagtagcatagctgctgcacttatggatatgtaccagagcatgggagatgcccttgcacaacaatatggcggctcagctgctcataacactgtaataatactatttatcaccttcgaccacctcttaacaaaacaatatttgcaatgcttattcagtaacgttgttgaatggattataggttttcccagaaaggcaggggaaatggaaggccacgacacagtctagagagtttctcaagtctatcaaacgatactacagcaatacctacactgatggcgaaaagcaagacgccataaacttgtaataaacctccctttcttgcccaagtcacttcagtttcttgctaagtctttactatttgtagtttgccagtgatgtagcaatagtacgaaggcttttagaataagtttctgagttctaggttcatttctgataagaggcaacagagccctggcattagcttaggcattactaataataataactgccaagatattgacttgtctgatggatagttggctaagaactttttcttttttttagtttctattgaatctcaagtcctagtaactaatgacctttatcccgagcagattcttgggctactttcaacctcaggaagggaaacctgcgctctgggagctggattctgattactatctccatgtttcagggattggagatgatattttcccagatatcgggtaagacttatatttaatgaacctagtgcttgtcagattgtggttcttcattatatgcaaataatatttttagccgtgccggatactggacgtcaagtttaatggacatatgaaccagttcgggcaataccaaagatgttaaatttaatttcccaagataatgagatatctaactttgggtgtatgcagggtccagtccattgctaaacctatgagtggtattggagtcaatcttgcaccagtgccagctttcagagacgacttctcgcggaagaagctgacatcgtttgacaaactgatagagcagacatgcagttcaataaagaacgtgaggctttgtagtgagacagaccaaaggccaggtggcaacactggaagcactggtgtggctcctgatgcagcgtaatgattctcacttgaaattttcaatcatcttattaggcctttgccttgagttttgggaatgacattttatccctttaagaaagtagaaagatagtttctagtttagaaaagaacatagctttaggctcaaaccaaaccatgacttttcgaatcttagcttatttttcttgactttctatctgcagtgagattcaactcaagagccccaattggctgtttggttcaagaaagcccgaagagagtagctctgccacaaaatctggtgcagacgatagtgagaaaggagtaacctcgactgagagagtcaacgatttctgcaacttggactggctttctaagtccgaccgtcatcaaggagatatcttccaaaggtactgatttcttttttcttctctctgacatgtaaacatccttcagaatgcaatattgaaattctggttattattagcaaactcattactgaatgagaccctcaactattgaccaagtctgttggcaaaacattcagattttgtcgccagtgcatcaaatcacttattcagttgtttcaatttataggtatctatcgattacatcaaccaatgaagccaatggttggtatggtggcactctcctcggtgaccaagatgaaaacagcgaaatttacagacattacgcccaattctgtcaggttcagattcttttatcttgctggaatgatatattgatagattgcagaaactaagatcaatattccgtttcttttatgatctgatttaaacagtgtccagcgatggaaccatttgagaacgatcatgagtttgaacagaactttgcggaagttctccgcatgaacacaatcgatgtaatggacattgaagaagaagaaacggagatggaaagcgatttcaatgaatacactcagatcggtagcgatctcgggatcattccaatgcaatgcaaacactttgctagtgatccttgttggctagccagatggcttgtcggagatgataaggtcccgaaggtcatttaatcacgaaaccaatgattttgctccccaagaacgtcacggagacacttcttttttggttgcatgtttgtgaatgtgttcgagtgtgcattttgtgtagatatatgtaagaagggacaaacccaaagcaatattttgtaccccaaaaaatatttgttggtttatgattaagctcacgtataatacagaatatacgaatgattcaacctcagaggcaaaaactagtttccttcgctcccctctacaaagttccccacttttgttctttgttacaaactacaacaaatagaatctttttttttttttggtttttgtcttttacacttacagtagcatatctgacttggctggtaatctcttgaagaaattggcaggtactgaaggcattctgctcctgaaccgtggatgacgcagcatgaacagaccgattatgattgcaatcacctggaacggtgtgacatagataaacacggcccagatcaatgcgaagacgatgaataaagcagttgctctcgggtctctccagctaagaagagcttgaattctctccccttgagtcgccagatcgcctacgactgtctgaactctaccaccgacgctcctaagcctatcatacctcattctgacaatgtctgccggtctgctggtcgggaaagtgtcgaactcttcgtctagctcgtctgggtgtgcattgtctgcttgggacactcgagcgtccatgtgaggtgggtgtcttggtctgtaccggtaattccacatgcctatcacaaagaggtagaggaagactgtgggtaaaatcagttctgggtagcagacaagaatcaggaacagaacgtgaaccagacacgttgtgatcgggtttctccatgtgcagatatcgttgaaccacttgcagaccagagtgaccgaggagagaagcgacatgattctgctgaaattagctttgcttctcctgagactgaacatatggtagtctacatcaagcatgtactccacaacctctcgtctcagaggtggctcggaccttgatagtcttgttgcaactatttgcatcgcctgatgcctaagcaagtcaatatgcctgactggtattggttgaatataatgcattttgggcaacaacggtcttccatactgtgccatcatgttaacaaagccggtgcaggtgtacctcagagctagctgaagttcaccattcttctttaaaccaccaggtgtaagaaccagcaacgggtagaaatgagtgtaaacccggtctgtctccagcgtagatagcctgactctaactttcccaatcctctggtccttaaagtcaccaccatcgttgacatgactattgtcaaagactccaattgttatgaccgtgcaaggatcatgaacttcccaagtatattgctcgttccacttaggcgcaagtgcgtctaaaagagtcctggttctgacccatttgttaccatatttcgccacacaatagggatcagtcattctcccatctttacctttcataggcatcaagttcctagcactgagaatcccaagctcaagaatcccaatactcggcttcctcaaatgctttgaagaaggttgaagatcgctgctgaaatgagtggactcgtcaaggacatggtaccctgcttctatacaaacccgaagcagaatcttactagagaacttctcttttcttttctcattctcttcctccatagacattgaatgtctttgtagattaaaccaccgtggatcaggcattttcccaacctcttgcctgaccggaacatccctcacaggtataaacaccctccccaatatttcatctttccctggaccaatcctatcatcaacagaaacaatcaccatatcctcaaacggctcagacacaacaaacataagctcctcatgccactgcggattcatcgtccgcatctgaggcgtcctcgtcgctctcatctgattccccgcttgaatcttcacaatcgcatcaggtactctacctttatcagacggaacaagatcctgagcttccattacgtgaattctcaagtaatacagcttcggcgagaagtaaactttggaccgcgtatttgaaagattcgaatggctcactcggtgcgcatccgagtgccaagcatctggaaacgactcatcagcttgagttcccatccaaacagcaagcataatctctcctctgttcgtcttcatacctttcttatcctctaacctgtaccactgtggagccaaaggactatctggaggaactctaagaggaacttcagtgagatcaatatgaactcttccaacgaaatcgtctttagtcaaaagatctttatctttcacagtgacttcaagaagattcgattgtaatctctctttagagaaggcaaagatctgtttccagatcggattcgaattcttctccaaatgcttcgttaaacctttgtagttccctagcttcacttcaacgtaaggatctaagctaccggaaacatccatgacaggaagatctcgagctttcacgacgctaacgtagaggtaatgcatctgctcaacgagatcgtatgtgctcgacgttttatctccactgcttctgtaatagtaagattgtctcatacgagctgctaaaggaggactagtttcaattagctgaaactccggattctgctgtctcggaggttgcatctgcattactgctccagtcggtggtcctggagctctcatgaaatctgacctaaactccggttgattcggaggtggaggataagcttgtttcgcttgtgacatcggtggagctcctcctcctcctccggcgtgagcaccgattgagtgaaaagttctcgactctttctctttcttcttcgtcggcttcaacgtctccatgttattaatctcatcttcaaactgctcgtagtgattctgattctgattctgattttgaaattgaaactcctgagattcgaatctcttatcttctttcatcactttctcagcaaaatccggcggaggagagacgaaatcgccgccgtcgataggagcggcgtagattctcaaagcgatatcacctttaatgttagaaaacaaacctcgtttatcaagaggatatctctgaacaccggattcagattccgataacggaacaaccgcaccggcaattttaacacggccgagaaacttcccaggctgattatcacggcggtcatcgtaaacagtgacgtcgacagtcttgttattcaaacgcttcaagtcaccgacgttaaaaaccaacttctcgttccactgagggtttagatctttaaaccgcgtttgcgttctctgacgctgttcgtcgaattcaacttctacgaaaggactcgctgagccttgtccgtcttttggcatcaaatcgctagcgtcaacgatttctacaactagtttattcatattcggataaacttagaaattttgtttgaagcggttgtgagagagaaaagttccggcgagtaagattaattttaaaagtaagagattgtgaagtaaagagaagaaagatgaactaagaagagaggagaagaaagaagaagaagaagaagaacatcttctttttgtttcgaggagtgttaagaggagtaaaactcggggaacacagagaggtcaagaagaagacgtcattttagtcaaattttatagatataatagttttataatatggttgtaagaaatagagagaaatgaaattatcaagttgaattgttttgttattatactcaatgaatatttttgttgaatattcttgattattgctttttaacttatgaatcatttggtttactttttcgaatattgtattcgtcggtgatttcaccaaatattcgtacgtatagttgatggagaataaattaaactttgatgatttagctttttttttcaaatgaggagaaaaatgtaagggaaaaaaagagagaattgggtgagtgaggagtagggtcaaaagagacgtaccatcgttgtctttggaggacgaacgtggtggtggccatttgtctgctttgtttgtttatatgctaacataattagaaagtggactaatttcgtcgttttaatttggtttaattattaaacaaccacaatgaatacgacaatgaaatatatatatatatataattgttttattgcaatgtgaaatcgatcgttaccatcatgtgatctaaaatatataggcaatcatgtcaaatatcatgaaattacaaagcttaaatcatttcggttcatacattttaaaactttttttcatggctgtatgtcactaagaaaaaaaagttaagacacatttaatggtaagtatagttgaaaggtacatttagtttgaaaagtggttaatgtttgccattgttagttttggatcgacttttttgttttgaagttagaagtcacatttcttacatactgttttaatcaatgttaatactactacattcattattcaattcaagtttgtacattaacaaaatatctatctgaattattagtcactcgaccaatgtactgtttggtttcataaattaactgaacaacgtcaattaagattctgttgtttgttcggtgaatgaggttacaaatctatattgaaccatcgatgtctgaccacatgagatgttaatttttagcgttattggtttaatagtttgctaatttgcttcattgtgttagatcgagttaaagaatgttaatttatgttcgtattgattaattgtgaggttaaattaaggtgaagtgggtttaggttggttaagagaccagaggaatgtgtaaagaaggcaaacgttactcattcaaaagattactcattccattaacgaaaatgaaaacgttgaatttcaattatatatttaagcgtcttgaatattattttcttccatgagagaacaaaaaaaaagatagagagacttttattgattggatctctcgttttcaaggaaatcggtgttaccccatcatgaaatctacagtacagcttgtcatgtccttaccctaaaaagtgaatctctttttttgttacatcaccaattgtttcctaactttcatatgggtggatagattacatatttttcttttaacctacgattgatacatttaaaaacatattaggtttgataattcatatgttggatgtgtgtatttgattattattttctttctaaatagaatcgtattcaattttttatacttacaaattacttcgaagtaatcgttaatgtggaagtactaattatattgatatcattaattaaagtggacgttccgtggagactacggacaagcgttgatcgtttgtttgttagagacttaaaaaaatatttacttaaaagacatcggtgtttgagataatctagtcaaatacaacaatcttgttctcatctcctcaggttttgtcggcagttttcttttaggtcctatatatatttcatggttaaacgtttcatttaatcaatctagtttttattagtacaagattacggctactctcatctacttctctatactatatctctctcctttttttcgcatgttatcatttcaacgatggcactgagagaacctaaccggtttaacattattacattaccaccatcaatcaccatcgaaggtggccggttttcacaactttctagattatcggccgagtccaaaggtttattgtcttcaaaattatgggatcaatgattttaagttaacttttgatattttatagttttcaagattcattatttgattttttcttgcgtaaaactcaaaattctaaagtatttgtgttacaccttagattttgttttatataatgttagcatgaaattccattgtagttccattatagacaaaatttcaaaaaatttaacactagtatttaaggttatcgaaggagtatcgaattatagcaaacttttatcctgcttttatctaaacaatttttgacaaataaataaatcatttttttttttgatcaagatcgaacacgttttactttaaactaataaaatcttatagttttaataatatcaatttctgctgttttattaaataaaaaggatatttgtccggtaataaataaagatcgctacccacttcttctttgtttggtgttttgcttttaaagtcaacaatgttctccttcggagctaaggttcaataattttatatcatttaatttttcatttcacttaacttattttagtggacacaacttttttgccaccataagtcccttcctatatatttctatgaagcatccgctcgttaaagtgtatttttgaagacgtttccacgtaatttgtggcacgcagcgatcgttgatttttcatctaagtttttgtatccgaacacttctgacatgaattgattcaaattttgtatcacttcatcaattcttgcaaacttttcagtccaaaagctattttcacggtcacggtcgagtagtaaaataatttcacggttactactagtctactagataagaaattaaactaaaagaagtaataagccgaaactttagtagagtggtttctcttctgcaactctgcatcccccttgattggcacaaacttcgaccatacgtaaatgagattaatatatgggcctatgagagagagaagaaaaacaaaaaaaaaaactaaatgtagtaataaataaaatgaataaatgatatttaattttgttaggaaagtttggtagtaactcacaaagtggtcatgttctagcgtgaaaccaaacacgtggattggtcggagatgtctgaattcacagtgttagtagttagggtaacatccgagaaaagtaattccaaagcaaagaatgttgttgaatacttccgattttagtaactgcgtttccaactctttcgtccttgcttaactcctccatgtcaagatatcaaccaattttggatccatttctttgtttaccgtcaaatgcaccatatcttaattaagcatatagaaatacggatatatttaccgtatatgtgaaccggtttggcaatgagttgtttaaactatattactttgtaatgtttcttttaatactgtcattagaatttcaaacttccaaaaaatagattttggagtattatcgtgatccaaggaaaagtatcaagttgctcttagctgttcgtagcgtaatctcctctgatccctctcgcttatatttgtatggttctcgatgccttttatgtttttatttttttaaactactgtttttttttaaagttcatttatcgataaataattgaaataaacgatcgtgggtttgatcgtctttctttttcttctttttattcttaccttttaatcgtcctttcgctttcataaaaaatgatagaaaatatggctctctaaattttaaaaagaacttatgcgctgcattttgttacatcgtctgtaatgtagttggtgtaaggcacgggtcagttctcaataatcgtccaatgatgttaaaaaacaataattgtaatcaccaatacaataatgccgctaaagttgcagagaagccttaatgttcatatcaaataaaacatttgtcgtttggaaaaacacaattaacaggcgcatatatataggaaatattctgaaaaagaaaagacagagatatgtttgtgttagtgtacgtatatatgtgagtgttgttgtggggaatctgcaaaggaagatacaaggtggctgctttatttttttctgccttttgttttgttgtcgaagtgcctcaaagccacatgtaatcccacatgcctcctacgtccttcttttttgtttctttgattacatatctcatctatttttatcgcatattataacattgagattcacattcaaaatttatgatcaaagtgatcagtagatgcatatgtttaattgttgttaacttacatgtagtatatacatatatatagttgaattcgtaaaactacatgaaatcaagacaaagtattagccattttttttgtttattagttttagcttttttaatcaaaaagtgatatcttaattttgttagcttttctaaaaaaacacttcaaaagaaaactaattttgttcaacatttcttattataaacaaacaaactataaattgtttgaatttgggtttagaaccaaaaactaaaattaatttatatgactacatccgtttaaactaatagaaaaactcaaatcagaaaaagtgatatgtggtgatttatactctcttttagaaaggagattgaagctatcttgcatgcaatttctttcactttctgtgtcaacttttgccggccactcggcgaatattcctatttttacatctctactcctcttttaagttttaagcctttcagattctatccaaattccattacattcgtttttctacagttactattaaacctcgaaacctttctatttctggcttctttgattttcttaaagaatatttcatgatcgcagaaatgatgcatcttcacatccagaaatattgggcctacatgcgaaaaactaggcccattatcaagtttgcgcaccgcctcctagcgaagcagtgctgagtttacttttcttcctcgggtgacacgtataaatccacgtggcgacacgtgttaatcagcatggtaaaacactgaaagttcgttaaagatttgatgagcttaattaacaaaactagtcagttaagtatcaaacgagtcagcgacacgaagtaacatgtaaaaaatgacaaaactattggccttgtctcttgtgttgagtgcgttatttacagtgggccactgcacgggttctgaggatgacatcatcgtgagagacggccaccgtgttgttgtggtggagtacgacagagacggcgaaacaaacactagagtcttgatttcacctccggggaaagaagtagatcagaagagcagagacgaaggagaagtgtttggaaatgagaagagagaaacggcgtcgtctcttcccgaagaagaggagcgtgaacaccacgcgacgccaggggaacttatatgcgatgcaattggtaagtgtaagcacaagctggggactgtgttagggagagtcaaagatcgaacggctagtgatctttccgacgaaacgcctgaaatgacggtcgcacgtgaggcacttgaagtggaagagaaggtctcctggaaagcccgtgaagctaggggaaaggtaaacgagagggccacaaagaaggctcatagggtccaaaaagttttggagaaggtacagatcgcggtgcgggggataggaacggtggttgcgacggcgctggggctgacgaagatcgggagtgtggtgggaattgtcgggatcgcggcggcgtatgggatgtgcgtgtgggtgacgtttgtgtcgggctacgtgttggcttcggttcttggggagcagcaattcggtgtggtgcagagcaagatgtatccggtgtacttcaaggcagtctctgtagggattttggttgggttgttaggacacgtcataggccgacgccggaaggtttttaccgatgcggtggatatgtggcaatccgttaacctcttgtcctctatcttgatggtcgaagctaatgcgtcatttgtttacacacgagccaccaaggttatttgccactcccacttctatttttgtaagatagaagatatagattctgaatctcctataatttggtctatatggcgttggttgtttgtttgtttacgcttagatttagtgtgtcttactatattcttccaattttaatatgcatatatactatgaaattgtaattatcccttgtttctttaaaccttttttggcaaggaacaaatcttttttttgttttgttaaaggcaaggaacaaatcttaggtcgtccaaatctttgtaacacctaaactttcattatatgatattaactttcttagcaaaaaaaaaaaaaatgcatattaagaccggattcaccctagacattttctgcaaaactattttttaaaaagtaagtttttaaaattttcaagaaatgaaaatgtcatatttcagtgtaatatttttatttttaggatgaaactcttacgtttggagttcaaaataaagtaataaccaaatagtcttactcgatgatgaaatttcccaaatatttcataaactttaaaatcaattttttttttttttttttaaacaacccttccctaaatacgggatctggacaatatttggggtttatatgtgagtaaaacataaatatatatatatatatatatatatatatatatatatattttcaggtgtgagtgaacctcttaagttaatgcatcgtaatatttatttttggttgtaaaacaggccatgtttgagctgataaaagctgaaaaggaagatggaagaggatttgacacgtcagaccagtcacagtctagtgaatctgccggtcgaaccagaggaaagaagaaggttacagagaagacggatgaggatgtggttaagcagagactgacaaagctgagcgagaggatgcgtaagttaaatgcgtactcttcgcggctaaatttacttactctcatgtctctcacttggcactttgtgtaccttggctaccgacttagccttacttgttgagggatcaagccactgatactttagttgttttttgtttgtatctggtttagtgttttgtagttctctttcttcttttttcaaggttgagtaaattaaagaaaattaactttctatagagggaatggtttttgctttacagcgttacacataatgagaattgagtagaatgaataaggaagagtagaatccgaggcaggttaataggtacgtgggcatgagtcttagtagcttcgctctcatggatatattgatgtcggaggcaatggcagctagactctaagcaaccgagttgtgaagccgtgagatttcttcttacatatgaagtatatcaaggcttgtatttatgagagctatagtgatcactttgacattatccgagaacataatgttagcacggcctctggagtgaataattgtataatcgcggaataggaatttataatgagtatctagtttgcttatttaattatgtcatttttcactatgatttttattctacaaattttttattctgtaatttattttattatgtggtgttacgaatcgaagctattgtgatgcttatttcaaacaaattcattggagccattgtgatatttatttcacacaaaattcaagatttgtcgtctacatgtattgaatataccttgtgagattgaaaaaagagtgtaatggaagaaaactcttaataagtaaatctaacactttggattcttggttttgtttttagtgcaattggagttgccttaaacttcagtatggcactacaatattcgccttacttataaatatctaagccaaatacatgaaatctcaacctcctcattaaattaaaattaaaacaaaaataataatttttactgtaattcatttcattataaatcatagggtgtcaaaatgggtaacccaactcaactcaactcataatcaaatgagtttaaaattaaatgagttatgggttgacccaactcattttgttaaatgggttggatcaacccataactcatttaatttgatgggttgagttgttaaatgggttaacccatttaagtaataatttaattaattattattataaaacaataataaataattatcattattaataattatcattattaataattatcattaaacttaagatatttacggattccactttttacaggtttacgtttttggtaccgaaaatcacggatttacgtttttggcgggaaaattataggtttttacgtttttggccggaaaatgatgggtttacgtttttggctggaaaatttcgggtttaagcttattggcggaaaaatctcgggtttacgtttttggcgaaaaataacggatttacgtttttggcgggaaaatctcgggtttacgtttttggcggaaaaatctcgggtttacgtttttggcgaaaaataacggatttacgtttttggcgggaaaatctcggatttacgtttttggcgggaaaatcataggtttacgtttttggctgaaaaatcacgggtttacgtttttgacggaaaaatcatgggtttacgttttgggcgaaaaaataaaggatttacgtttttggcggaaaaatctcgggtttacgtttctggcgggaaaatcacgggtttacgtttttggcgggaaaatcacggggttacatttttggcggaaaaatcacgggtttacgtttttggtgggaaaattacgggtttacgtttttggcgggaaaattacgggtttacgtttttggcgggaaaattatggatttacgtttttggcgggaaaatcacgggtttacgtttttggcgggaaaatcacgggtttatgttttttggtggaaaaattacgagtttattttttctcaattgcatcgcttgtatatttaagaaatttggaaaaatattaattttattaaattaggttagatgtgttggttaaacttaaattggcattggtttagagattttagttggtttaattcaattttacaaaatttgatgggttaattggataaaccattgaaaccattaaccattataacccaactcattttactcatcaaaccaattgactcatcagcccatttgactcatcaactcatttgagtcaaaattttcaactcattagggttcatgggttgagttgagttgagttgactcatgaattttgacccattttgacacccttaataaatcatatggattaaagaatataaggtcatgcgatttaatataataataataatggaaatcaatgttataaatagatctaagtaaaacattttgttttaatagtgttaaaatttagataaatatatataaattgttaaaagacataaaatttacaactgtcgcctttctacaagttgtaaactatgaataaataatttaaacagaaaggtaattgctttatgacaaaaacaattatgaaatagttgataaaaaaaattatttacataaaaacatttatcctttctggccaaacaattaattaagactgttgcaaattaaaataaaatgtaatcaataataatttgacagttacgtagacataaattatagaaattaattaatttaatatgtttgatttattttaaacaaactaagacagatatgtgacattttcaataattacaaatattaattttgaatttgagtaatttagatttttaaaattgaacgatataatagagtttaatacggtaaattttttgcatcaaagttgaaaacagacatatatatcatttgtgtatccaatgaaagattaggctttcagacacatttatgaatgatatacatgaaaatatattatttattgaattagctacaatcgattgtctattaatttctgaggtggatagaacatacaatagattgttgaaatagataattaagcggaaaaaaatagataattaagcgaaatagttttttcattcatcgactataagcgagatatatgaaaagcagataatcaagataatatgttttctttggtaaaaattaagccaaaagattttatgtaacatatagaacattaggctgactaaaaaagatagaaataaaattaaaacaacaaacatataagggagaaaatcttcctaaaatataaaacaaatctggtcataaactgaaaagatcatattacaccatacaaaggccaaagagattcatatcattctcctaatccttcctagagtgcaaaagcaaatcattgaacagaactttaaacaccatcaatcgaaaccatcttaatctgaaaataattaaaaaccatgaaataaaaatgataagaagttatttgaaaacatcatcctagtctctcttgatgattggtgctcctgcttcaacagccttgattctctctctgatggctttgagcttcttatcaaccacatcagctgctctggccagttcctccgaacaatcagtatcggtgattagatcattagacccagccattaacccaagtttcatcgcacgagtatgcatcttctccttctccaacttcttctctgcgtcttggatcatcttgttcatgagatccttctggtccatcatgtatttggtctgcttctctaccggaagttcgcttaacctgttaagaatagaacgaacctcgttaaggtttggccagagctcagggccatctttgtattcgctgtagatgatggcacaagcgggtaaaccacatagaacggtcagttcatagatcttcttcaataaaccatctttgcgttttctgaatgtaactcggcgagtggcgttgtcagaaatcaattggtgtgtaacttttcttcttcccatggtgaaaaaaaaaaatgaagaagagaagaggattttgggtggttttagggactagatgggtaaaatgttatatagagagtttctaactttgattttggctaggtccacaaaagacgtttcatcaaattatagaaaggtattatttaaatattaaaaagcaaattatagaaaggtatttttaaatgtaaaaagcaaattataggaaggctgtaacagaaaaatacatataagatttaagggaaaatatagatataaaagctttctaaataagaagatttatatcaatttattttcattttattagttgtcttgtgtttgttagtctaatgaacctgtaaaaagaggaaggtaatatttgcctattaatgtccctatatatgttttaccatataaacaagtttgaactttttttttcttacactagaccaatcagaaagaggatatgatgagttgtatatttgtaatgttgtagacatgcattttctttacataattttattatactactgacaacaagaaattaatttatcctacatgtcagttaaacattataattggtaatcacagaagcctatgcgtggacaaaaaaaaaaattgttgaaaaactctgtgagatttaaaaatatatacaaaaggcaatatgtaataaaagttatgtaattatcaataagagtatctctaattttgtctttttacatttaattacattgtattaaatattttcttccattattagtcataatagtctcattacattactgattttaacttttctagtgttaggcctttatgattatgatttttaaatttgactgacgtatgtaatttctgatggtaaaaatagttattcttaatagagttaatgagttatagtatatacacatgtaggaggtgtgcatatatgtaaatatttacaaattacaacacatcatattctcttctatttggtctattgtaaaaaaaagggtcaaactctctaatatggtagaacatatatgggaacagtaataggcaaaatatttagttacatagttattaactcattggctgttgtgattactaattgtaaagtactcgattggtatagttatatacacactgattcacttcacacatacgaggtgtgtgtgtgtaatattgtatactattaagtaattatgtaaaagctaaatatgtaagaataatgatcgaagcttagttaatgaattttatctaatatttgaaattataattcaactactttcctcaaagttttctagtgaaaacttattcaaaaaaaaaaaagaaaccactaattcagcaagagagaataaacaatgaatgggtagaccaaacaattgaaattccgtggacatatatgtaatgtaataggctaatagttagattaatgaacttaccgtctcacggaaggactccttaaagatctgcaagccactctgaccgatttggtagattcgttcgttttactgtcgtcaacaatgaaaaaaatataaaacaaacgttagatatctaaaaattaagggttactttcaacaacaacaacaaattttgaagagttagacagtaattttttgtgtggctattgatagagtctcatcgccaacactcatgttgaactattagaaacaatacatacaaacatcgtttcggtgccattgtcatcgtcgatgtcgctctaagaaacagatctaaaacttttagagaagatatggatatgtggtgaaatgagatgaatggtggataatcttatatttattttaaaattgggcggaaaaaactatattttcgtaactcttttttaagtaagcaatatttagttttttttttctttctattttgtgacgcgtgttataaactattaaatatgaaattaattttacatttaagattctgtaaaatgaggagatatgcatatatggtgaaattgaaatgtatggtatataatttatttatttgtttgtttagcaattgagcaaaaactattcttgtaacgctttttcatgtttgacatgttgatttttgttttttgtgacacgatttgtaatataatgatataattattagctttttaatattttttaaaatgatgaaatttactttgtcacacctaaaattgataaaattttgtatttttttagaaatctaatgttaaattatattaaaaaaaaatgcaaacgtttatacatcgaaatgcaaacttttcttaaaaccgaatcaaaatatggttcaatctatctatccttgactttgttgtgacgcaaaccacacttaaagtcctccaatgtatttttcttcccctttcattgttatggtgctcaagcggtttctcatatttctatcaatcagcttgacaaatttctcttttcttgatggtttttctccgtgtcttctatcattcctttcacgccaaatagagtgtatcgtgttttggaacacataccttagtataaaccttttcgttgtgtctcggtttttgttcgcaagctccctcatgatatcccgccatttttcagtgaacttgtttgctaggatcccccgtgccagctcctcccacacctttctcgaatacggacattggaagaacaagtgctctcttgtctccaaaggatcttggcataagacacagctttgatctgcattttggtttcattgaaacatcctttcccctgttgctaacctgtttttcatcattaaccaagtgacaaacccatactttggtgtagcgtacttgcaaaatttcgtacttgcaaaagaagtttctacgaacttaatgatgacggaaaaaaatacatatgaaacactctacataaactagtattaaaattctttatctgcatggttgttccttaagatagttagagatcatttttgggaagtaaataaatttccactaaaacttaagacattatttgaaacaccggtacaccggtatagtgccttctaaagaacattcaatgttcaagacttccaagtcataatattttttgtttgactttaaaagagaggaatccatgtaaatataatttattcgatgtttgtttgtatcttttcgtgagcttaaagatattacatatctcgatcctttcaatattgttaggtcatgatgccatttatcgatcttccgcatgtcacgccgttcagtctaggcgtgagtaccaatcctaactcctaaggatacgacatcatagcaacttagcaaccatgtatgataaaatggttcacacaaattatttaggcccgtatttcggccccttttgatttcgaaatattttgggcctataaaaaagagagaatgtttgagactcgagagtagtaagaaaggagagaacgcaggtttttttttttaaatgaatgatttcagagaacgcaagttatacacgtactacacgtataacacgttcctcagcaagacaacaatattatcttatcctcaagtggatgcaaataatataaagattttaatattcatttactacatcaacccccaagaacaaaaaatgtcttcaacaaacaaatctacaatcaacgaaacaaacgtaatcaccaaatatgaatcaatcagcagtatgctgaaaattgttgccaacataatttaagcatgcgactttcaaaaactcgaaaaattgtcaacaatttgagtaatccgaatttttctgtttctattacacatgaaaagacaaagtaacattcaaaatccatctcatctgcttggcgcgataacatatctgataagacttttttttgtgtgtccaaagctgataaggtttccaactttatcagaatcaatctatatttgactattcaaaactgaaatacaggagattatttctgctatgaacaaatattattttgactatttgactgatctatcacaaacatcttagccaaaaaataaaatttagtgaccacagcttgagaaaaaaggaaacattcgtgtagaatgtattttgctgatttgtggagagtatagtcttgtgctgtgaacaaatacattcatattaccctgcaacttgcaagtaaaaagaagttatgaagtgacagctaatcaggagataagaataactcgatcataaatacggaacaccgcaacaagcggaccaaagagcatgcaagtagccactagccaagtaggagaaagaaaaatatacaactacataataaatattccaaattaaaaacttattgatttagtctcagcatttatacaaatgtaaaatgtttatacaaatgttgtctattttttttattgttaacgaattttctaattttgaaataatagtgatcaattatgttgcttttgtgactaaaaagtaagtgaatttacaaataaaatgatacgtcaaaattatggttagctaagcctaagtctaagagcttgaatgatatatggatttttggtcgatccaacccaaaaacatctaaatattctatcaacatttatactcaaataacaattgtacatcactaagttacatgttttttataacttaattttaagaataagtcgtgatcaatcaaattacccttgatgttgacttttgattgaaaaaaatgacaaaaagaatttgctgatacaaaacaaaacatggcaaatatctagctcgtacgtgtatcacttgtccaaaggaagtatgcgtattattgcgtaataatacaataatatcggaaagttatataaaataaaaatacaaataagataatgtaattgcatacttattttttaacgcgtatagtacactcatctcaaatgccaataaatatacagatacacataaaagaaagactagaaagtttagttacccaaaatatcataaattaatgtaatcgtgttcactagttgcgcaagacaaagagatcttttagcttaaaaatctcatttaggcatttaccctttaaaaagttttcacagagattctcaacctctattggtgagagaaatgaagataccagaggaagaagttgcactcttagaagattacgttagcgattccgtcgaccaccgtggatttcccgccggaaaatcttccaccggcggatggagatcggcctggttcattataggtaaaacacatcagaaacaatccaattttttttctttttctagttaaacttctaagtcccagtcttaaatgatttgtttaggtgtggaagttgcagagaggtttgcttactttgggattgcctgcaatttgattacttacctcaccggacctctcggacaatcgacggcgaaagctgccgtgaacgtgaacacgtggtcgggaactgcctctatacttcctattttaggagctttcgtagctgacgcttatcttggtcgttaccgtactattgtcgtagcttccctcatctacatattggttagtacttttgtcttcttctagttaaaccggtttgatctttgtatgatttaaaccgggattttagctgaatttggaggattattattattacaggggctaggactattgacgttatcagcttctttaatcataatgggattatctaagcaacgtaacgacgcttctgctaaaccatctatttgggttaatacacttttcttctgttctctgtatttggtggcgatcggacaaggtggacacaaaccgtgtgttcaagcgtttggtgcggaccagtttgatgctgaagatccgaaggaggtaatagcgagagggtcgtttttcaattggtggttcttgagtttatctgcgggaataagcatatcgattattgtggtcgcttatgttcaagaaaatgttaattgggcgtttgggtttgggattccttgtttgtttatggttatggctcttgctatcttcttgctcgggaggaagatatatagatacccaaagggacatcatgaggaggttaatagtagtaacacttttgcaagaatcggtagagtttttgttattgcgttcaagaatcggaaactgaggttagaacattctagtttggaattggatcaaggtctattggaggatggtcagtccgagaaacgtaaagatcggctcaagtaagttcgaatattttgtgttttgttttagtcttttggcataattttgagtgtaaatttctttaccttgtgtgacaagtttcctagcaaaagcaatgatctcaagagaaggtgttgagccatgtagtggtagggacgtggatgacgcgaaggctttggtaaggcttattccgatatggatcacatacgtggtgagcacgattccgtacgctcagtacataactttcttcacgaagcaaggggtcacggtggacagaagaatcttaccgggagtagaaattccagcggcttctttattgtcattcgttggtgtatctattctcatctcagtgcccctatatgagcgtgtatttctcccgatagctaggaagattaccaaaaagccttttgggatcacaatgctccaaaggataggagctggaatggtgctttcagtcttcaatatgatgctcgctgcattagtagaatcaaaacggctaaaaatcgctagggaacacgggctagtggacaagccggacgtgaccgttccaatgtccatatggtggttcgtccctcagtatttgctactcgggatgatcgatctgttctctatggtgggaacacaagaattcttctacgaccaagtcccaacggagctaaggagcattggtctctcgctttctctgagtgcgatgggtctttcaagcttcttgagtggttttctcatcagtttgattgattgggctacgggaaaagacggctggttcaactctaacttgaaccgagcccatgtggattacttttattggttgctcgctgctttcacggccattgctttctttgcgttcttgttcatctccaagatgtatgtgtatcgtcggctagaccaagtctaagaattcagagtactagtttttttttttttttggtaagaagaattcagagtattacagtagaaactctataaattaataatggtgagaccatgaaattttattaatttatagtgatattaatttatcctctaaattaataaatattaatttatcgtataagttaataaatattaatttatagaaatatttacgtaaagtacaatactatattcttttaaaaatattttttaatgtaattttctatatgctttgttgtttgcatatataattatgttaggtttttattttaatttgacttttttaatttattttcgtcaagatttgtatctgtatatctacgacattaacgtgaacgtaaacgtaaacatgaaagttaatccagtttctctttacacaaatcataacaatgctttctcaaataaaagattttacaaaatcaactatgacggatcaaatacgcaaatagttatgtgagtacaacagagatcatatcagttgtattttaaaaagagttagtttgaacaaaaatttcatataaaaattagtcttaagatatatacttaagatctatgattattaatttataatattattgggactataattttacatagggattttaaaaaaattattatcttattattttatcgattttgattaatttttatattggcccaacttgggaccgacaaaatttattaatttatcgtgtttattaatttatcgagtattaatttatagagtctctactgtaattttgttgactttcatatcaaacttgtacgttaacatgtttatagtttgacttcttttttttttttcgttttatttccaaagtatatagaattggcaacttaaacataaggtagaggagcctaccaaaaaaaacatatctatcattgcatgggtttggattggatagcatttatttttggtttcacaacaccgatgggtccattgtttttaagatatttgcaaatattgaataattattttatcgtttttttttacaagaacatgcttttatgttgacataaatcagtgtgaccatctatctttaagtacgttgtttgtccaattcgtaaattgcaagcaaatcttatccttcttgaacgatttgctgaatgggccgaaagaaattgaagatttcgaaactggaggacaaaagaatttgaaactcaatcattacctattactccacttggagaaagcttggaccaactttggatcttgtggaaggaacaaagagcatatagtatatatcatgtgtacacgccatgtaccgatgatatacgtatttgaaagcgacgactatgttagataacttgtgactcttaattactactcaagcaaatattaaaaccatgtgttacacgaaatgggccaaagtgtcgggtcatttaatttcttacacaagggcagtgaggagtggttgagaaactaaaggcctaggagttatacgcgttaggcattcagctactacatattataagaaaataaagacatttttagtcttcatctaactatttcaaagaaagtaataacgagagaaattcacaatcaactttgtccttgggacactgacaaacacacagctaataaatcagaaaatattagttctgcgattgaaaaatatcttttgtccttttcactgttctatcaaactccttttaaaagaagtttaagcaaataacacgtataaagccaacgaagatttaatttaacaaatcaatcagttttttttgtcccgcatcgatttttggggtctggacgtaaacactaaacagtgtaagttatggtcgtgcacgtggaaaattgtttaccttaaaaagtagaaagaacgtgacgatagttgaacaacaacaaaaaaagaaagaaaaaagaacgtgacgacagcgtaacaatgagaaataattggatcaatgaatacactgaacggcctacctagattcattttataaagagaaagcaacagagatttcagaaaaagaaaaagcaaaagctaggttattcataattctttttttttgtcgcaaaggtagattacttgttatattagatattagcacaattacaactgacttgcagaaagtcataccaaaaaatgagaccaaggggcacaagaaacacccactaaaaggtcaaccctgagaatccaaaaattaacagggcaacaaaagaataaacctcccaaaaagcaaggagccaaaaagcagaaagtcttcagtccacagaggttagaactctctcatccctaaagacaccaagaagccaagcaggaaaacttacggccacgtacgattgaagcctacactccttagtaacactttgggcaatgagattagcacctctattcgaagacaccgattcaagcaccactttccaaactgcaataccatttaaagctaacaagatctccgaagactgaaacctaaaggaaggccaagcttgcggcctgtttatcaccccaacaagcaccgcagcttccacaccaaaaaccaccctattcacatgatgactaaccatactctcaacagcccaaacaatgcttagaaattgagcctccaaaaaggaggaaatattggaaaaggctcttctactgtgcatcaagacattgcctctgtcattcctcaaaacccaagcaacccctgcaagtctatttcttctagaccaagacagaccaacattacacttcacccaatcagtaggaggaggcagccatctaacaacaggagacacattcctaggggaaaaaacctgctgatcactttgacccacttcagccctcctttctttttctacaacctgagcagcaaaccaatcctccacatctttcctcactttcaatatagtttcaagaacagtaaatctttttccttcaaaaaagaaaagattcctgtttttccaaatcctccaaatgatccaaggaaagcttcttctaagttcaaccggccacttgaggttatctctgtttatcaaaaaatggtataaatttgcataaacagagccacattcgaaacctaacaacggtacatggatattagacattgcccacacttgtcttggaaaagagcagctaaaaagaacatgctgaatagactccccttcacagccacaagtttgacatctagagtccaacttcattcctctataagacaaaagatccaccacaggaatggccccactaagcactttccacagaaaaaccttaatttttggttcagtctgaagcttccaaacctgagtcttcaagtcattaagagacggttgcatcatagcctctatagccacttgtcctaaattttgattagaagccaaccaataccccaacttgactgagtagtcaccactcttattgtgcttccaaatccagaaatcatctaaagacaccaccggtctattctcccttattttaactacatcatccgggaaaaactgctcctccaacttatcaagtctccaatctcttttctcatagtcaataaggtcagaaaccaggaggtcaacattgatgattggatttttaatccagggagctctcagtccattatcatcaagccaataatcaatccagaccctaatactcttcccattcccaactctttttacaagacctctgcacaaaagatctctcccatgaaggatgcttctccaaccaaaggaaggtctagaacccacatcactatctaaaaactcaccaacaggaaaatagcggctctttataagtcttgcaaagaggcaatccgggaactgaagcaatctccaagcctgctttgccaaaagcgcctgattaaaaaggccaatatctctaaacccaagaccaccatgctccttaggtaaacacaatttctcccagctcaaccaatgtattttcctttgatgatcattagcgctccaccagaaatctgccatagcactggccagattagtgcaagtagtcttcggtaatttgaaacatgacatggcaaaaaccggcattgccattgccacagccttgagcataatttcctttccaccctgagacaaagatttagaaaaccagctggacagtttggactttagtctaaccttgatataatccaacatctcaatcttggaaccactgaaacactcaggtaatcccagataagtgctagcgtctccttctttaaaaattcccaaacaagtctgaatttcagcttttttcacagtctcaaccttagaaccaaaagtaatcgaggactttgctagatttatgatctgccctgtagctgcaccataagctcccaaaatactttgaagaaccacaacctcatccttattagccttacaaataaaaaggctgtcatccgcaaaaagtaagtgatggatgatcggcttctgagaattggatacctgaaagactaccaacaagttgagcccgattcaggagatgagttagcccttctgtgcacatcacaaaaagaaaaggtgagagaggatccccttgtctaagccctctctcagggataatcataccaaaaggagtgtcattaatgagaacagcataggtgacagaggaaacacacatcatcatccaattcacccaagtgaggtggaatcccaaagctaaaaggagggctctcagatagcaccactcgactctgtcgtatgccttagacatgtcagttttgaccgccatatactccttcgcaaacttatccatagtatgcagactatgaacaatctcatgagcaaccaagatattgtcggagataagtctctcagccacaaaggcagtctgagtatcagatacaatcagagacaacaggggcttcaatctcttgaccaaaaccttagagacaatcttgtataaaaccgagcaaaggctgatgggtcttaaatcagacatgagaactggatgagttacctttggaatcaaacagaggtgagtataattccattcagtaggcatcacacctgtttgaaagaccattttaacctctcttgtcacatgatctcccacgatcgcccaataatgttgaaagaacagaccagacataccatcagagccaggagcactagagggatcgatagagaaaacagcatccttgatttcctctgaagaaactggacgaataagcctctcattcatctgatcaatgacttttgcttcgaacccaacaaaccagtgagagaaaccagaaggattagaagatttgaacaggttggagaagtaagcagtcgctacctcaccccttagcaccatcagagaaatgctcacttccattgatatccagaagtttgtcaatccgattcttccccctattattcttcacagaattgtgaaagaacagagtattacgatcaccacaatgcatccaagtttctctactcttttgactccaaaaaacctcttcctcccagtacgccttagcaagctccttcttaaggtagaaaatttgatagaaccttggagaaagagccgattgttcctcctctagagctttttcaatcttgtgaatgttttcttgggagttcagattattatctctcttccacccactgagagcctctacacttcttaagtctgtcactaacacaaaggtcattaacaacattcagggggtcccacgactgcaagatggtttcctcaactctaggcttatgcagaagccttttgtcaaaccgaaactgccctttataagaatcttgagaagccatcagtttaagcaaaacaggacgatgatcagaaccacgcatctccaaaaattgttgattagaagcagggaaattcttcagccattccttattaccaaaagctctatccaatctgctctggatccacaagtcataccttctccctgcccaagtaaatctattaccagtactcgccaactccaccatcccgcaagcttcatgcatttccttgaaaggtttaaagtaagactcacatctcttcgggccaccaatcttttcctcattatgcagaatttcattgaaatcacccaccatacaccatctttctctccttccaactccaattatgcttagtctttcccaaacaatctttctttttttaaagtcggggtcaccatacacacaagacagaaaaaagttcaccgcaccaaactgcacttgaagatcaatcaaattcttatcagcaaacttgatatcgatcttaacactttccttccaaaagatagctaaaccaccacaccttccaacaggctctatagaatacactctatcataacctaaaaatgtatgcaaatcaacaagaacatctctactattcatagtctccatcagaaacaacatctcagggaaatactttttacgcaattccttaagacgagggaaagccaagtcttgagaccgtcccaagccttgacaattccagctgataatgctcattgcgcggtgggcaatcccccctttgggatcacctctaagggattgagttttgtggattttgcagtgctagttccctcatcaactgcctttcgtttctctttagcaccatgactgagacctttcttcaactcttgtgatgcagcaagacctgaagccggtaaaggattagctttcctctgattcttagttggcctttttcttgcctttgctttcttaggcttaattccggataagctaggttcaaagaacccagctttaaaaaccgccgaattatcctgaaaaggctgagacaaagcaagaaaattggcatccacatcaaaggcattagggccagcctgatttaaattccacgaatgtgaagaacttgaagtcccaccctcttcacgcagattgggctgagctaatacttttccaacattcctcaagttaatcccttcatcagcatagctaaagaaaactcctttgtctttagacaagtccagatgaaccacaggggctggttcatgactcagcattgactttctcagaactggatccttctctacttctccaacagactttttcaccttgttaatcctcagcagcttctcagtttcatcagagaccaaaagatattgtctcatcccttctaaaacatctgcagcgattctcggtctgcccgtcaacttgtcaatcccaacttgatcctctcttaaaaccccaaacaaagggtctgattctttcaaaacagggggtttcttaggtctctccactggtttaccagagcgtcttgccaaagcagcatcttgtcttgcttttatgaggacagggcaaacatctctctcatgagtcaaacgttgacactcatagcatctcttttgaacccgctcatactgaaaacgcacttctagtttatacttaaacaataatacgtcaaaataaaattttcaatttttagtttcccttaagtttattcataaaagtgtttatacttattatacatgtaatgtgacgtttttaactgaataacagttaaagggtcttacgacggttagttaaattataaacaattttaagttatacactatttaattactttctcgactcatagtactttctttattatacaggaattgtggtatataatgcaactaattttaacaaaaataaaataaaatcatgatagcacaaaatagtaatctaaaatcattatctgaattaacacgatttaaaaaggattattacactaagaattaataacaaacaattactaaaaaaaaaacttttagcttatttaaaagatgaaaattagcttgtatggatcgtgtcatttaaatttagtagctaataaaccctaatagttgacttttgatttctgtaagataaaataacgaaaacagtgatatatagacatgaaaccgcatgtttattggttgttagttgtaactttagattatgtaatcatattagaggattaaaatatagctcgtgaatcacgtccatttaaaattatgatagcagctgtacaaatcataaaaataatacagctcctcataatcaatcactcatctgactagactatataaaaagaatatatacatatcacaatctatttatcgtgttcattattcacgcagcaaatatagctttaatatcaaaactaaatataaataaatacatatagcttaaaatccagtttcctccgacaagaaaatggcgatagccgaagaagaagctgcacttatagaagattccgtcagcgactccgttgaccaccgtggacttcctgccggaaaatcttccaccggcggatggagatccgcctggtacattataggtaaagaacagtttttgtgatttgtaaattgtctcataaaccattattttttaaacattttattttatttttttggtgtggttttttaggtgtggaagttggagaaagatttgcttactttgggattggttccaacttaattacttacctcaccggacctctcggacaatcaacagccaccgccgccgtgaacgtgaacacatggtcaggaaccgcctcgatacttcctgttttaggagctttcattgcagatgcttatcttggtcgttaccgtaccattgttgttgcttccctcatctacatacttgtaataacgttcttgtctcttacttcaatatcttgataacattttagaattttcactaaaatttgaggggatttttgttacagggactaggactattgaccttatcctctatcttaatcctaatgggattatcggagcaacgtcaacataaccgcaacgcttctgctaaaccgtttttttgggtgaatatattattcttttgttctctgtatttggtggcgatcggacaaggcggacacaagccatgtgttcaagcttttggtgctgaccagtttgatgtgggagatccaaaggagagaataagtagaggatcgtttttcaattggtggttcttgagtttatccgcgggaataactttgtcgattattgtggtggtttacgttcaagacaatgttaattgggctcttgggtttggtatcccttgtttgttcatggtcatggctcttgctctcttcttgtttggaagaaaaacttatagatatccaagaggagatcgcgaggggaagaataacgcttttgcgaggatcggtagagttttcttggtggcgttcaagaatcggaaactgaagttaacacattcaggtcagttggaagttggttcgtacaagaaatgtaaaggacaacttgagtaagttcacaagtcttgaatcttttgagttttggtttattgtgacttgagtataaagttttctttatttttactaaggttcctagcaaaagcgttgctaccaggagaaggaggtgtagagccatgtagtagtagggacgtggaagacgcgatggctttggttaggcttattccgatatggatcacatcagtagtgagcacgattccttacgctcaatatgctactttcttcacaaaacaaggcgttacggtggacagaaaaatcttgccgggtttcgagatccctccggcttcttttcaagcactcatcggtttatcgattttcatctcagttccaacttatgagcgtgttttccttccgttagctagattgattaccaaaaagccttcagggatcacaatgctacaaagaataggagctggaatggtgctctccagcttaaatatggtggttgcagcgttagtagaaatgaaacggctcgagacggctaaagaacatgggcttgtggatagaccggacgcaaccatcccaatgtccatatggtggttcgttcctcagtatttactacttgggatgatcgatgtattctcactagtggggacacaagaattcttctacgaccaggtccccacggagctaaggagtattggtcttgcactttctttgagtgcgatgggtcttgcgagcttcttgagcggttttctaatcactgtgattaattgggctaccgggaaaaatggcggcgatagctggttcaatactaacctgaacagagcccatgtcgattatttttactggttgcttgctgctttcactgccattgggttcttggcgtttttgttattatccaggctgtatgtgtatcgccgtgtagatcaagtctaagaaaaaaaaagtcaacgtgtatctactttcatatcatatttggttattcataacgtggttagaaactctttaacctattttttattcaacaattttagtttattaagatgaaatctctggaagttagcttggaacacagctggataatatacacgataaggaaaagactatacaccaaacatgaaaaaatatacatttactggtgttgagccatgtaatggtagggacgtgaaagatgcgatggatttggcaaaagagccacatgatcaacacgatataccagacatgaaaagtatacatttgcacagtaatgatttgtgtattcaaaaattacacaagagagggaaagagagtacctgcgatatttaaacgagagattttgggtttaactggtgtcgagccttttagagacgtaagactttgcaacatacaagtaggaggctaagccaatgaagctgagacaagcgagtaaccagtaaaagtaatcgagatgagcttggttcaggttgtttgcgaaccaactcgcttgaccagattggcttgtcgctttctcaatgattgatatcatgaaactgctgagaaagttaccaataccgaatatgctcaagtacagagccaaccccacactcctcagctcattcgggacttggtcatagaagaactcttgaagacccaccattgcgaaaacatccgtgataccaaagagaacatactgaggaactaaccaccacacactcattggaaccgtagcgtcaggtgaatctacgagcccgtaatccgcagcagttttaagccttttcatctccactagagcggctacaaccatagcaaggaaagagaggaatatgcctgtgccgattctctgaagcattgtgattccgcctggtttatgtgtaaatgatcttgcaattgggattagtacacggtcgtagattgggatgaagatgactatagagaggctgatgaaggactggagggtagccggagagatcttgtaaccaggtgtgattgatctctccattgtagctccttgtttggtgaagaaagttggagactgcgcaaacacaaccgcataaaccaagcatgttaaccatatcggagctaacctaagcactgattttgcttcttcaagttcatctatactacaagaaccattctttgcgaccagagctttgttgagaaaactgcagttgtaacaagaaccaatatgcttactataagtatttatgtgataacaaaaaaaatcagaggagacagaaagctgtcttacctaaattgctgagagctactgcaagacacaagaccaagtctctcctctgcagcagctacatctaaagctgaaacactccagttctttacagccgctacataaacatttccaatcctcacaaaaggactttgatcttctcttcgaatactgaaccgataagtgcaggttccaagcaagagaacaaccaaagcaactaccatagcaatgcatggaataccaaagcctaacgcccaacttagattatcttggatataattcaacacccatagagttgttaacgtcccaaagcacataccaaaataccaccaattaaagaaagaactctttgctttgcactcttcaggttccttttcatcaaactgatccgctccaaaagcctgaacacacggcttgtgaccaccttgagctaaagccactagatacaatgcactaaagaatgtaattacttgaaatcgaggagagcatgacgagagtagattcgaaactttgcagtctgaaggaatcattgcagataaagtcaatacacccagcccctgttgttcaatcaaatcactatacaacttcagactcatctctagagttgatgaatctatatagagaacagaacatttgagagagagagagagagagagagagagagagagagagagagagagagagagagagagagcttcgtaccactatatagagagcagaggcggcgaggattgtccggaaacgacctagaaacgagtcagcgacaaaagcaccaaggagaggaagcaacgacgccgttccagaccaagcgttcacgttagccgccgcagccgccgtcgattgtcccagtggtccggtcaaatacgttatcagattcgacgatatcccatagtaagcaaatcgctcagcaacctccacacctaccgtcggaaaacaaaacataaccagaaattaaaaactccggcgaagtaaaaaaaggagaacactgtaagattacgaaattggcgggaaaatcggcgaaatctcagggaattaccgatgatgaatccggcggatctccagccaccggaggaagatttgacggcgggtttgttcctgtagtcgacggtgacagcgagaagtggagtcccagcttcatcaacagcgccggagatcgacatttcagttaatcggcttctccaaatgaagaagtaaatatctgaagaagtcttttgtatcaatcaatcaaaccaaatttgatttcttgttttggtgtgaatgaagaaaacaaaaatagagatgctttggtgttgttactcgcatcactgtggaacatttatcatttttatttatggtcgtatttgtttccttataaacaaaagtcattggcaattgcattgaatatagagataacattttggggacgagagaatcctttcctcttttagttcgtggtacttagtttttttttgctctttttgaacataatcttttgtaataaatagccctttgtaacacgaaattagtggaagttttctccactagtaacatagataatactacaatgacatgttcaagtttcaacgatatcatcaacgttaacctcggtaatatttatagggtgaagaagatcatcactttaaaatcagcgacgttcgtgaaatatttattgcattctcacaattccgccggagaataattctagaaatttttatcaccaaaatcatcatgcttaagtaagagagagatagacaaaaaaattgtaacaagtggaattatctaacacttggctatgaagttttgcgatgcgatggccacttcataatactgtatcaataaaggtttggtaacggccaaccataaaacgagtcgagtcaaagcttctaaagtttgactctagagcgagtaaatcttcataggagaaactgctattctctcgttatctttctcctacaaacaatatatttttttctctaatttaagcataacacgttgttattagggagcaattgcctttactgattgctatatcactagaagaaaacaatcttaatttttgacgaccatggtcagaaaaatacctacaaaaatttgtgaccaatttatttccaacttttgatgaaataaacattagtcgttaccaaattaagttgttggacattattcggaaccttcatcggaaatttgttgaaacgtcattagaaatgtgttagaagttcataaactttacacatgtcgattaatggtaattttcgacaattttcatttcgaacaaacttaagtgttgtttccgacaatatttccgaatatgatttctctttttagttgagttagttggagttgagaattctataatggtgtttttctaagaacctcatatattttctatgcatttctaattagtctaatttgtttgtactcctattatctgttaaacaattttgtatttttattctcaagttcttcgtttttctaccatttcaatatattttctcctttagtatgatttgtatgaaattttatttgctacttaactatttcctattattttaatttcttttattaacataacttcttatttcactcataatcttaatactgtgattttaaacctttttgtgtaaataatgtattgacgaaactagttaaacatagacatctcttatacaaaattaaaaatcccaataatggttgataatcattgctaaattgtacctggccatcaatcatttgttaagaaactagaacgacatagtatataatataactaacaattctttattggagaatcaaaagaaataaacacagctaaatccaatattttgttagtggagtatataataagacggcaccaccagcaaatgacacaccaaccaaacagctcggcctacttttagcttttgacaaattcaaagctacctgaaagaatataattaacagataagttctccgatcccacgagattatgctacctaacttttttagttacattcatatacattttcaagcagtggatcaattctagttctactatcttttatcttaaaatattacttcccctagtttaagaaatttgattatacacaatgaattggtcagcaaagctagtgatttggtatgggttttagacgttagcagcagtgcctgaccaagaaatattgacataataaaaaaaacaatacaattaatcagttattgaaacaaaagcaaaagagagtaaaatgcatatacaaaggaatgaaggggagttgaataaatttgcataattttagtgggtgtatttggttgacatgtaacatataattcatataaaatattgcgtttcaattagtaacatatgaaatgttttcttattgtaatggcccatatgaggagttgtaacgatgaggtgtgttgtgtaggcctacatgaatcaggctgcttattaaattaaactgtaatcctaatagttcttgtgacagctccaatctcatgaaatttcactgttaatatcaaatttaaaatatttaatttatattttatataataaagtaacaattgatttttattttcgttttgtttagattacaacgcatcaatacgggtccaaatatgtatacattattaatacgaaatcataagatgctttctttacgtgcgaagcagtctgttatatgtgtgtcatcctctcatttcatatggtattttactttttaaatgcttaatgtgtgaatcttctagtttttttgttttgcagcgaaatgaaaaagaattagtaacgaaaagactaatttataatatgtttatgcaataatatgctctctctttctctctatatacatatattcttacatgtcatattgtcatctaattaagaggatctcttaattattcgtttctgccggcaaaaaaaaaagaaaacaattagtcgtttccatgtaataatcctatgtgattggattgtgataaaatataatgatttcaatttcatgatctcatatctctgttatcaaaaagatttaattcaagaccacatatagaagatttctagaaagttttagtttagtgttgcccaacttgtgaaaaaactagaagtaatatctatgaacaatttgaataaaaggaaataggttgatttatttttaggaaaatttattagagtaacccatattttatacataatgacccaaaaggaatgctaaaaatatgagttatttgagtaataattatacctaaattatccttgttttcctttgcagagaaaaacaatattacagaaatgccattactatttaattccagcaaggcaataaaaccacatttatttacgaaaatgccatcgtcgtttttggtaaatctgtggctcttgttgcgacggatttgttatcgatcacagatttgttggtcaaccacagattttttacaacagacttgttttgtaccacagactttactgtgttatgttacgccagatttttttttttccggagattttttaaccgtgactgatttgtttcatatagtctccacagattttatttaaatttcaaaagtaagaatgttgaaaccaaatctgtcactgatttgttttccggaccacagatttttctttatggtggcaacagattttctatttgcacccaaaaatctgttgtgttataacagatttgttaacctcgaaaaatgttatataggcatgacagagttgttttgtgtaatcacagatttaattaacttgttaacaaatctggtgttttacaacagatttttgttaaaaaataaaattactacacagtcacataatgataacagatttgtttttagtgatgacagttttgtttttcagtgtcaaagcataacagatttactcatgtcaatgttatggccgatttgtttatgactagaataacctttttagtaataacagactttttttggcagatttatttttaaaatttcgaaattttttgttatatgagatttattagttagccctcaattaaattatttccggtttgattgtatgttaaatccggtttgactggatttttttttttttttttgaaaacgttacgacagacttttattagccgacagatttttctgaaatattaccatatttgagtcaaggaatattctcgtaacgcctagggttttcaatgaaaaaaactgccattgtcgttttcttttttcttctgtaacgcctaccaaatctaatttcaatacaatccattattcttctacctattcgagatcttagttgcttcatctttgatacaaattcgattcccttgtttattcgattctctctttggtatggatcaagtaattctcgtgtgtggtaaatgggtatatgagaaaacgagatggctttttgtggttgatagtacaaaaggttgccgtgtacttgaaggtaatagtcaaaccagttatgatgatttcatccaaatggtgtatgaggattacaatatcgagaatatcaaattgtatcaccacagaaaacagcccaccaaaacctactaatcctcataattcaatagtgataacatacaatctgccattcttaaacaatctacgacaatattactttaattgataaaaaataaaatgtggaaaatgatttacgagctacaacggattgataagaaatagacttttcggtgttactcgaaaacatgatcttaacttttcggtgtacaagaactggaaaacacgagcgaaaggctttttaattttacatactaaagttcttaacttttggtttgcccatttgcttagtacgttcctttacaagctatgacaacaattaatttaattgataagaaatagaaatgtggtttccataaccggatttctgagttttgttatttttacatttgtttatttatttttattagtaatttttttttttttaatcaaaatatagttttaatactgactgaggttaaatagtgttttaacttaaaatatgagtcataatagttagtcatcgattataggagtcacaatagttatttctattaagattagagtcagtctaagcaattttcacttatttttacgttggtgaacatgtttgtttacatgaacgagtaaaacttcatagtatcttaggaggtacgggacaacgacattttgtttttattaatattctcttaatcattaaaaaggataaacatgtttaacatagtacatgtcagtaaatgaaaacatagttaagtaagaaaattctacagatatttacaaatgtttattgaaaaaaaaagagagaagacaactctattcttggaacgattcaagttttgttttgtttaatctaaacgtacacttaggtgatgatacgataacatggtgtcatgatttgataagaaaaccactttagataatttattgaaagcctgattagctttataaacacacatatattcccccatcaaaatattctacttttccctcaaacaaacaaatattgatcgtactttgttcctttaatctcgaagttgtctttacgtaatatgaaaacataacataactctcttgatattaaatctaggtctagaactcatgcgaaccaagttttggaagagaataaaatgaacctaagaatatatcaaaagatcaaaaatatccaaagaatatgcaagagttagaagtgaatcggagatcaaaaagctgtgactgtgagtaaattagacaatatatcctttccttagagaagaaaattagtgtaacgaatctaaaatataaaaggaatatgaataagtaaaatattcaaaaaagttgctaaattagttaatgtttaaaattggtgaatccaaaattgagagaagcaaaagacggccgtttggagaaagagaaaatttgggaccctctactaagaaaagtatcttccaaattagctgtccaacagctccgaccagtctgttctcttttgctcttctcacacacacacaaacataacatctcctccattttctctcttctctctttttataagaactcttcttcttcttcttctctctcaattccatctctctctctctttctagttcttgttccctttcgaatcaagtgatcatggctcaagaagagatacagaaacctactgcctctgttccagtggttaaggaggaaactcctgccccggttaaggaggttgaggtgccggttactacggagaaagctgtggctgcgcctgctccggaagctacggaggagaaagttgtgtctgaggtggcggtgcctgaaacagaggtgacggcggtgaaagaggaggaggttgcgacgggaaaggagatcttgcaatcggagtcgtttaaggaggaaggctatttggcttctgaattacaggaagctgagaagaatgctttggctgagttaaaggagttggttagggaggctttgaacaagcgtgaattcaccgcgccaccgccaccaccagctccggtaaaggaagagaaagttgaggagaagaaaacagaggaaacagaggaaaagaaggaagaagttaaaacagaggaaaaatctcttgaggctgaaaccaaagaagaggagaaatctgctgctccggccaccgtagagaccaagaaagaagagatcttggccgctccggctccgatcgtcgcagagaccaagaaggaagagacaccagttgctcctgctccggtagagactaaaccggctgctccggtcgttgcagagacaaagaaggaagaaatattaccagctgctccggtcaccacagagaccaaggtggaagagaaagtcgttccagtagaaaccacaccggctgctccagtcaccacagagaccaaggaagaagagaaagccgctccggtcaccacagagaccaaggaggaagagaaagcagctccgggagagaccaagaaagaagagaaagcaaccgcctctactcaggtcaagagggcctcaaaatttattaaagatatatttgtctcagtcaccactagcgagaagaagaaggaagaagagaaaccagcagtagtaacaatcgagaaggctttcgcagctgatcaagaagaagaaacaaaaaccgttgaagcagtcgaagaatcaatcgtctccatcactcttccagagacagctgcatacgtagagccagaagaagtctcaatctggggaatcccacttctagaggacgaaagatccgacgtgatcctcctcaaattcctccgtgcacgtgacttcaaggtcaaagaagccttcacgatgctgaaaaacaccgtccaatggcgcaaagagaacaagatcgacgacctagtctcagaagatcttgaaggaagcgagtttgagaagttggtgttcactcacggtgtcgacaaacaaggacatgtcgtgatctatagctcgtacggtgagtttcagaacaaggagattttctcagataaagagaagcttagcaagtttctcaaatggaggattcagttccaagagaagtgtgtgaggtctcttgactttagccctgaggctaagtcatcgttcgtgttcgttagtgacttcaggaacgctcctggacttggtcagagagcattgtggcagttcattaaacgcgccgttaagcaattcgaagataactatccagagtttgtcgctaaagaggtaaagaaattagcattttgatcatgattacaacaagtttgaatctttgtatgaattgtggtgttattattttcagctgttcattaatgtcccatggtggtacattccttactacaaaacattcggaagtatcattacatcgccaaggacaaggagcaagatggtcctttctggtccatccaaatccgctgagaccattttcaagtaattatggttcaactataataataatacatcatataaaatgttaatcttcatacatgcagaagcttatatcctctgtttttggctgaaatagatacgtagctcctgaagtagtcccggttaagtatggtggactcagcaaagatagtccattcaccgttgaagatggagtcaccgaggccgtagttaaatcgacatctaaatataccattgatttgcctgctacagaggtatacattgttttttatgttatttttgcatttgcattatagtttaattttacattttatgtcatattttcaaatgacccccaattttagcattttctacttaatttatatttgttaatcttaaacgtaaatggtaaaccaaaacacagagagaagatttgatgattcgcgtttgtttatgcgctaagaattggtataatcatttttgcatgttaacataaacgtgaaaactagcgtttggcacaataaatggatggaacattctatttgaataaattggtataatcttgctagagattaatgatgtggtttgtgttgtttttgctacatagggttccacgctctcatgggagcttagggttttgggtgcggacgtgagctacggagctcaatttgagccaagcaatgaggcaagctacaccgtgattgtctctaagaaccggaaggtcggtttaactgatgaaccggtgataaccgattctttcaaggcaagtgaggcgggaaaggtcgtgatcacgattgacaaccaaacctttaagaagaagaaggtgctctacaggtccaaaacccaagcataagattatgtgtccgatctttgaatgaatgaagaaacaagaaagatggttgggaattttaattcatttaatttagtacgtttattcatttgtgtatttttgaaacctaaaagaaggtttgtgttttatggatggttttgatttgttttggtgatgggatttttttttgttgatgattcttatatatacaaaatatttgtgtgccaatgtgattaccattcaatttttttgctatgtgtgtaaatttgaacttatattagtctttttctactgtggttgtgtcaagttttgttcctttcggaccgttattcttggttcttttagacaattagttaaagcggttaatacattttaacctgattttgaatgaagagaaaggcagaaagataacttgctaaaaacataactaacagtacaactagatcagaaatacagtttccttttctgacggaccactattcttcattttatatatcacttctagagattatttctgacattttcaaaatcgtctgtgcttcattgacgacatgaaaaagggaaaggcctgcgattcgaccacttttgctccaccgttggggtctccaattattttgcgcctctcaaaaattgttgtaaatctatagtatccgcacaagatttgaggttaaaggttgctagctttttttttgagtcacggactcacggtggacaacattttaatctggtaatataatgtttctgcattaatcaacattttaatctaagatgtgaatgtgatatcatttggttgaaatgaaaaattcgttcttgggattatgatatttggatatactcggagtcgactataagtctatagttatcaatacctttcttcaggtacttacacatttgtacgtccgactctaaatactatagattttgctgaaaacataatttgatatagtatacacgtaaaatgaaacttatcagcttccgatatgtcttccgagaaagaagatctgatctagtgatctgacaactccgtttagtctcacttggccacaaaatgccaaataattaaatgaagcagtattgaaaaatcaggatcttatgtcgaaagctgacccaacaagcacacagtatccaaagaaaaagcctgtctaaagttacaaaaaggacttattattatcacatgtatgcaatttgcgtgtataagaatattaagaactggagtggagtgaccatgctaataatatctagtgcataggtaggggcacatgccatgcatggaccaacaccacaacaaacgaccatgagatatgaatggcacacatgtacattcccttccaaaaagaaaaagcataaggcccattaatcggcccaatattcttcgcctgcacaaaaaaaaaacctccagatcgaaaaaaaatcgagaagcgaatagcggaagaacagaaaaagggaaattctgagaatcaaatcggaaaggtagaagaatcgagtcggaaaaatggaaacgacgaagagtaacagcagcgagtccgatgtcaacgccaaatgggacgcttgtctcgatctcactgctcgtcgctttgtctactcttccctcggcggcgctttcgccggtcttctcttcttcagttcggtgttttccaatatcccccactttattcttatgattcaattccgttcacatagtgttgattactgattaggtttctgggtagagaaactgagaattcatgatcatttagggttttgagtgttgttccgatttgaatcatttaggatttattaggtttaaatggttttttgtgttttgacgattaattgttgcgttgtgtgccctagggagtccggttacgagatgggcgtcgattgcttttggtgctggaattggtattggttctgcatacacagattgttctcgtgtttttgatgcgtcttcttcaacttcagctactttattagcagctcccaagagtacggagacttctgtatctcaggttagtcggaatctagttttgtgggatcgttttgttcgtaacagttgaagttagaaaagatgctaatttaagagggtttcatagtagcttagagggaaatatgatttggaagaatggttacagatttgtgagaacatatgcatctttagtttttagctcttaatagttcaatattctgaccattgacatgtaagagttttgtcgctgttgatcttacgagcaaagaacaaatgcctgattgtattgtggcatagagtatcacgactggactacgtattggaaattaatgattagtaatcggatatcttacttcatcactatcatagttagcaagttactaggtgttttggtaggtgcaaacatgtttaatcttgttccaatgtgtatgcatttggtcgaaagcaaatccgttcatgtttctagtcatcgaagtccttacaaagtagaatcaaattagctgagtgtgtctgtttttatcttgttgattgattacaggcagcagaagagtgaagacaacgaggaagcttggaggtaaaaaaccaaacattgatagagttacattacgaaatggtaattgatcttgcaggacaaggcttttgagataacgccattgttaaaaaaaaacttttgcttctcagtgtggttttgtacactgatgtcaaaattgttaatgacccactcattttttttgttttgaaaaatcttatgttcttttacttgagaaataattcctccggtttgatttgtttgcctctactgttccttcattcatcaaataatctcctcacatatcgactaagttacaggttttaaggattaatgatatgtttttagctgctactaaattgactgatcgagtagttttaacaactcaatccatattttatctaatttataattttagtgttgttatttttttctgtttttgcggccttaaattaaaaatatacatataattaaacaaagccaccaacgcgttaacaggcatggttattcactcatcttgatgacctcaattagaagcctttgaacggctcagattgcatatttgtagccgcgtcttagcttaatctattgccacgtgtttccgataattattttcttaatacttaactgctacggaaaagtcataattaacactctatagagcttccgaagaacgacgctgcgacgagagagactaatagcagaggaggaagacgaagacgacaatgaatgcgccaccggagaacgaactttgttcgatatgccatggccacttcaacgctccttgccaatccaattgctctcactggttctgcggtgcgatctccttcttatttgctttcgtttctccttctctcgaatcgtttcgggatcggttattagtttcagtagtcacagaattcgagtgtagctagcttctctgaatcttcgttagcttcctttatgggatcaaatcgagttgtgacgatcttaatttcgttttcccctgaagcttggttccgttttctagacaattttgctttggacttgtaaattaactattcagagttgttttactggtaacataaatttttagattttgtttgctaagtttcctaagattctgtatgttcacataatatagtgcatgagatataaactctaattctatcattgtagggaactgcattatgctagtttggaggcatggatctacattacggccatgcaaatgtcccttgtgtcgtcgtccgataagtttgttagttccttctgaggaaacagtgagaagtcggaatgatgctacagtttctgaggttcttcatgatgttgaaacttacaaccgtgtctttggtggacagtcaagtggccttattcaggtatgtttttggtctttatccacaaactctgggatatcaagcagagtataactgactatagctaagtttggtgatcagtagagtagttgttgaatgttgagggtatgtacttaagagtttaactaagtaattacatattggcttagctccttaagtgtgatacaaggatatttcaactgtggcttaccagtaaaacaaattttgcagttgaaggattttaactctatgtgggatttatttacatgtataacttattgttttctttaactctatggtggtttattggttttctcattgttttcatcgtgttagctagtgacggatggatgctttcgatttcatcatcttgttgttacttttttacaaagtcatgcttctcataagtttgtctacacataaatctagagtttgctggaacgttcttacatgaaacttcaatttgttttgcagaggatgcaagaccttcccttcttactccgaaggttgttgcgagaaatgatggatccacaaagaacgcttccactcgtcatcagagctcgtgtttatattgcggttagtttaacacattcattacttctggacccttattaagtaaatcttctgtgattaaatgttcacaactttgagcacttgatcacatctgaactaaagaatgctctgactaacacaaaattcactgctttttatttgatgcagttgatactcagtgcgatttacataatcagcccaatagatatcattccggaaggtaatcctcatttcatctcttcagtatattcatacaatacacacactcttctcttctatcaacatattactgaccaatactttgtatcgatttcttgtcaggagtcttgggggttatcggtttactagatgatcttctcatagccctgatttgtttcctccatgtcgctgctctctaccgatccgttctctattcccgtcatggtggttcgtgaacctctttgaagttttcacatcattaatcatcacagttgaagtaccatggtttacttgtttgaccctatctttttgactgttagacttaggaaacttgatttggatgataaaacgaaatggtcctttcctttattactatttcagtaacagatgcattatattggtgaaggaattgaatttctcatataacataaagaaactagaagaaagaaaatacatatacagattttctttatttcagaatattcttaataaccccaatagtagtaattcgcctagacagggctcgcatcgccggattgaaggtacgaacgctcaccggcatttttcttcccagtaaataaccgatcaaacggtgaccttattgctagaagcaaacctttaggtgcaccagcacgatcctgataattaccactagcgttgataatctcatccggagactgtatcgaccgggtatggtatggaggagttatagaaaatggtctccggtccaaccgaccgtcttgatcaaaccgttcaaagtagaaatagttcttttcagtccctaggcttccggttctgaaccctctaaccgagctcctttcttgaggtaaggccagttggccttttgacccttgctttcccaggctggagttcacaagctggtcatgtatctcttgtggtaacctcagcgtataccggtcgagattctcctccggttggcccggtgaactagccgggctgtacaattcagctagtttccaacctgtagacatggatttacgtggcatgctttggttacccgtccaagccactgagtcaatcaaccgctcgtcaggtgaagttaaaacccttttccggttatcatcaatcggcgttctgagagagttctgaccggtttctctagctaaaccgggtatctccgaagaaacagactcacccggtacaggaacgagattggctcggcaaagaggacatgtggtctgagaacggagccaggcatcaatgcaaccaggatgaaacacgtgacaacactgaggaatcaaacgcagcgtttcgtcgtcctcgaactcgttgagacaaacgggacactccaaagcttctttaccgatcctcaacgtcttcactgtagagtaaggaaacgttggaaacgtttctataacagacgcgtctagcccaggctccgtcgtttgcctcacgttaagccagtttcctggaccaccaccgctgtccatccccagagcgtgctggagacacctcctcatgtagacggagatacatccaagtgcgaagaaaacactaacgagtacgatcatgattatagccgtggttggactgaacgatgttcttccttcatcatcaaactcgctgctagcgacaacgacctctaacagtagtagcaagaaagaagagtagaagcttactcgtgacatgaccaccatcgatggttgcaaatggtttgacgatttgatggtggaagtaagtacttgggcttcccggtttcatgaggaccaaggcttttaccggtgaaggagctttataaaataaacaaaagcctcgtcgtttatttctttttgtcttgtttttttttggcttcgcgaaagaaaccaaaaaaagtgatggtaagatcataggagatgatattataagaacgtgtgatacattaatttaggggacggtttgctttgcttaatgcctacaaagatggttgacttttcagatcgtacaaaaggcactactattgataaattatattatatcaaccaagcaaatctcttatgaagagatatatataatccaaaagtgaattgttgcgaattgtgatggtaaaatttatgttttataaacgaaacaaattagtcggataaatcatcatgtttaggaagtggtttatgatcatttatgtcatgctaatttgatatcccaagtttgattaagtcctttaacaaaaaaaaaaaagtttgatcgagtctacgagttagatcattgaggttttatatatatggacatttctgtattaaaatttaagatttgtagaaccgaagctccacatatctttcgtaaaaatgactaaaatcaatacgagatcaaacttatctctaatgagtcaactttaacaagaccttgatgtggtattaccattgtaggtcaacgcaattatacaatgatattgtcgtaaatgtgattaataatttaagcagttggtgatgtatacttgcatcatggtgataccatgttgtgatcacgtcgctctccaactaactagttattgattaatatcttttatggaatcagtctatataatcattcatatatctgatctctttgttatggataattagtggagatttgtatatcttaatatgcgatgacttaaccgacggcccgatataattagatatatggtcttagataatgtgaggtgatttaactttccctttcattaggacgattttcaactcgagaaataagacctaaagagaaaatcaaattaagtgcttataaacaaaaacgaccttttttttttattcgggctattttttttggcatttcggagatatttcaactcatgaaaactggagaaaaaaatcaatatgcagtagaaaaaagtaaattgtaaaaatcaatcgccaacgcccccttaaaaaaactttgtttggtatgcgatgaaaatcaaacaatcccatatgttacagaaaagttgaacaaacgtgttttttttgttgccgtaaattcattttggaatctcgattttattcaaacagaattaaaaacgaaaccaaaatagtaataagaaagcatttaatatacatacttgtttgtttgtcaacatgtaatttaatatacattttatagtcgcacacccctatttgtctatggatcgacaattaaatgccttaacaatttgcgaaaaagacatattattaatccatattgataatgatatataagtctcaatcttatcatcttaaaacgtattttgtggtgaaggctttcgagtttcgagtatggtgtgacaatgtttttttggctgtgtataattatttataataggtttttaacaagtttttattatatgattttttttcaaaatgaggttgtatgattgtcagactaaaacgaggttatatgattctaacgaaaatacatattatattgtggaacgctaaaataaataaaaacataataaattgtggaaccacaaaatacttctagaatcaagttttgcttttttcggatatcaaatagaataaaaaaagattatacttttgacaaaaaacagaaaaagagattatacaaaatggaatattttatgatggtttttggaagtttgaactaaattgaagtatatctcatggagtttgtttgtatgcaattagaaatatttgtggattatattctcgttttttgtcagcatatattaattttgatacttagccattacgaaaattcctattttcaagagttacagtgttcgtgtacaatttttgatatgtcatcttatggcagcacgctagctctttcataaaccacaaaaactttgttacaattttcttaaaatgtacactacaaaaaaaaaaaaaattatttaaaaatagttataatatttttaaaaatttcaatgctaaaagtttagaacactcatttgaatgtgaaaaagaaataggaagatattatttccgatatttttggagtgatcacgtaactaaaaattgttttgttcgatactaacaagagcattagcatataaaaaacgccaatatttacgaaaaaattcaacaaattagaagcggatttaaagtttaatagtttatgcatcaaagaatcattgatgtagaaccacgtatttcgatctcattcgctgatattttttatgaacaaaaatttactttcaacagttagttgtcgagttattaatcatatatttggtactttaacaataaataggaaagatatcaggagtcgtttttcttttatagttaaaggtctatttcaatgtcattcaacattcctaatgataatagatttatttttttaagtatgattttggtatgcatgatattgtgtttttatgatgtgtttttgttggtctttcaactgatctttttctttgaaaacctctataaataagttttcttgactgttaactttaaatatatgcatcgtataattataatttgtgtaaatcatttaaattgttatagtcttgtagacaaactgactagctaaagtattgataattattatatatgcatcatatgatgatctaaagtttggctccgtttatcctgcaatctgcattgcttgtttttacttgttcaatattttggttattccctttgattagtttgttgcctatattttcattccaaatcgacccaaaagaatttgatcattggtaaagaaaaatggtagaaaaactgatttaagtcgtataaagaaagaaacggaggaaactgacagctttggaagcataaaagcccaataattaagaaacttttatagccaaataagcccaatcatttaacgcaagccttagttacacttccttagtaatcatgagggtcaaatggcgaatggaattttgagttaaaggacgaatgaaatctatatgtttaatttgaatgaaacggcgaatgaatttgttaagtcaaacaaaaaaaattgtgaaagcaaaatttaagttcatgagatcaataaatccgaaaatggttcaaatgtcttgctacatataaaatgtatatgaaattgcagtttcaaaatataagaatctaaatcgatagaaatccagatttagaccaatgaacttcggatattcaaaattcatttagtgtatttgtaaaagaaaaattaaggtatttgtataaaaatacattggaaaaaaaaatcatcaacttacaaatgcataatacacataaaaattcaattttattatgaactttaaaaatacatatcttctaagaatataccaaaaacaaaagggaaattaaaatatacggaaactgagatcggcttgagagtagatatgaacattggtcaggaggaaggattacaaagactcacttatgtttttatttttccagtaactgatattgcttagaaatagtacacatacatacactatttactatgataaataattgaactgtctttcttttgttcacaaaaaaataattgaactgtaatatagagttattggatgctgttcagctatggaaatctaaccctacaaatctatttgtatagttacagatgtaccatttccttcttcttttttaataataaaatgatgtaccatttctatataatacaatgaggatgtgtatagtgttgaaagcctagctatttgaatagaatacatttaattcaatcatccactacttgacccaatctcgtactttgttttctatataagaggcacgtaaggtaagatcaatcccgcatatgttttcttcaatgagacaggtaagctatttataaaaactaacttcatctctttgcttgattagttattttccatcgcgtataaaccgaaccggaatggaccagtccagtatgtcacatcacaacatctctatgacaattacaaaaaacaacaaaaatacatgaaagcacaaaaaattactaaattttgacatcatacttaattttgaataaattgaatagtgtgtttgaaattttgaatgtgatttaatatagcatagaagtataagtatgcgcacattctgctcatatctacacaaatgtatgtgttatcttactttgccgtcaaaatgctaaaccaataaaatttgatgtatactaaaaagaacagatactttaaaattagtagtactacataaaagacaacttttagaaagttcaaacccgtatatgtgactattatactcataaattttcggaatggccgaataaactccttgttgattactatatgctgattatgattatgattatgattacaattttaacactacaaataataaactgattaggtcgaatcagatgataggggaatgacgtggcagttgaagagtaaaaagtaaaaataaagaagtaacgtaaactgtttggaagcgaatcttgaagtcctcgagtcactccaactgcaaactttcaacatttcacagaattttaggtaccaacatccccggttttctcgggaatctcaattacatcaaattttaatttaaccattaaacaatcttttaaaaatgattatattctcgatcgcattataaaacagattaaaatgtcatgttttggatagaattggaaatacaaaatatgattattgcgtatacacaagcctatcaaactcctttccaaacgcgttagatatttgcgatcttttatcgggtcggcactaatgtcattattatcctaattattgaattagatttgtctcctactaatatgaacgcagcttaggggttagtatgcagttcgattttttttgttttttagctcaagagaaataaaaaatggattgtaagtttgtatacatagttaagcttaatatgatggtgacctctattggaatttagcattctatagcgtaaagaagaagtataactagatatggaaagttttcactaaaacaaaacgaaatttatatagatactgtaaaaaaataaatgaaaaagggattattattagagcaaagtaggaccgatgatcattaatctagttttaattattattagcaaagttaattaatattatgagaatctcataaggaattgatccgggcaagtacacgatactgtatatctcatgttagaattccaggcagcgagatttacggttaaaccacatgctaatgtttttttttcttttttcttttgttttgttaaagtttctttactacttaaaaaaatttatttttaacatagaacaacgacgacgtttttagtaggatgcttaactaatttttttttataaaaaaaaaaaaattatcttctataaacaattcttaaacctctaaaacgctgatttcacagtcacagcaattcaattctcaattgaaacgttgaaaatgtgttagttttttcattcagtgactaaatataacttatgccaaaagaatgatttagtcccgtatatcaataaataagaaatatatgttttcgttggtgaacagttccttgaagtattttctgccaaaagttaagcttgtttgtattatataaattaaaatatagtatgtgaccttagaaccagtgataaaatattgcaaatttatttaaacgaaaaaacaaaccatgaaccaataatagagaagaaatatgagagtctactgacaaccacagtaataaaaaaaaatcatgaattcacagatcttacgtattgtaatacattagtgaaatatgagagtctccttaatagagttaaaatggaaatctccaaattaaacttatttcattttggagttaaaaatggaaatatccaaattaaacttatttattttaaaattaaaaatgagttagataaataaagaaacatactatactattaatattattacgtagataatcaaacattactagaccaaaaatcccggaaatacattgaacagtcaagaaaagccaataacatctaagtaataagtggattcctaccataaatttaaaatgataaataaactaactaaggcataggaacagcatctaatcaaataataaaacaagagaataatgggttaatgtatattagatagtgatttgaacacgttagaatcgataagtatgcaattaattagcataggcggcatagaactattgaagaagatacaatggctagtctatagatataatcaaacatactataatcttaattagtagaacagaaaataaagtccaaccaaaacatctattttagtttttgtttgtttaggattaaagataactatttaatttaagtctgttaacagtgtaatatattgaaatatacgtcattaatgagtgttgtaataaaatgtaaacacaaagatgaagaaaaagctaacagtgataactgaaatgattcggaggatgcatgagaaaacaagcccattggaaaattgtaagctgtgttcttggaaaagtacttgagagttgagagacaagaaaaatagaagcttgtgaggttacatggacttttctggacatatgctcatggcttctcctctcaattgtttttacttttttcagaaaagaaaaaacatctctttaaacgtctgcatcaaaaacaaaactctgctatgatcgatagaaaataaatatcactcgtgcgaaaatatctacatgttaaacgatgaactaaaatgattaaaaagtaataaacataaaggatgatcgaaacaaatttttaaatattaaataataatcgaccaattaattttgagtttgatgatgtacaaataacattaggtacacgtattcaaaggagacaagattactatagcttaaattcaatttgaagtgcatacaacaagattctttgtatcatcatgaaaagtttgtcctgcagttttatgttcacatattatttattttttcggcaaattggttcagattttaagattccaagtgtccgaccaaatttgattacaaaacgcagcctagtcacatctatctaattctttaaattttgttttcatatcaaaattgatttctactattatatattcccagagtgattagatcagaataatcaaaagatgccacctaatttatatacataacttttttggtttttgatgttgaaaagtagtgacaaaagatttttaatagaccatcattttataacatgcaagtaaatatctcgatttaaatatatttttaataacatcacgaaacaaatttgttaaaacctgacataaagtgatccccaccggccaaaataaatcttctattggttgtgtattttctgacaaacatttgttttaaagatttttaattttaatcggatacttaaccatatatttgatatggaaatacattatatttttgtttaaagtaaaataatagaacatgagtgtaactagacgacccccaacctgcaaacagattatttggtcttgtggactggtctactactatctcacgtgcaaacttgacgctgcaatgtatacatttatctatatgcatctatgtatctaaatagtaattagtaaccatagataatggatctaattccacgaagttggatagatattctaaggtaatatctggtagaattttaattttcaaaccaaaaaaattgttaccagatgtgaatgcgtagaactaaaaattaattggcgtagaccgtcctaactggaaactcaaataactttgtttacaagtagcatgtaactgtatatatataatgctttagaatttttatggtccaattgaaaatttcacattttcgttttattgtatcactcacttgtccgactgacgtagaattgcacgtcttaatttttttttggcgaaaacgctaatccgcaacaaaaaaatttgttaaagtagtccgtaactttttttttggttaaagtaatccgcaacatgacatattagtactaacgaactattgttttttctattaattttttgctatatttagaattttaagtagtttagccatcaccatctgtgtatccttacactatacatattcggaaaaactcgaaagaggttttaactggttatgatcaccaccagcagtccagcaccagttttctttcactcgaacgtcaatataaattcactgcccactatatcagctttaccatttcttaataaattatttattatttatttgattttgaactaagaaagattatgggtttttaggaatagttccaaacaattaacatcttaataataaaattactatataataaaactaatttatattaaaaacattatgaacaatttttttctttattttcttaacctctaattattatgaacaagttatttaaatacaattgggatgattattacaagtgcactttatatctccttttcagtgttttttatatatatattggtgacaaatacatcttttctttagttttatttttcttttcgtttttgatctctgcgggagcatttatttttggtcaactgtgagagcatcaaaaaaaaaaaaaaaaaaattaatagcctcacaaagcttctctcaattccctttttaaataaatcacaccactttgtttgatcctcatatttcggttttcactctcatatctttcttttgtatatttatttttgttgaagattcactctcctattcttcctccatgccggtgagttcttgagaatttaatattttgtaaatcaatttacaaaaaatcttcatataactaataccatgcttagtttcctttagtgggcttaacccttttgcctttatttccccctcgagacaaaaaggagagcgacaaacacttcctgtctaaattttgttttctctccttctctctccctctctcggtttctcaatctttcttattttttccataattctgaatttttcttttcaacaatctccggctaaaaaatgcccttagaggctgtcgtatacccgcaagatccattcggatatctctccaattgcaaagattttatgttccacgacttatactctcaagaagagttcgtagctcaagatacgaagaacaacattgataagttagggcatgaacagagctttgtggaacaaggtaaggaggacgatcatcaatggcgagactatcatcagtatcctttgttgatcccttcgttgggagaagagcttggtcttaccgccattgatgtggagagtcatcctcctccacagcaccggaggaagaggaggagaacgagaaactgcaagaacaaggaagagatcgagaaccagagaatgactcacatcgccgtcgagagaaatcgccggaaacagatgaacgagtatctggctgtgctccgttctctaatgccgtcgtcgtatgctcaaagagtaacttactaattcaatgtttatatatgctatatatcatttggtcagggtcattcttaggtatatgtgtctttgttttattacttgcttggctgtagtactcatttctccataatatattaacacaaaagaatagaatgaaaatgactgagaatatatattgatgtttttatacaatatattaacaagaaaatccaccgtaaatatggaagggtgacgcgtttatatacatactaataatctttgctgttacatattttaatgtattttttaaaataaaatattatgtgtcaccaaaaattagaacgagtatgattgagaatattgggatatgttttagaacaatttcgtaataaacttaagcaattagcaatgatacgtgtgtgtgtatatttatacattcaaagattttttcaatctttatgataactatatgatctgacatgagcgggttttggtggtaaagggagatcaagcgtcgatagtaggaggagctataaactacgtgaaggagttagagcatattttacaatctatggagccgaagagaactaggactcatgatcccaaaggagacaagactagcactagctcgttagtgggtccattcacagattttttcagcttcccacaatattctacaaagtcatcatcagatgtaccggaaagctcatcttcaccggcggagatagaggttacggtggcagaaagccatgcgaacatcaagataatgacgaagaagaaaccgaggcagcttcttaagctcataacttctttacaaagcctaaggctcactcttcttcatctcaatgtcaccactctccacaactccattctctactccatcagcgtcagggtacgtacattttcaacttctcatcattactttgtttgcttttggggtaatcatgagattaaagtgagtaatgactgtgtgtgtggtgcatatggtttcactttgttgatttatttttttgtctcttattgttggggggaaattttggattagtactattgtggttatgcctgggctttaaaaaggttgtgaagaaaaattaaaatcattctctttgtttttttcttacctcctttgggtacttagggctggggcctcaatagttgtgggtcaaactcataatcatcattttgattattatttttgtcaataataaattgcgtatcttaatcgtgcctgtaagaatcaggggaccaacctaaagaaacgaaacacgaatatgtgtctatctatatccacgaattgtatacgtggtgttgtgtatttatatatgtttatgtatatgtttatgtactgtggatatatgttcggtggtcacataattgtagatgagatatgtacggacaacgaagtgagtccaccatttgtttcaggagatatttagcaaatagaaagatattttgttatagttatctacatccttctaattttgtttgttgcaacttttttcaagaattgttatgtatatctttatttcttaagagaaaatgtgttggttcaggttgaagaaggaagccaactgaataccgtggacgacattgcaacagctttgaatcaaaccataaggaggattcaagaagagacataattcagcaaatagattataattaacttgttttatttttattttattttgaaataactgaaatcagttttctaattttttttttttttcactattcctctaatcctccctatgtaagttgcatttttgtctcttgtaatgaatcaatggtcataaagatctgaacaaaaaaattgaataaaagaaaatggtttaagtcgataagtatgtgacattgggcgctaatagccgttaggcctacgcctaatgtacttctcagtgtttttagggttgtgtttagtgtataattataatgattaatagtatgattgattaatttttgaatttattttcttcaaagatgaattcgtctttttctagaacttttaaagtttgtgggttcaacttttaatccgttaatcactaaattttagcatgctcctacgatagtggaggttatacctttggctttgaatgcaaacaaattctttctatctagtaacccaagaaaataaaattgaaaataaaaaatttgatatacaaggttgtatctttattataaaaaaaaacatttagccgaccataacacacatgtataactaactattcgtgggaaatcaaactattttcacctcgatatatgaaccatatgatggacaacttacaaacccactaaaccttccaaaaggaccaaaactaagtaaatattttgaatatacgtagtttagtatagttcaagtttaaaaccttatttttgaagtggatgatcatcctcatttaacatactttttaattatccaacattggtctaagaatatattaccaaggcttttcaagaaaaagatcaaaatgtaaaattttcttttatcaagttaaaaaataaaataaaaattattcgtttagaaaagaaactaagcaagaatcaaaattaaaaactcgctagtacttcacaaaaaaaagaataaaaatgattttctctgtaacatcaaactcttaaaagattatttcttggtaatatatattttatttaaagttaaagtaagggaagaaaaaaccaaaaaaatacataataagatttgtttaccaattaccggatttatttttcagcgatagcatgtgaaaagatttaacaaaaaaaaagatagcatgtgaaaagaaaagaaaaaactgagcggtgatcataataacaaacaatgttttgtagataaattggaacacaaaatcagcggtacgtgtgaatcatggaagaagagagatgatgatcattgtcttatcatgaagacccatcaaagcacatggagcctcagtcgataaaaggaaaaaaagagtagaactgtacgtattattagaacttagaagaacaaaaaaaaagaagtaaaaagtaaaagctatagatatgatttttgtttttgacctagcctacatatgatttaaacatcctatgtgaaaagcttttcattaaatcttaataaaaaaacacctcaaaatatagccgactgttctcttcagcagctttttatgttttgagcttatagattcacactatcttgcagctttctctttatatttttgttaagacttattcagttttctttgtttattgtatataatttgtaagaccatctccatccgtgagaaactcatttttataaaataatataaattttattattattttattatttaattttttaattattatttgaaccaatcaaaacaaaacaaaagcaaaatgggtttctctgagtttttcaagtgagaaacgtttttactttctctccatctttttcgaattttttattctgttttaataaacagtttctggatcagaaactccggatggagatgctctaactgcacccatccactatctcttaaaacatcaaatgatagcatggaaaaaaaagcataaaaatttatgcacaattttgtattttcttttatctggattcagatgtcgaattattcaattataagaaattgagtatacgttaaactctagctgatatgcattagtcttttgaggaaaaataatggtgaaaatgaattttgaaaaatctattacatgggaaaaaaaaggaaatcaaattgggctacgcaaaagaaatggaagttaacgggaaatctacaaatagtttctccataattaattattgatgtctttttaacagctagcgtcatcactatattgggccatttacatttcattatgtaacatacttttttttcttttcttcttctttgtgcgcgtgcaaccttatgtagcttattgttatagggccaacatggtggtcaatttaccccctatgaatttgtagaaaatgttaatctatttgtaaacttgaaagcgaaattcataaaaatagttacaaatgtgcttattgactaaaacgtgacccttataaaagtaatgtctatctccaccacgacgtctatgtatacaagtttgagtcaatgtagggtgggagacgtgttaccttcactttcaagaacttcttaagagttatcagagcatcattatcaataggtttttaaaaagtttaaaaaaaatcttaaaatattatataaaataaaatatgaataaaaaatagaaaaaagttcttagaaaagttaaattggctcttaaataagagatttttgatacattttcttaacttattaagagcctcctaatatttaattgttattttgtatataaaaatgttaagaattttattaagaacccatcaataaagatggtctcatgtcgagttgtagtttaaattttttttgtagcggagttcaccagcaaaaaatatatatacaataattttatgaatataacggtctattcatgataaaaacatcattagttgcggtgtctagagtctagaccatatgttttctcaagactagttaccacataaaccacctttttgattagcttagattgtaggttgagtaagcctgaagcgtgtcttttcaatccttttgttttcaaaaattccttcattcttttgttgaaagaaagagttatatacatatatgtcaccaggccatagtcgagcaaataatgattggacagtatatagagctaattttccttagtgattgtgcggaaatggaagttccacctgctttttggtttagtccatatatttaatcattgtgaagctatgacgataactgatgattaatttatcccttatgatcggccaaatgatatgccaattttcttgtttgtttttccctttcagagctaagtacaaactaattaggagttatcgtaagaaagaaataagagttatcctaagatgttaactcgactaaatcaacacaccccttatctatatatatatctgcataagtcacaagaagtttcataaaatagtaattcccttaataaaaatagtatatataaaacataaagaaaaaaatatgagcacacttcttggttgtcttgtcctcatattctctatggtcgcacaggcctcatccgccagtcttacggtgaactggtcccttggcaccgactacactccgctcaccactggaaagaccttctctgtcggcgataccataggtgattaatctcttaactcccccaagacttacataatttgactcataatttgactcataattaattacctcttctatacacaaatttattcattaggttgagatgaaaaaaataaaagccaagagaaatctcatttcatggacataataatatgattatgatgacattacggttatgtttgcatagaatgattatgtaaaccgaaaaaacaaatcaagctaacaaacatatacggcttcatatgaatatatgggttacaattgtaccagtttaatattgttacacttgtgttactcagtgttcaattatggtgcgggtcacacggtggatgaagtgagcgagaacgactacaagagttgcactctagggaactccattacgtccgacagcagcggaaccacgaccatagctctcacgaccactggtcctcgctacttcatctgtggaatccccggccattgcgctgccggtatgaagctcgcagtcaccgtcgcgtcgaactcttcaaacggtgtagctggtggcaccactacaccaaccccattcaccggaggtggtggtggttacaatcccacgaccacacaggccattccttgtgcggcttgggccgtgtcctgtccattacgggctttggttgctacttgggccgttgttttttatgctttggctttgtcttagttgaaattgtgtggtctgtatgttagtatttttaaacgatactaaaatagtaaatttgaacccaacaaaaggaagagattgccatgtgtctctacgagtgtatgataatcgtaaagcatcagatccaccgtctctcacctaattagttggagcccgcaaaacctctcgtcacatctaagccgtccatttgaataaaacattgtaaccactctagatctccactcgagccgacgtaacaacagaataaatattgtttgttttttcaaaaagaacaaacaatattgtttgttttaaccaagagatggtgatggtgatcaaaatgacggagatttcgagtagtttcgatatctatgtaacgttaggatcagaattcaaattcgatttgtggagttctactattaatttattttggctatacgttttaaaatatattaaaacataattctgtgaataccggaaatgaatttggaattctatttcgtaattttcggatataaaaaaaactatttgtttttacgttagcaattaaatacaaatacaatgtgtatgtttgtatgattgatctgagaacagaattatcataaataaattatgtattttggtcactactaatatggaagaatgacctaacattttcattttcttacaatttaattgtcttttttcttaactactacaattaactattttccaaataaataatcatatacatgaaccattgtttttttgttttggccttttgggaaaataaaagtgaagaaatatctcggaaacatcaaatagagatcataaccagctaagcaagcacctataaataaacacgaacacaagtaacggcgagaagaaagaaaaaacaaatcagatcaccacaacttcttcaacaatggcaaacgttttcctcatcagtagcagaaacagaagatcaatgcggacaacaacagaatcaaaacccaagaatcttacggtgaagagatcagattcatcttcagactataactactcatgcaagaaacatccgaagcacagacaatctcctggaatatgttccctttgtcttaacgagagtctctccaagttgtctagtgagttttatgactatagctcaagcatgagctcgtcttctttggctaaaacgatgtcgtcttgctcctccgcttcttcggaatcagaatcagatttttcttcgacggcgatatcttcttattactcttctgtctcctcttgtttatctcctctgcaacatagatacagtgagatcgtcgttaataagaagaaaaagaaacatgtcaagaaacaaagcttcctctctagattatttctgtaattatttacaacatttttgtgttatatattcatttgtgcttctttgttttttttcacacctttttaacacacaggagaaaaactagaccaaaaaaaaaacagagtaaaaataataatcacaagacgatacaagtaatggttatttcaaaaacaaaatatttacatcccaattacatgcgtttggtttctaaaaaaatagaaagattttaaaaaatgttaaagaatgtaattcaactagaaccgatttaatataattttcttgaattcacggaaaatgtgattaatttacagtggcattttgtgattctatatgtaaactatgtgaactttcatttttacttttacagcaaacagagaatacagacgaaggctgtgattggttggcacatgacattacagttggcaatacaattaatgtacggtaagaggaaaaagacgtgtcacgcttcatttattcaggtttggtattagagctggtcaaatttaataagtagcctagccataatatttacacaaccgcaattaagttacttaaacggcactactaatcaataatctacacaagccaaatactagtatgaaatatcataacaaaatcttcatcccggaaaagcttttccagaaagtaatttaagtggaaccatgtaatgtacgtttttaaaattaatgctttaatttttccaagatatccagcacttgtaatttactaggaacttgaaacgcttgatgacagttcactaatctaccttgaaacttgtttgctacattgaatacgggctttggtaataaatcatcgtatttatgtttttgattaataaagcaagaatagattaatggaagtagtggctaatgatgttaggaggaaagagcgaagttaggaggaaatgatgagtgttgtacagacagacgtacaagtgaagtggccagttcatgtctgagcagtgatctggtgtgatctactctcagccgttttccacgaacattctctctttctctcccacgtgacgtttgtatgattcttctctccgtacatatcaatacagttacaaattgacgctattggctactttgtaatactagattttcttataaatatgaatatatgatattgtgattttggtgaatttgaattcgtaaaacattaaagtgaattaagtacaaactatggagctaaccgttttttttatttttgttttttcctggcaaattgtgtggataagtttttgcaatccggccctaagtcatttcctttaaaaaataatcagtctcaccttaggaatgaaagttaaacatggtttattaacgataaattaatccgttgtaattgctatagtcaatatatatacagatctttaaaagacaagacatattacagatttacctttgtatactaaataaaatataacttcaaaacagacatttttctttagctattattatggtcagactcaaagtcaatttcttatataaaaggatccaatgcttagtatagcagaagctgttcctgagatggatccatgatttgtgtgatgatgaataaaatattctctaaaatataactatattctgttttcaatgttgttaaatgaagaaacaaaaaagctatagatttaattaaccaaaaaaatgcatatagattttcatcaaaaaagaaagaaagcaaaaatagacgtagcattttaacaaaaaaacaaaatagaagttagcagatgcatatcgtaaagaaaatgataaactaaaaaatgaaagaaaggaagaactccatgtgatataacttgtgagcactatgttcattgatcgttatcgccactaaaattgtcatctcaataatcgttacaaccactaaaaactatgactcacaaaacacaacacttttaaaatttatttgatcatatactccttaaagagaaaaagtgtgaatatcattccaagtctcaagagtgtctaaattagctaaataacatattttgatgtgatatagtaccattttaattgtcaccaaaattatatacttaaacaatttttcaaaacgttaaacatttctatttatttattttaaaaacattttacatttacattgatgatccacaatttaaagtttcaaactaaatcttgaagttttaaactaaatcttgttgatagcactaaattatgatatactataggttacgaacggtgtccattgacaaaattggaaatcgtctccacgtataataacgcacctctttctctagaacaggtcaaacgtcacgtgacccttctctaacctttttagcttcttaactcttaaaatagaaaacaagcgaaaagaccaaactaaactttggaaaaagatcgtcgatttttgggcattcatcatcgtggcattgattgattgattggcatctcatactttcctttttcggctaatctctactcccaaaaatagaaagtctcattcactcaccaagcgaaaacagaacaagaagaagattcaagatccgttttttctgattcttttctttgacgagcggtttgcttttcctgaatgtttccggttggatctttcacataagaaatgcggcggcggaggaagacggttgtggtggcggtagtgatacggagggtgctaatatgggccatatgcgtaatgacattactctgttttctcaccgtacacatctatgttgctcctttcaatagactccctaagcttcaccttaaccaccacaacactcgcgtacgtaaccataaccatctctgttttcttgatctgtgttagtgttcttattcagtttctgagactgggtcgtttcttgatttgattctatgtttaacagcgaggatatatcatagattacaataaatccatcacagaacagagtttaacgaggaatctgtctcgtccggaatctaatgaaattcctctcatctccaatcccaaggttcaatgtttacaatgtttttcgagatcttcttgtactgagacaagttttgcactttagctatcaatattgtttcttttttaacttgtgactgattctttgtcaaatttcagacaaatgagattcagtatcaaagttcgatctcggaacacatcaacaacaccgagctagttcctcctcatgtgtctacaagcccttcttcttcttccaaggtttgagatttcttatattttgatccttggtgcaactaatgggaacctaaaattagttgcaataagtaaatcgtttgtgaatgtttagtaatttaggataggtttagtggttgcaagtgatgtgctacttagaacaaacactagacaaactatttcttagaacaaaagaaaagttcaactgttttgaatagaaggatcatgcttctttcgtgtttttcactcttttagatttgacagttgaacattacaagcgggataccggatttcgacaagctttggaaacatccaccgaaccgaaatttcgtgccttgtgtcagtcccaatcctagttacacatgtgagcaaagaaaactatctggtttggtttctttatggctcaaaatattttccttcctctcagattatttggttttctcagctccattggaatctagaggctatcttcttgttcacacgaatggcgggcttaaccaaatgcgcgctggggtaagtatggagtagtactctttgtgtttctctgcactcacaagtatgaaatactttaacgttgaatcattcttcttccattgcaaaattttacagatatgtgacatggtagctatagctcggattataaatgcaacacttgtagtccccgagctcgacaaacgatctttctggcaggatactaggttaactccatgttatcatactttgttttttcttcatgttttcttagcattttcaagatcctgttttaacatgttattgttttggattgatacgtctataacagcaaattctcggatgtttttgatgaagatcacttcatcaatgctttatcaaaagatataagagtcatcaagaagctcccaaaaggcattgatggattaacaaaggtggttaagcatttcaaaagctactcaggattgagttactaccaaaatgagatagctagtatgtgggatgaatataaagtgatccgagccgcgaaatccgattctcgtctagcaaacaacaacctacctcctgatattcagaagctgcgatgtcgtgcttgttatgaggctctacgcttctctactaaaatcagatcaatgggagaagtaaaactattgatttaactataaggctataaccatctcatatgtcatcttcctctcttacagtttgagtttcatgcagcttttggtcgataggatgaggtcttatggtctatacatcgcattgcatttgaggttcgagaaagagatgctagcattcagcggctgcaaccatggtctatccgcttctgaagctgctgagctaaggaggataaggtaaccaaaacagaatgtacttttctatgacatttcttgcgagttgttgtttttggagtaagaagattacgtgtttaggaagaacacagcgtattggaaagtgaaagacattgacggaagagtacaaagactcaaaggctattgtccattgactccaaaagaagttgggatattgctaacagctcttggatattcatcagacacaccggtatatatagctgctggtgagatttacggtggtgagtctcggttagccgatttacgctctcggttctccatgttaatgagtaaggtactaacaatgtttcaagcattttttggtttttttttaacgattagtaactaattattttgttcatggaaggaaaaattggcaacaagagaagagcttaagacttttatgaaccactcaactcaaatggctgcacttgactacattgtttccatcgaaagcgatgtttttattccgtcgtatagtggaaacatggcgagagctgttgaagggcatcgtcggtttcttggtcaccggaaaactatctctccggacaggtgataattctgttttcttgtttgttttggttttaagtcatgtaacctcttgtttgcttacatcttgttggtatttgtgattcaggaaagccattgtaaggttggtagacagaattggaagaggagctgagaaagataaccgaaaagtgtatgaaagaatcaatgagattcacaaaacccggtaagcaaaaaccaacatttcatagaactagacctatcaccataatgtactggctctaattgttgtggttataacacagacaaggatcaccgaggaggagaaaagggccagcttctggaacaaaaggtttggagagacatcgttctgaagaatccttctacgagaacccattaccagactgtctctgccagagagacccaagtaaagcgagataatagacatgacacttggaatttcaagtaaatttagcattggggataagtttcaatgatagtaataggtatattataggttatagcattatagacttatatcaaacagttttggtgattaatgaatgatataccaacttttatacatgattctgtttattacttcattctattattcaagatgtcatttgaaaaaataagtttcttatatagaaagcaagtacagtactttgttcatgtaccgcgtgttctctaaattataaagaacttttatatcttccaatgttttcttttgattggaataatattagtattatgaaaaaatattatatatgaaccttagagaaacagaagacaaaaatgtctcctggtactaagaatttgaagcttgccatagtaaagcataatcaggaagaacaacaattcagaaaaatcagatgatcctcaaaaacttatataagagaaaaatttgagattcataaagttttgttaaattctcacattttatgatgatgggaaccagaagtgctggttttgtaaaatcttattaaactctgcagtgtaatctcatgaaggtaacagcaaaagaggaatgatggcaatatgatttttcttcagggtagaggaccagggaatgttccattttctctttgctcgttccacctatcaacctgcaaacccaagagatagttcttgcagtattaagaagcagaactagcgagaaaacgtctagaaagaaaacagtactaattccatgacaatttgtaatcccaaaacagtgaagcagtctattttaaaggtttttctttctttttataactaatcagcaagtaactggaaccatgagggagtaaagaaagctaaagaaaaatgtacccattcgctggggcaaagagatcgataaaactttgcaaacttatcgcattctggagcatcatcacccttagcagctacacatctgcatatttgaaaacaatcagaaaacttaagacatcgagatcagaaagaaaaaaggataaccatagcagaacattggttttcttacctgtgatattcaacgtagcgagtgaaacaatgccttgtttggtttgttgtagggaaacggaaatcagcaggagctgtctcaagctgaaaaacaccacatgagccaatttgatcagttggtatcaaagatgtccttatcagaagagagttataacacaatcaaacaaagagcaagtgcatcaaagttagtctcttttattggtgaatggctactactgtaatataccttgatctcatcaggggtttcttcagcaacttcttcactagcgttttcgtcattattttcttcagcagcagcaggagtctcttcagcattgtcttccgctgcagcaggagcctcagaagccacttccgttgattcaggagcagattcagacttctcttcaactacagaaaccgcttcctcaacaggagattcttccttagcttgctccgtcttaacctcttcagcttgtgtagtaacttctggtgccacctctttcacttcaacaggctttgcacttgtgtcttgcttcacttctttctccaaatgatattgctgccaaaatcaatcaccaaccaaaagtattttcaaacgttagaccaaatgataccaacatagatttgttacctatggatgcaaatagtggtaacacaatccttctataagctattaatgttacttacaatgacaaaaacaaagtttggatttttcaacgcaaagtatcagcaatagctggaaagatccaatctttgttgacttattcaaatcaaccgattgagaaattgaaaaccctcatatgaattgaagagatgaaggaatctaatttagctcgttctcaaaatcgaattgaagcagatctaacaaaagtggtaaaagcaaaagaaagtctcaaaatcaaattcaaaatcgtaggattatacagaaaatcatagagaatcagctcagttttcagtagatcgaacaaagatcggatctttccagagagcaaatgagaaatgaggtaagatgaagaataacctcggagagcgatggagtttgagcgttcacagcatccgccattgaaagtgtgtggtcaaaagaagctcggagaatcttcaggtgactggatcggagaccaagaatcttttgatgataacactctgagagaaattgttaggtttaagctttctccaggatctctctatctggctatgtccttaccgacaaaacgacagtgttttgttttgttctaacataatttgggcctgttttactaagtccgctttaggcccaataagctctccactgatcagataaaagggatttggaaatcaaaattttcgccaacgaaatcgtttttttatctgtggagttttgcccttttgattgattggggaactaaaatttaggcttttggttaggagatgacgattttatgtgacttacgttagacttttattacaataatgttttgaaaatatgattttggaaacgaacacaatataagaacggatcacacgattcacaccatatataatcattgaagaaggcatatataaaccaaagcaatagttgcacttgcacacaacaacaaaaaaaaaaaacaagagccaaagcaatagaagcaaatcccaacaaagggacatcgaagataactttgtaaatttcttttattggtagatttttatttttttattttctgttaccaagtactatgttttgggacatagaagaactaggaagaaaattcaaatgaagataaaaggactatttatccatccatataatgcaacggatagagtttccctcagccaataaatggaaagctttgttaatttcttcaaagcttaattcgtgtgtaatcagatcctctagattaagctcctgccatttatatatataaaaaaaaaatcatatcgcatactaaaatcaaataatcataactttcaactttttatatataaatgataacacaaactatatataactaatatatacctttttcaaataacgatccacgagaataggaatatcaagtttgggtttcaaaccgccaaataaagtgccgcatacagttctgcctctgagaagatcataactacccaagcttattggcaaagccttttgttccatccccaatactatcgttttacccgatccctacaaggaaatcaataagaaaattggtttcggttttatccatgtaatgatgctaaaccaaatagaaaccggtaaaaccgtaccgggcgagtactcttgaatgcctcttccatcaaggaagctaaaccaatgcattcaaaactgtagtcagctcctacatctgtcatttctctaatcaccttattttccattatcattccaacaattacattagtttatttcagcatggttcgaattacaatgttgaaagtttttataagagtttgagctttgaagacatacctcgctaattgtcttctccccacacaaagcaggattgacaaaatctgtgattccaaatcttttacctactcacacatcagtagttataagtttgttttaaaaagtgatatggtaataatatgagcaaatatgtaggatagacatatatgtgtgtgatctgatctgctccaaacaattggagttcggatcagataaaaaattttgaattcaaattcgtatatcttgtgttgcgatattgtttgaatctgttaaatatattaaaaatacgaatcatgtaaatttaaccagtgttctaattagtaagatttcattaggaaatcaggtaaaccaaaatattgcaaaagttagaccaatcaaacctatttcaaatttcgcgggattgagatccacaccgatgatttttgcggctccacgcaatctgactccttctgcaacctgtttacgataactttttacaaattactttatactacaagatctttatattattttgttgttaaagttaaacaaaatcatcacatatatagtttatattaatttgaaataaatgtaccgctagtccaacagcaccaaggccaaagataacgacagtggaaccttcctctacgtcagccactttccacgcagctccaagtcctacaaagtccattatcaaactcgtaaaaactgtagtagttatttatatcacacacccttaatttatactagtttttttttaaaacctttgttaaagttaaaattatcaaaaccaaccctacacaaatatgaaacgaagatgctaacctgtggcaacactgcagctgagcaaggccgctatatcaacgggaatttcaggagatattttgacgagatgtgcgatatctacaacggtatattcagtaaaacttgagacaaagatgaaatggtgaatatcttctccacgagagtccttgaatcttgaagtcattccatatcgtcttgtgtttgataaataatcgtttgtatattttgtgcaccagttgctctttggagatatgcactctttgcattcttcacattgaggatgaaacactggcaaaacgacgtcgccttgtttaaatccgtctaccttttctccaatactctcgaccacacttgattacaatatcaagttagacaagaaaataaaaaaattagacaaattcttgaagatcaagaatgaaaattaaagaagtaaatgaagattcacccgactgcttcatgacctagaatcctaggaaatcttgcaagcggtccctggaagaataaaaatgttcgtgaaatcgagttttttgaactatagatttatgcgttgactttttgcgatataatgtaaacttacactgtctagtttccagaaagtaacatccgtgtgacatagagaagtgcataaaattttgattctgacttcgtaagcttgaggtggatcaacttggatctcttctatcaccaatggttctcctgcttttcttaagattgctgctttgcatcgaatcggctttccttcagtgattgaagccttgtccatggtgaacaatgatggagggatctgagagagagagagtgagagtcacttgctcttcttatattatctccccaaaaagattctcttgtttttgtcaatagctcatttttctaacaaaatcccttactttagtagctgaataattaagcacgtctctagtctatttttaaagttttctctataatgagaaaggggttggggaggacgtatctttattttttattctattttaagaatttatttaagatgaatttttgaggataatgaaaacatttgcttaatttcagattgtactaatgaaaacacatttcgaacaggtggttggttaatacatactataaaagttagctaataaatatgttttcttttaatcttgattaaactacaatctacaacaattttatttaactttatgtttgttataccaaacgtgagaaatgaacataagtacacgaattcacgtggtttacattggggacgtggtcaatggaaaacaagaggaaaatccataacgctaattcaactgtaaatctcgcaaaacctaaacgcaaaaaaaaattaaaatctatatcgttgggtcggtccgtagaagccaagtgaaaaatctcatttttacataaaaatgatgtcataaagtgacaatgtgtgtgtgttgaaactactttttaccaaggcttttgcagcgaccgaatgtatcaagaagacaagaccttaagatttgcatttcaatgatagaagcaattagtactataatgatcattgatcaacaaatacaaggtgtcataatatttgtaaccatcagaaaacacaatgttaaggggtttggactaccaaatgataagtttgtagctcgtgtggaaagaacaaaaattgcaaggtaacaagacaaagcatcttgaaagacaaaggaagataatctaaacaagatccacgagaagattataaagtgcaaatatgaagctggatagttacttatccatccatagaatgcagcggagagactttccttcctctaataaagcgaaagccttattaatttctttgaaattcagttcgtgtgtaatgaaactatccagattgagctcctacaatttgtaggaaatatttaatcccatgacaacataacatagaggttggaaatttaaaaaatgtaatcacatatgtacaataatttaccttttttaggtaatgatccactagaatgggaatatcaagtttggatttcagaccaccgaacaagcttccgcaaataactctgcctcttaaaagatcaaaactacccaaactaattggcgctgcatgcttctccatccccaacattacagttttacctgttccctgatttttatttatatatatagagccaattttgactaaccattagaatgatatactcaattgactaagattcggtatgatccggtttaagcgtaccgtgcgggtactgatgaaagcctcgttaagtaaagaagctaagccaacgcattcgaaactatagtcaactcctccttctgtcatttctttaatgacctattttttttttgtatttttcaaaaaaaaaaaagtaatagtatttgttcttgtcaatgtattaataagttgttgtaacgtttatttaactccatctgacgtaagatatatgaagtggtgtaagatatttgataacatacctcactaatcttcttttctccgcataaggtcggattgatgaaatccgtaaaaccaaatttcttacctgatcaatataaataattataggttattataggtttatatatgaattttatatttatcaaagcaaaagtatgatttgtttctctattttaaaaacttataatatattgaaactatttttgatttatgtgtgtattcatgaaattaataactactacatttggctgttttgaccaaaaacagatggacgattacacttgtcaaatcaacattaaatacagtctacaccacatataatccaccaccgtggtcagaataagcccacaccaaaaaacaaaaaaaatctttctaggaaattaaaagacaaaaaaatatacaacacgactttacctagctcgaatttatcagaattggtatcaataccaataatctttgcggctcctcgtagcctggctccttctgcaaccttttaccaaatcatttaaattattcaattatcacaatcatattactattttatatataaatatgacaaaagaaaaggaaattttattgttaaagtagtttttgtttcgtttatagaagaaaaatttaacactaagattggaaagaaaaatgataccgcaagtccaacagcaccaaggccaaaaattgcaatggtggagccttcttccacgttagccaccttccaagctgctccaattcctgatccacgtgacgcaacatcaactcatgcatgtccattttataaaataacaattgacccctagtttcttcttctttttatgtttttaccccggatataattaaaatttctataccaaccctactaaaagaagagaagaagaatgaacctgtggagacaccgcagctgagcaaagccgctttatcaacggggatttcaggagatattttgacaagatgtgcaatatccacgacggtgtattcggaaaaacttgagacaaagagaaaatgatgaatcacttctcctgaagaatctttgaatcttgaagccattccatatcgtcttgtgtttgatatgaaatcttcggcatatctgtcacaccagttggtttttgaagatttgcagtctttgcattcttcacaataaggatgaaaaactggcaaaacgacgtcaccttgtttaaatccgtccacgttttcaccaatgctctcgaccacactggtttaaaatcccaataaaaacagcaaatacatgttattatgctatagtaaccacacccaaaaaaaaaaaaaaaaaaaaactgattaggcaaattcttgaaaaaaagagtgaaaaaattgaaattaaaattagtatatcaagattcacccgactgcttcgtgtccaagaatcctaggaaaccttgaaattggtccctagaaaagccaaaaaagattagtgtgaaatcgagttttaaagaaagattctacgttgagttgtgatatagtgtaaacttacaaagcttagtttccagaaagtaagatcagtgtgacatagagaagtacataaaatcttaatcctaacttcataagcttggggtggatccacgtggatgtcttcaatcaccaatgcttctcctgcttttctacatattgctgctttgcatgtaattggtttcccttcgttgctagagaaaaatgtcttgtccatggtgatgatgagatacacaataggtgagtggacgagagagagagagggggctcttgttcttcgtatcttatcttttaaagatttttcaactgctacaacgcttattaaatatggaatttagtatgaattttttaatcaacgatacatatttactagagtgacacgcgacatatacaatagagttgtacatgtgtttaaaggtatgacattgcatttctagagtcaaaacatgtgtttacatttttttctttttcaataagagcattaacaaaaatagaacttaagagaaatatgttactaaaactgagaaattagaaactaatattcaagatattcaattagttcgagtatatgtgtgaagtcatggtctctagatttttgaagactgcatatatattcttaatttgatcaccccatcatgatttttcccatatacatgagtattttctaagcattaaaagattttaaaatttcagacacaattgttttttaatttagtgtgaaattatattcaaaaaaaataaacttgttctacaacttaatgcatacttgttttaaaagacatcagtaaaaaccaactagatctttttatgcttgtcttgattcaaaccactcttgaatacctcccacaaacttcatctctccgccactccgaattatactcaatctattacgaatgttcttgtcgatcactctttttagatatctataaattgttttggacagcaaagtatcacaattactacatggtcagagattcataataacaatatcaagtgcataatttatagtatttcttccaaataagaaagtgcaagttacgttatttgcagtttactaatgagcattgaagataagttcatcaatcttagaacagtaataaagtcatgaagtcagaatcatatatgtacaatgtgattcgggaattttaatattatcacaagcattgaacagtcgaagttgaaaaacaaaaaatcgctggatgggtcttgtttagttgattacttattttttttttgtttgataaagagggtcttgttttacttcctttccatataaacaagtaaacatgaaaaggtttccaaaactttatattcaacacttatgttaatgaagtaaattacttgtttatatctatatataaataatataaacaagtaattaaaaagagaaaaagtaaatttgactacttggcaaacaaaagtatttcatttattttaattattacctctcaaaacatatttatgacctgtacttacttattaatttcaaaagggaacaatttaatatttttgaaaaacagttcatgtaaaagaaaactaaaagagctcatttggtaattgaaaatgtttactttaagtgatataaataaactatctagttttcaaaattttaatttatatttactaagaattaattttactattatataacaaatttataaataattaattaatcattagaagataactgaaagttttgaatttcgcgcgtaatttttcgcgggtcctattcctaatttaaattcaaaagattacctaaatagtaaaaataaaataaaacagaaatcataatatagttgctatatatacactacatattttcaaaccaaatgtttttggaaatctaattaatgggacttgggaagataggaagaacatttgctatatatatctggttaattcgtgagatgaagcacaagcaaaataagaaaaaatgaaaacaagaaaccagaaaattaccaatttacctcaaagtttctcaatggatcttgatccaaaccaaactaacaatgtttcctctgagagatcaaaattgaaagctaaagagccggtgatcttgaaaatccacaaacaccattttaaggagatggttcatcgcctcaccggctcaacctgtggtcgtcgtttcgacatgttacgtcctccgccattcgttgttaacaatagcccaccaagtgcctctcgtattactacacaacgtccttatcgatttcctacggtcccgactatgaccgatcccatgatcacctcaacggttgaatcactcaacactcgacctccgtctccaccgtctcttcctcgagagaaagattcggtggaagcgcgagtgatggaagacgatatgaaccaggaacagttacatgggtctatgttgcctcccctgttcgtaaatggtgatgagtgccaacaacaagagagcattcctcctccaccagttccagcgaacattacaccaccaccagttccagcgaacattacaccaccaccagttccgacaagtgcaccgttcggtttttttgagtgggttatgtctcctgataatctacaaacggagaacattcaacaaccaccacttccgacgactttaccgtccggatcattagattgggccaattctatgaccgatctactatccgagggcattcctccaccagttcaggtgacttcaccggacgaatctttatattggcagttgccagaatctctgaacggtccactctctccgagcttgatgttgtctccagttcaacgttctccggaaaattcactgttagggagtgtagacttgccaaatcctctcaacaatatacgaccagagaatgttccaccacaagtttcggcagcttcaccgttatggagtctagactgccccatacaatcagagaacgttctaccgttagtttcagcgacttcaccgttagactggccaaatcctcagaacaatctacaaccagagaacgttccaccactggttccggcgacttcaccgtcaatgagtctagactttcctaactttcagaacactccaccacaagttctggtgacttcctcgttagactggccaaatcctcaaaacaatctacaaccagataacgttctaccggtgacttcgccgctagattggacaccaaatcaactagagaactatgtacaactagagaacgttccaccactagttccggagaatttaccgttagacttgccaaatcctcagaataatctacaaccagagaacgttccaccattggttccagagactttaccgttaatgagtgtagatttgcccaattttcagaacactccaccaccagttccggtgacttctccgttagggaatctagagtggccttttcaccgatcaatataccttacctgatcttcctgtcgtctccaacctttatgccgggctccttccaaacctgaactagtgtttctttttccttctatcgttggtgtttttggtttctgtttctgtatcttttgtttcttgtttctgttgtgtatcttcgtttttctatgtgacaacttctttgtgatcattgctattttatctggtgtactttgaaaaatctagcaagccccaccaaagctctctctcttttttctttctttctttgaagtacattgatttcataaccggtcaggtcaactatttacctttcaaagcagagaaaacaaaataacgtttaacaatgtgaaatgtttttttctctctaaatcacatgaaaaatcgcaaaatgttataaatgaatcatacattaaaacatctgcagaatcctcctgatccaaaccaacagagaataatcgtaagttgaatcatacatttataatagcaaaaaggcaaccttcagacagaaactccacagaggctgcatgatcaaagtgatatccttgtaggacgactcttcgcctagctagtgtgtttaacaagcaatggcagcatcaaaagcctgatcatacacacacaaacacatataacaacaacaacattcattttcttgcaaaacataatagaagcaaagctggatcttaatgagtagttttatgtttttggtaatggctcttcaaacgtaaatctagttcaaaccaaaaatgtcaatatttagctgctcccaaaaaaaaatgtcaacattaagcttgaaaaaatcctatatcaatatcctaagtttttttttttgtttccaaatatcaatatcgaaagttaaatgtatatgggtttgtttaaagcattattattttttgtttaaatttagagatgggtttgtttaaagcattattattttttgtttaaatttagagggagctttgatttttctattgttggactttgtgagcattatagatttgtcctcttataattgtcgcaaaatgtccctctgattgttccagatcatatcttgacttcaacgtttatctctctatttggtaaattaccaacacaaactactaaattttcaatttttgttataatgaaaaccttttttttttgggctcaacatacacaaaactgttcacaacataaataaaacccaaccatccatgattatattaaatccaaaatggaaataatactcactaacaacattaaaacagaaaccttaagcgttcttttgactcaagatttgaatcaaagataaatgagattgtattaagttcacacacacacacatttatatagatagatattattataagcaatgtttatttgattagagggcaaaagccttttgagacttgatgcgtctctttctaagacgttcggcgatgatgaaggagagctcaagagactgtgaagcattaaggcgaggatcacagtgcgtgtggtaacgtgaacccaagtcgtcgaatgtgactgtgcgtgaaccaccgatgcactcggtcacgttctgaccagtcatttctaggtgaattcctccggggtggctaccttcttgctcgtgcacgtcgaagaaagctctcacttcagcctatatattttcaattaacattagatgatttgcaataatacaagaaaacaaccgattttgctttgctagtatactaatccaagattatttttttcaaatcaaaatcaaataactaactctactaaaattgcttagtttggtatttaatttgagcaattgtgtcacctaacttttataaaagcatttgtgtcaactttggcccaaccaaagtctgatatttttgtcatctttcactatctctcacctactaccacaatcatcacatactaatatattttactattttggagaaaaaaagaaaagtattcctatttctatcatttgcaatgatcaaaagaacctaaacattggtataacaatttgtaatcattagttagagttttatgagttaaaaaacgtaccaagatggcgtcaaagggacgagtcttgagaccacaaggagccttaatggtgtttccgtgcattggatcactgacccaagtcacaatctgtccagcacgtcgcacttctctgatcaaatgaggaagcttcactctcatattctcagctcccattcttgtgattattgtaatccttccaggcttattgtcagcattcaagatctcaatcaacttcactagctcctttggatccattttatcactcacctataccaccgcaaagatctcaatcagtctcacaagtgtaaaactatagcctgatgagagaagagttagggcaaaacaaaccttgattccaagaggattagcaacacctcttaagaactcgacatgggcaccatctagctgtctggttcgctcaccgacccaaatcatatgggcagaacaatcgtagtagagaccagaggttgagtcaagccttgttagtgattgttcataaggcaagagcaaacattcatgagaagtccagaagtcggttgtttgcattatgggatgatcgagcgttaatccagcagcgtgcatgaaaccaagcgcttcatcaacacggttagctagttcacggtacctgccaaaccaatataacgaatttaaacacacatacccaaactgtagacaaaaatacccaaatatcctacatttactcgataaggttggaacaatgattaggtttatcagctactaaaaaaggaaaaacttctaaactctttttcacatccactccataaatgtgacctaactagttgataccaaataaggttaggtattcaaaaagtgaacactgcatcaaaataagccaacacaagcaataaaaaggatgtagagtcagttatatgatcccaaaactagacctgattgtttcttttcatttgcgtgtaagaaaatcataacatgaaaacgcaaacgtaaacactcagatcttactcacgactacaacaaatccctaactattatacattccactagacacaaacaatcaagcatctactaactttatggcaatcaagagatactaatccaaaagcttaaaagttttgtttaagttacctgtctccttgctcactacgttcagtgaaatcaagattccattgagtaactctctgcatagcagcataaccaccagtagcaaaagctctcaaaagattcaaagtagctgcagattgacaataagctctaatcatcctctgtggatcaggaatcctagatttcgaatcaaacgcatctccattaatgttatctcctctgtaactaggcaatttcactccatctttctcctcaaacgaatccgatcttggtttcgcaaattgacccgccattctcccaacctaacaaactcaaatctcatcacataaaaatccaaactttattcataaacaaatcaaaaagtctcaatctttgaataccttaacaacagggacttgacctccgaacatcaacacagcacccatctgaagaagaatcctgaaagtatcacgaatgttattcgcattaaactctttgaaactctctgcacaatctcctccttgtaacagaaacgcttcacccatcgctgcttgtcctaatcgttcctcaagcaatctagcttctccggcgaacacgatcggaggaaaagcttcgatcgtctctagcacagcttcaagcgcagctaaatctggatagtccggttgctgtaaagctttcttcgtcctccaactctctggtgcccattttcctttacccacattaactccaacgggcttcgtcaacgttgccggagtcgtcgtcgccgccgacgccgatgaagcagctggtgtttttgggtcggtttgcacggcggagatccggaaagaagtgggtctggagacggcggaggagaagtttggttgacggtggttgatcatcgatgatttgaccgatgatagattcatgcttccattcataagcgccattttgataaaataaaataaaaagttttgatttttctgatttgggattggtgttaagatttcgacaaatgtgtgtgtgaaatgttacacgaaacctgagaagtgttgagatgagaatttgagggttttataaacgaaatcggagatggtggtggtgtttggtgaagaagaaggctaatgtgttgttgtagttgtggtaggtaatttacttgtaagggtattattggtaattccatgtttgcgattgttagaagggtagatttgtcaattttcattcaaacgataaccggctaacgtgtccgtaatcaaaaacgtatccggtttagcttcgtgttgaatgggcatgtctttgccgctaacgttcggtgaaattcttataatcatgtatactttattttattgatttggagactcaattgtattataaaacaagtttttcttattaaaacgaagatttttcaaattttattttacatgtgtcgaaattgaagatattaggtcgaattgtaatgttttttttttgacatctttgtattgttaagttattaatgtttaattctgaaaaactaaattttttatacgataagaatataaagaaaaaagatgtaattcaattaaaaaaagtaactaaaactaaaagaaagttatattgaatattgaagcaaaattagtatgggatattttatagagttatatcaaacattatttattaaaagtttttttaaaaaaataatctttaaccgcgtatagtctttataaatataaacacggcgttggtcgtggtcttatatatacaaatttaagatggtcatggtcaagattttgtatatttagttatttataaaagttggtcgaatgttgtgttatattaaaaaaaaacatgggtgtattaatttgtacatatttgaaatagtaataaattaattacacttataagtagattgattgataagaataagttaataaccgatcgagattaaatgagactgagtaaagctagcttatctcacctaacacccgtcgtaaatgacggaaccccacctttctaatttcgccaactcccacatttgttataatcttatttattgttcatttgtaattgtttatggtttcaaagtctattcgatttctacatattatttattaccaaactttttttgttggtttgttatattagtattgatttgtaagagttgtttaaatctcatccaatccgtggtataatgcattcgtgtgtgttattaacgattattagttctatatttgtagactgaagactgaaaaactttccgttcatatgatcatgccttctcgtatacgatcaaggaccacattcaatggacatattcttggtatttgttatagccttgtaggtattattagtaaacgtgttatgcagacttggaaaatagaatgaaaatgaagagcatattctttcgtgttattctcctatagatcacaaaatggaccgtcgatgtgataatgatctggtgaggtagaccctacggagtcttgttcttcaatatgttggtggaaaggagagagagagagacacacacaaaatgttaggtgtgttgactttggggttatgtgcttattacaaatatatatactagtcattagcaacgtcagtaattatacttcttgtaatttcatgaaattttgtgttctttgcgactttttttttttttctgtttgtttgacagaagtcagaaataatgtgtcagtgttcttgttttctttcaaggaatccactagattaaaagtcacttggtatattagaaaatatattagggcaagagttaattacgaatattaattaatgtggtgttgttaagacttaagatatataagacagttcaagcatagttacataccaaatcgctagatatgtttccatctctaattttctactgatttcaaggccatctgttcatgtaatgttaagtaaaaaaaaataagttctagcaacgttacatgttttacatatcttccacgcgagagataaaactgactttcaacatttaaggatcataacaattactccatgttgatattgatgtacgacgaaatgtagcctcaactacaaaataaacggcagaattaacgtatttgataaacaacggcttattggattaaataaagaacgagcttacactggaccctagggatattgataatctgatactaagatttgatgggctaagaaactccattgggcctagtagtcatgctccctaaaacaggtgacaatttttattctgaatttctgacgcttcatctcatgtttgcggcacattagagcaggtccattgggaagaccttatgagtttcttagaagaaaactaaagaaaaaaagtcaaaaattaattcagaattgtggtattaagcaaggttcgcaccttgcattaggtgttttttggtttttaaggttcgtatacgtgtcattctcttattggaagactatacaaacaattttttttttccttcgttgccttctctcctccttgtttgctccgaagctctacgcttctcatcttcgtctcccttctgcaaatgatgaactctcttctcatcatcgtttctcatatcatcatcgtctctcgatccgtcacgatccccatcaagttttatcacgtcttcatcaccggtagatcaagcggaatcggtgaaattagatacgtttcatgagcttgcggcgaatgagatgatgcgttgtgcagagcacggtggagaacggtgcggaggcagtgagcaagccggaaaataaaaaatgggggcagaaggttggatacgtgcgagatacttcggagaacttgcgacaacaaatggtaatgtgtctctatacttctatttgagacagaatataagggaaacaagcaagattgatgtgtgatatctttagaagtggactcaaatggttagagctgtaggcttggtatcatgatggttgtcgtatttttggctggtttagataataggaatgaagctagattgcctttggttggggtgtttgtggctacaagtttttggtttttgttgagcgcacacaaggtgtttgataaaatgtcaaagagaaaaacagattggatagatgcaaaattgttgttggctaaagaatgagtaacagatagcaagtaggatttaagtttaactttgccttctatgtgagagctttgtgttgtgtaattgtcatgtttgtgtgtctaggtgtgatggatgtatgggttctttcctctccttagctgcgtatgatggctgcagcaataccagcaacaacccctgagaaagatttcaattccttacaaagttatgtatgcatgtcacaattcaggccaaacacaaaaaattctgtacaaggacaagcaacgcaagagaatccaaaatccgatgaaggagatattaaaacaattggaaatttgtgattcgaggttcctgtgcgtgtcaaattagctatgttcttgtaattgtcattttttgtttttttttaagaaacccacttaagattctaccattgggaaataagattgaataaaaactctaaacttccatttattcaaaatataataatataaaattttaaggaatccttaattaaggtgtttcaatgggggtgctcttaagagcatcctcaatgggaggatttaagaggtttcttaggttaataaagggatttaaattaaatgtttaatgatgattttagcttagaggccctcttaccttagaggctctcttagaataggtgtggaggtgacgtggcattattctcgtgtttcttcttcctcctcctctctctctattccgcgatcgaagtgaaatcggaacaaataattctcttgtccggagtttctataatcctttcaattcctctacttataattcaattttctctcgttaatgtatctgatgcttttgtatacacaggttccattcgataaaatagtttttttttccaggtaagtttcatgatgattatgtgttctctcttttatatttcaattgtaggatatatgtaattgttttgtgtcatgggattgatttgtgttaatgcgtttaggaacattcatgggattgatttgtgtcatgtagagagattgagtttgcctaaattagctcatgacttttttggtgcatgtactctttacattacatagttctctaacttctgtctgtgatgaaacgaatgaatccgatcattcttctgtctttagtttaacgaaagagatacaaaatatagtgatgtaaccactatgttaatagctattttgtcttatatttttatctaagctcatgcagcttaatcttatatggtgatgacaaatttaacaattggagacaaagttgtactttatttccagccatgtggataacctcccattgaggatggtctaacatcctcgtgtttcatactaatcttttttttgttatatttagcttatccaattcgcttgttctttatcatccgttcaaccatttataccgtatacgactagtactccaccaatttatttcataattgcaaatgaaaactcgagtcaaacccaagtccaaaagggcaattcgaacttggttattgtatccaaattttgaagtcaaagccatgcatcaacttggttacagactgtatccaaattttgtttgtcacggaacgtatctttcttctttgtcacggtgtatttaggcgtgggttttgcactttttgtggttttctttctttggtgaagttcctttaatttgacatatggaatagtggaaaaaaaataaaaggacaaaaacacttaaatttcccgaacaaggacaaaaccttaatagttccaaaattattaaatttcacagaaagttagaaacaaccaaaggtatccgtagaggttaactttaaaggaaaataaagcaagtggtccactcccacgtcgatagtcaacttattgctcttttcgacataatttacctccttattaaatctccttggactagtataactttctaagtatgcttatatctttcatttaaaggcgaaaatttgaaatctgttaattaagcagacactaaattccagattaattattcggcacaagacaagcaaaatagataggcacatgtgccttggaagatgaagatatacttggaacgtgatcatgatctggtgccacggaaacctatatattttgttgcacgtatccctaaatgattaggtccattcggcatatctggcattgtagattttctgcagtacgctcaacttgtagatgaacattatcttatattaggtttttatgaattttacacataaatggaaatcccgggctcatggcaggttttggatactattcacacgtgacgtaatttgtggacaaccaccaaggccaagaagttattagtttggtctcttttttcttctcttctttcttctcttctttctctataaaatggcttatttcaaaggcaaaccaaaactcacatttgttcattacaaaaagaggaaactgacaactgatttcgcgcaagagaaagaaaaatgggatctcagatcattcataactcacaaaaaccacatgtagtttgtgttccatatccggctcaaggccacatcaaccctatgatgagagtggctaaactcctccacgccagaggcttctacgtcaccttcgtcaacaccgtctacaaccacaatcgtttccttcgttctcgtgggtccaatgccctagatggacttccttcgttccgatttgagtccattgctgacggtctaccagagacagacatggatgccacgcaggacatcacagctctttgcgagtccaccatgaagaactgtctcgctccgttcagagagcttctccagcggatcaacgctggagataatgttcctccggtaagctgtattgtatctgacggttgtatgagctttactcttgatgttgcggaggagcttggagtcccggaggttcttttttggacaaccagtggctgtgcgttcctggcttatctacacttttatctcttcatcgagaagggcttatgtccgctaaaaggtacgtattcttacattgattattgatttaaatgacgttatgatattaaatttaacgtaagaacccttaagacacctcgagcagggtgagtttttaatctgagatatatcgtttgtatattggataaaaaatatccatttagctaccatatttagcgaagccatagactatcctaatcgatccacccgcacgacgagaccggtcaagactcaagatggtcatgttgtaatatatactcaattttatacaattgttacattgtagcctaggtttttgagcattactaaatatatagtatcaagagaaatgtccatattttaatatatacataacgtaatgaatgttttgatatgttttttatttcgatgcgtttgcagttttcttgtaatatatatattacagttttcttagccaaaaaaaaaataaataattagagaagatacattgttgatttattttaaagcattgatatctttttaaccttccgcttcccctatccgctggtgaattttgagtgacattaaagattgaacagaaatcccatattttattttgttaagagatgcgtagattcttaactttgattacagtttaaaatcatgttaaaggaaatgatgatgttcaaaattccatttcgtattttacataaattttgttgttaacttatcttaaagttatatgatatttgcaaacgtcgtctttctatgatttttattattagtttgaacgtaaacaaaatatatttaatatttgtgaaaaggcttgaaaattgtaaaagagggatttttaaatagtaacaaattttaggtgaactatagcgtatataaaagataggttatttatttgtgtaaagattatctgtttgtattggttccaatttttttcggtgacctttaataacatagatgcatcacacatgaacatttggtatgaaaacaaaaagataaccaatattgccaaaaaaaaaagaaggagagagacggcgggaaagtttgttgaggaaaaaaataaaattgggtaatatccaaacatgaaagtgaaataaaccgtaaaaaatcaatgcaatttggcatatcattgtccagggaccaggccactctgtctttcggtcatattcataactctttctggctctgaaattacacaatgaatgccgtgtcctagagaatcatatagacgtggatgcttacgtaaatgcataattttttctaaaatgcggtgcttgtatttttattaactaatatcatgagacttatcttgattaataaatggtgattgatttggcagatgagagttacttgacgaaggagtacttagaagacacggttatagattttataccaaccatgaagaatgtgaaactaaaggatattcctagcttcatacgtaccactaatcctgatgatgttatgattagtttcgccctccgcgagaccgagcgagccaaacgtgcttctgctatcattctaaacacatttgatgaccttgagcatgatgttgttcatgctatgcaatctatcttacctccggtttattcagttggaccgcttcatctcttagcaaaccgggagattgaagaaggtagtgagattggaatgatgagttcgaatttatggaaagaggagatggagtgtttggattggcttgatactaagactcaaaatagtgtcatttatatcaactttgggagcataacggttttgagtgtgaagcagcttgtggagtttgcttggggtttggcgggaagtgggaaagagtttttatgggtgatccggccagatttagtagcgggagaggaggctatggttccgccggactttttaatggagactaaagaccgcagtatgctagcgagttggtgtcctcaagagaaagtactttctcatcctgctattggagggtttttgacgcattgcgggtggaactcgatattggaaagtctttcgtgtggagttccgatggtgtgttggccattttttgctgaccagcaaatgaattgtaagttttgttgtgacgagtgggatgttgggattgagataggtggagatgtgaagagagaggaagttgaggcggtggttagagagctcatggatggagagaagggaaagaaaatgagagaaaaggcggtagagtggcagcgcttagccgagaaagcgacggaacataaacttggttcttccgttatgaattttgagacggttgttagcaagtttcttttgggacaaaaatcacaggattaactaaaatataagatgatcatcgaaatgtattattttttctataatgattactaagtaagtgtttattttgtttctattatgtgtttcattttataagatgttttaaattttatttttattttgtttttcaaatattaatgtttcaaatttcgaagatggttttctttcctcgttaatttgaatttttatattttgaattgagaagattctagcaatttgatctgagacttcatggcatgcaatgctatcattatcaactttgaaatgagaatatactagtcattggtgaaataatggttaaaaaaaataaaatttactcttaatttctggttagtttagagaattttttttaactagttaatagatcaaggtatcaattttgatccttcaaatagaatctagatgcaaatttccagtccgatctttacctcactcatcttgttattactgctttgttcacttcatcacctaatggcttaaagtcgtcattactcatatttattacgtcttgaatatgtgctttcgaattcgctcatcttcttttgtacattaattattcggcacaagcgaaaaagatacataccttgccatggcacatgccttgtcatcacaaatatatgaactcataattaaaaacctaaagttcggttacaaagcatgaatcataattgttctttattaagcgatgggtgaagtcttgaaattttagtttgtattcgagttattttttgtgttttgtttgtaaaagtatagtttatattgattttcttttaaaaataactatcactaacttatcctttcattcggtatatatttggtatttcaatccatttttgcttttgcgatttcaatactccttgaatgaaattatccaagtcacgccattctaggatttgttttgacggttttgtcgtttttattcgtagacaagtttcatcaattactatgacccccaccgaagttttttctctgaatgtgatgtcgtttataaatttaaccgtaggtatcgacttcgcagcagtgattataaacttttaacacggataaccaaaaatatgtccggataaccaaaaaaactggcttttttaaatgtgttaatcatattgatatgatgataaaagtcatattgtacggtagtcaaaaactcaagattgatttttctaaatattttatagttagttttatagatttacattttgcatctaaaaataacagtgtgacattgtaacagaataagtttaagttcaaattttacggtttcctagtttaatatttataattttaaatcataagcataacttttgcttaattgttttttaaccagaggattttaaacttggggattttgtatgaatttactcacaaagaatgtagtcatgtacatattcgagctaaaatagccacgtgcgataaacacatggactcaccgttttcctataaactggcgtacctcaaagcttaagctaagcctacactagttagatcacattttgtcttttggcaaaagagagatagaaaatgggatcccgttttgtttctaacgaacaaaaaccacacgtagtttgcgtgccttacccagctcaaggccacattaaccctatgatgaaagtggctaaactcctccacgtcaaaggcttccacgtcaccttcgtcaacaccgtctacaaccacaaccgtctactccgatcccgtggggccaacgcactcgatggacttccttccttccagttcgagtcaatacctgacggtcttccggagactggcgtggacgccacgcaggacatccctgccctttccgagtccacaacgaaaaactgtctcgttccgttcaagaagcttctccagcggattgtcacgagagaggatgtccctccggtgagctgtattgtatcagatggttcgatgagctttactcttgacgtagcggaagagcttggtgttccggagattcatttttggaccactagtgcttgtggcttcatggcttatctacacttttatctcttcatcgagaagggtttatgtccagtaaaaggtacgttttcttgcatttattattgaattaatcgacgttataaaataaaatttcacgtaagaactcttaagacaccatgagcttggtcactttatttgcaattaggcctagaaagtgatgttggcctagaactcttatttaaccgaatctcaaagtacaaccataaataaagcttaatgcaaataggccaacatcactctctaagccatttgtttgccaactagctctgaaacaagactatcactataaaatacattaaattgtgtatgctaagtctgtgcattaattttataaataaatattgagagataaaatgataaaataaagtgtgatggattttgcagatgcgagttgcttgacgaaggaatacttggacacagttatagattggataccgtcaatgaacaatgtaaaactaaaagacattcctagttttatacgtaccactaatcctaacgacataatgctcaacttcgttgtccgtgaggcatgtcgaaccaaacgtgcctctgctatcattctgaacacgtttgatgaccttgaacatgacataatccagtctatgcaatccattttaccaccggtttatccaatcggaccgcttcatctcttagtaaacagggagattgaagaagatagtgagattggaaggatgggatcaaatctatggaaagaggagactgagtgcttgggatggcttaatactaagtctcgaaatagcgttgtttatgttaactttgggagcataacaataatgaccacggcacagcttttggagtttgcttggggtttggcggcaacgggaaaggagtttctatgggtgatgcggccggattcagtagccggagaggaggcagtgattccaaaagagtttttagcggagacagctgatcgaagaatgctgacaagttggtgtcctcaggagaaagttctttctcatccggcggtcggagggttcttgacccattgcgggtggaattc

SEQ ID NO: 49 - DNA, 83163 bp, Arabidopsis thaliana
agtccttgtagctttggcgtctcaggatgtagcagtgaaactctttcccatgttgcaggtttcccacccgagcaaaaagagggagaatgctagcaagcgtaatgtgatttgggtgaaatccagagagcaacatctccttgagcaggaaagaggtttcttctgatctctcgttgtatgcaaaaccggaaatgatagaattccatgtactcaaactatttgcttcaacctgctgaaacactataaacgcgtgcctaagatcactgcatcttgagtacattgtgatcaacgaattccgaacattgtcaatatcatgggaaaaactacaactacggatcacaaggcaatgaaatactttcccccactttaacgctccaatgtgtgagcatgcctttaaaccattaatcatagctacagaacctattcttacattgcaatttctcatcccaacaacacaattcaaagcccctatgtaatttcctgcctccaaacaacctccagctattgtgttccaagttacaatactcgcttcgacaccagagagatacattctatcaagaagcttaaaagcttcccctaacttttcttctgaagtataacagttgattattgcattccatgagacagcatccctttcagacatcctgtcaaacaatctccgagcaacatccactttaccaaatcttttatacatagatatcaacgcgttgcagacatacaagttacacctgtgagagctaacctcaatagagccatgaacaactctcccatatgcaaaatccagtaatgctgcacaagccttgataacagacgggtaagtaaattcatccgctctaattcctttactcatcattcgcttgtaaacagaaacagactcctgaaaccttttgttcctaatatacgaaccgatgagcacattccacggcaagggatgcaaaatctcagagttctcagtaatggtctgagcttcgtcaaggagattaaaagcagagtagaaagtgaccaactttgggaccaaaacagagtcaaactccaaacccgacgagatacaatgagcatgaagttgctggccaggaacaaactcattaaaacccacacatgtagatagaagagaagctgatgaatacaaaacgaattcatgagaaccagactggtagcgaagtagagagaaagttctgaaagcttcatataattgaccatgggaaatgcaatgtctaaatgaattgaaaagcacttgtggaactgattcatcatcatgggttttggaagtttctgagatgggtctcggcagctgtttccacgattgaggaataaacttgcaaatttcggatacagtgagacctctgagtatagagcgagaaggagaagacggcatatacagtaagctgcatatgatggcaacgaatggattttgattattgttccaagactagtttgatccatcaaagcgaaagttcaagcaattttgcttctccgtctgaaagtcaaaggaagaaaggtgagaaagataaaaaaaaagtttcgttgaggaatttcatcgaacatgtggtgagcgaaacataccgtatacagacgaaacatggaagtataagtacatctagagaaacataaaagagataagacagatgtcatgtaggaagaaaaaggaaagaagacagtgattcggagacagtatcgacggaaccggacgaagcgaaagtaggagtagccgcgcgtgaaggttatgtagaaagagactcctttttgacatttattcaatgttctggcatgtgctcagatgatttgggccgcttgtttagatttgtccacttccagacccattgcaattgtaacccattttagcccactaaaatctgactgtaacaactttataaatttatggttttttcaaaatattaccaaggttaaataaatcgtgttagatgaagttggcaccagtttttgatattacaaaatgaggtcactagtattttttttataagaacttataataagtaatttattaattgcattatttcattaatattgattttatatatactgatacactagggtttttataaacatttaaattgtctaaaatcgcatagaccaaccgagtaggtgtgaatatttattgtcagatatcaataatctgctagacgtttctaaaaacatctctaatcgtaacttaccaagttacctttgaggtttcttctaaatgagtcggtgactatgataagacggtgtatcacatcacaatcaactcccaaatgtcagtgtcgagaaaaacctaatcaagtatcaactacaaagaattggttatgcatccgaaggatgaaaacacattaaatacattatgagactgggtttctccgtggatgattcgtgttttggatgtggttgtgtgtgaactaaaatttgacaaccatgtacatgagtcagcagacacagaagaagacaaaaaataactttttccagttagtttgggctgttgtgtctgtgtgttgtccgtggagaatcattaagtcattacagatctttggtcaaatgccaaaaataaaggaccccctttagacggtgctcatgtcacgcatgacgcaatttgtaaccaaaaaaggcaaagaaagtctttctttatcccacgtggtttaaccatcgacgacgacgttttcacattcttcatcggtggagtttgaatcgacttttgtgtttttcactgcttttctctatactattatgtcatcacctattttacagatttttatgaaacgaaatagaggatatatagtagtataaaattctagatttcgacttaagactttttcatataaaaaaaaatgaaaaacctataaattaaggtaacctaactatgatataccaaagcaacaacaacaaaaaataaagattaattttctattttaaaaaaacaaaaaatatcatttattttgaaaccaaacagaacggtatatataccacttgttttatagaaatgactcttactttctaaatacattgaatttactgttagacacagcaaaaaaaaaagttacaacttgaaagaaaaaaaaatcgactagtcaggcacatgtcaaattggtaccactaaaaaaatgggtcatactttgaccagttgattttttcctcgagaattaactagttttataattggtcaacttcattctcattcttgattcatattaaaaaatattatataatattttgactttcactaaacttcaacgtataaatagtctttgtatcttcatattcaaacataaacaacactcaaaagtctcttcttcttcttcttcttcttcacatcgatcatcatacaacaacaaaaaatggattacagagaatccaccggtgaaagtcagtcaaagtacaaaggaatccgtcgtcggaaatggggcaaatgggtatcagagattagagttccgggaactcgtgaccgtctctggttaggttcattctcaacagcagaaggtgccgccgtagcacacgacgttgctttcttctgtttacaccaacctgattctttagaatctctcaatttccctcatttgcttaatccttcactcgtttccagaacttctccgagatctatccagcaagctgcttctaacgccggcatggccattgacgccggaatcgtccacagtaccagcgtgaactctggatgcggagatacgacgacgtattacgagaatggagctgatcaagtggagccgttgaatatttcagtgtatgattatctgggcggccacgatcacgtttgatttatctcgacggtcatgatcacgtttgatcttcttttgagtaagattttgtaccataatcaaaacaggtgtggtgctaaaatcttactcaaaacaagattaggtaccacagagaaacaatcaaatggttgtgaatatacattataaggttttgattaatgtttgtttcactgatttagtgaagtttggtccattgtatacaaatctattcaagaaacctagcgcgagatcatgtttcgtgattgaagattgagatttttaagtattcgtaatatttttgtaaaatacaaatatgtttctgatcagctattattcgatacgaaatacatgggcgaaagcaggcgtcctaattgtgatgctttcgcccagtgaaagactccgacaaatctacaagagttcctccaagtaccttatagcttaagtcactgatttctctctcaagtgtcatttgtaaagtctctgcttattgaatgtttctcttcttcaatcattccatcaagattgtccgccaaattgcttttggagatccgtgaaggatacggtggctgaacctcttcgtttggcctgcgggtgagacgaatgttctctccatcctgtcatgtaaatcacctacacaagaatgccaaacgatatatactttaggcctcaaatgttgttaatttcacttgtagtatttagcataaaattgttttaatcatggattgtagcaaaacaacttgaataatgaagctaggttatgggtttttttcactgttgagttagttctgaactattatggacagacctgaaaagtagcgggtatagtgccgtcctctgtggcaaacatggagtcatatatggctgccgtggcaacagcagtttcacgattcaaaatcttgtttctctcgagaagagcattggtttcacccatcgcacgaagatgctctataagatccatcgctgagtagaaagatataaacgagaaggcaaatcagaaataattcttggaagatacacgttgttgcaaacgatgaagtaggaaaaaagtggaacagtttacctctcttgtatttaactacatattcatcaacatcaacaccaggaagactaaaacccgccctggtcaacagattccctgcgtccctaacctgaaaaagaaaagagaagccatgttctttcacctcagtactagaaatcaacttgatcttgctaagatattcacacacacctgtgccaaaggtgatagccgaggactaatccctccttcccgctccatgtgagccaaagtgcatgctattctcagctcccttgtaaataatttcaatacgtaaaggctaatcagaaacatgatatggaataagagactctacattgagtattgatttgaaatgaaagagaggacaaactttaaggtttctccaccaagaattgctgctaaaaataagccatccggcttcagtgctagcttgcactgcagttattacaatccaaaaccaacacattataaatattttctcataggacaaaccaattcacatacaccaacaaaaagcaacgaaaacgagaaaacctgtatcatggatccaggaagatcatttgtccagtgaagccccaacgaactaatgatcaaatcaaccgaacttcacatacaacatatttgacaagatattagtaggtaatagaactctagtgagtcgcagcaaggggaaaaaaacaaagaaaaacaggttttacaataacgtccttgttacctctctttgactggcagaaactcttcatcaccaacaaagtaagaggtttcaatggagttatcgagtgaatcgtcttgagcatctctacatgacttaatcatgtcatatgaagtatccatcatgataagcttctcaatcccacctgtgcaacaaagccaaaaatcatcatcaacaacactcaaaatgcagaaccagaacagtcaagagagagataaactaaccgcgaccacgtagtaatctcttaacagcaccaagagatcctcccaaacaaaatgcagtgggaaaactcttcttacaatccttaagaaagagcaaaaacaatatttactaagcttgattgaaatcgagaaatttagccccaagagaagctaaattgctctctcaatggcgagcatgcatcaaacaaaagagtacctctaagcgatcaagtagattatctgcaacagcgtcaacaaaagaatcgtttttttggcgagaaagccacgccgctcgatcacgctgcaaatcaatcgaacacacaaattataagaactcgaaatctggattaataataagagagagaggcaaatgtaagatgaattcgaacactacacatgtattcgcttgaggtctcggtcaaagatcttgactttggagctgttctgctgaaactcaccgtcaccgccataagcaccttccgtagagaaggagagagatgcgagaaatgtatgagcttgcttcgtagatttctcgggtactcgttttaggagaccaattcttccgtacagtgaattgatcctccgcatctctatctctctatctctggttcttagctgcaccggaattggtcggacggaggttctgggtttggtttgaagaagagacggtagatttctctgtcttgtattctttcattttgatccctgaagtttatctatattctataatgtttccctattgtttttaattttacgttttaacccctatgttgtcattagaatcagatggattatcaactttctctggcaaaactgtttacgcctccaagatggttaagtacttgcaaccagaaacgctatggaagctggtaattggtaaacaattaatacaacagaggactcaagattctttgtaaagtccattaaatgtttacatgattgatcagttccttaaggacaatgtgaacgatagaactaacgaacatggtggatcgttgcgaaaccattgcagattcgctttgcagttagtggactagttatataagcattctagttttgttgtacacgtacgtaatgtggttgagagcgttacaagaacaagagttattgccactctcttccactttgcatcgatttggatgttgtcttatcgtttttagaaaacagaaacccggaacaagttgccactcaaaacaaagggaataatgtacaagccaaaaccttgaagagaacttttgtaataacagatacactttaaatatatgagcaatgcacacaagacatgagtaaagagtgataccgatgatttctgaatttacatgatcacacacgaacatgttctttgtcgtcctacctcccattcttcatctgataatcccatctcactgcaaccaaaatcaagtttgtttcttggaagttaataacaaaccgtgggaggatcacaaagaaaaggaaacacagctaaatgtctctacaaaaccatgatgtgtaacaaagaatatatatatgtagtgagtttgccgggcactacgcacatgtgaaactctgaaatctaaatgaattaaaggatatccattttgagcaataggggttaaagctcaagactaacattcctatttgcataaaacaatggatctaattatacaagctcaagattcacaacaaggatcctattggcataaaacaatggatctacttaaattaactcgtattgggatttaagcaactcaataagaggaaaacatatcacacgtacctcggctcaaattctctaacttgagtgagttcactaccacaagcatcaggccactgaactttccgccttgccatgtcaccagtgagatcgctaccatccacactcaacgtctcgtattcttttatatcttctagagagcgtgattccgcaacagagggcctcttcaagctactcctcaacgagagtttgaaagcttctttgctgctgccattatcagcttcacttatttggtctttacccttttcagaaacaacaacaacagactctggtgatgatatttcacgatgctgctgctgcacaggttcaactttaagaggagaaggggtctcaagtcccgcggaagcgccaccaaaacaactgaaggaagcagcgcaaccgcgggaaactcggttcttaatagaatccagctgaagaacagggtcagcctcaggctcttggtcaaccacctggtagtgattccacgggacaactctcatgggcctatctacgtctttatcaccagagaaaagaagggtcaatcccttactatacccagacgcggacgctgagaataaaccccctccttctactgccagtaacattagttgctctattcatctgacgtacattaaaaccctgacaatatccccctcccttcctgctcaccaccgagcaccaaatatagccacagattcagattcaagacacctgaagctaacaaagacaaaaatcaaactacaatagctgaaaattcacagttatagcattgacacatacaacatcttacttgctaaattgactggaaccaccactaagtgaagaaaaaaaagtttagaggatcttaaataaatcacttaaactcaaaagcatggatcaacttcaatcatggaggagatctaaaacgcaaaaaaagagggaaaaaaaacaaaaaacaaaatcttagtagagatagtgtaacgaaacgaaatgagattggatctgtagccgtaaatttcttcagatatagaacactagtgaattgataaagagaagagattatattagaagatctacaaagccattttcgaatcatgagcaaacaactgaacaagagtttaaacatgcataagctacttcaagccaccgaaagaatacgaatctcaattcaaacctcgtcttcttcatcgctactactctttgctggatttttttctcgggaaaaatcgaaaaaaaaaaaagtgaattcacgcacctgagagatcagctcgggaagagaatcgattactttttggtcagcgccggtggttacgatcgtcgctttctcgttcgcgtgaatcaagaggcgatgagaaagagaacaagtgaagaagaaggagagagtaacatgaaaaattaaaatgatcaattaagttcagtaaagttactgatagtgattaaaactgataacgatgtatttgcgcattatagagacagccgcttgtgacacttaaaagttttctctaattatataattcttgcgtatggaggagtgtgctattattaactttgtttaaagcagattttgagagaagagaatgtaataaatagagactagtttttggattcaattatatattgtaaaagctaagaccgtcttttgatgaaacaacatctcttaaactatctcttctgcaaaaaacaacaatacaaaaaaaacaaaacaaagccattgaaccaagctcaaactctttttaacgcttcttggaaacaccaacagtctttccacggcgtccggtggttttggtgtgctgtccacgtacacggagaccccagtagtgcctcagaccacgatggtttctgtttacattacagtgacaatctcagtcagtacaaacaaagttctatatcgattatcagaacaacaagagagaaacaaaggatgcatcagtaaatcattacactacagattaggttttgttgccgaaaatgagtgtatacatgatttaacacaagagttgtgtacttagcttcttccatatagaaagttatgatgggcatcattatactattaacatggtatctaaaaactacagaggagagtgtctgtatgtgttgtttgttacctgatcttcttgagacgctcaagatcatctctcaacttcatgtcaagagcattggaaacaacttgggagtatttcccatccttgtaatccttttgtctgttaagaaaccagtctgggatcttgaactggcgagggttagcaacgattgtcatgaggttatcaatctcagcagcacttagttctccagccctgaatataccagcaaaggaaaaaacatttaaaaacacacactagaccaaacttcttcaagaatatcaatctagagaagttctatgtgcaaagaaaacctaaatatctgatttcctagaaatcaatcaaaccagatcgagcaggtacaattctagtcaaagagctacattttctactaacatccaaaacctcgcaagattcataatccttatccatagaattcctaagtaactgaaagtattaagaaccaagctaagaaacaaacctcttgttcatgtcaacatcagccttcttgcacacaatgttagccaatcgccttccaatacccttgattgaggtcaaagcaaacataattttttgcttcccatcgacattagtattgagcacacgcagaatatgctgaaactcctcgttcgcaactagagactacacacacacgaatacgaaaaaaaaaaaacagatccgtcagtcgcaaatcgtgtaagggaatacaaaaaacatttgagcttaaaactccaatcccaaaaccagcaatgaaaaacgagcgatacgcaaaatgaagcacgagcaattggagaaccagacaagagttgaagaacgataatcgtaccatttttggatgccgagaaagatcgcgagaggaggattaagctcttttaccagactctggaggcgccaccacagcttaagctcaggtctgttataagcggcatatttagggttttccaacctaatatgaagctcctgtagttaattactaatttaccctttaatgttttttttggaggaaaaagattaaaatactataaattatcttttgcaatattaatttttgctgttttaagagtattcggaaataagtaaatttgtaaatttttcacttctatacattacgatttagaatccactgaagactaaacaccagacgcacaaaaaaaaagattgagctacttcgtcatttaaaatgtacagagaagaggttgagttatataagacaccgagcgagagcaaatccaacgccggtgggagtgattgcgtcagtcactcatcattacaacattacatacaacaaactatatatatattcttcttggtctacgtccaaatgttttgtctagagaactaaaatttaccaaaaacaaaagtgggtgctcgttattgggacaaggatatagtacagccgagttcccgagccgcagtgtcgagaaactgagtaggcatagttgtggagagcaagctgtgagcttcccagtttaaacagttttggatatcggctttccagtctattgaggcggcgttgaagaatcgataggacggactattcattccgttcttctctgttgttggcagttttggagttactttgatgggtatggagctttggttcatgatatcacgtagtactgacgtgcttaaggcacgtacgtgtgcacttgggtgtgaaaggcaccgtattgttgctggtagacgacactgcatagaagcaaaaagatgtgaacaaggttaagcactttggtaactggacctactactgatcatctacaatcgacgcaggaaaccataggctctgttcgattctgcttttaccttcaatagattggataaaccgtcgaccactgctagtccagatggcccccaagctagcaccggctgtattgctcttgccgtggcttcaagtagctgcaaaagtttaaaatacagtggaatcagaaaatgattattactctagcccgaagaagggcattgaagagcaatctataacagtgcagtacctcaagttgaggtaatgtacaagcttctccatcaacaagcattccatcagttgcccgcagaagaagatctgatgcacttgcgagaatcaccagtgactcaggcctgtcatgattgcgcatgagttccaccaacactttgactatccgttggttgattttccacattttttggccttcttcatcatctttggcgatccaaggctgcaactccctttcagcctgtaaataacacaagaccatttcagacaatagagcattagagtaaatccttcaacatatgagcttgaaacaagccattattttacacagattttttcttccttatttcctatccttggcatattaaaacaagtgttgcatataaattccaagcttaatttttataaattcatgagagatcaaatgagtgaaccaagcattataaaacattaacacaggccataggttttccgcagtttaatctttacacaggtgttgcattcctgacaaatgaaataaaaagtcaaagagtaatttggacctgaaggacaactgctgctgctgctttcgctggcgttgcagatacgacattgcatagcgcatcaacaacctgatatataaaaaatatgatcagtgtatgaagtcgagcgacttaattggattagtaaagaactaccaaggaaactgtaagcgagctgggaaatagaagtgctgaggtttacctgtctccatccttgttgcgcagaggtgctttctgcggtgggctggatttcaggagcagcaatcagtttgtgccataacagtgaaacaacggagaaagacagctccggtttctctgcaagcactgacctcaaaagcttttgtgtaccacaatagaaccctgcgagtctatcagctgtgaggaaattcgcaagatcagaagcatccaagaggaaatctttgatacccttctctgagggtctccctgagccttcatctgaatgtctagcatacttatggtttcctcttggattcatttcagtccttgaggcggatgtcaccgctgtatcaaagcatgtggtgcttgcacatgtgttctcttgtttccagtttaaacaggtcacagaatccttctgaaccggtgtattcttaaggtaggcttccaagggttcagctttgtcaacaatggaggcaacaactttgctgtgaacatctatgaggttatataatgatgatgctcttttatgaatttccttatcccacttacatctcatcaacccagacaatgcatgcgtcaaggcctttgaacgtctgaacagttcggaaatatgagctgcaaccatggccgcagcaactatctcactagaactgtaactccatggagtccccacagaagatggttttaatgaaaagagtgcctctaggattgccaaaattcggcgcgtatgactaattgccgagtcaatcccagctccatactctttagatgacccatttatctttacaggctttgtaatagttccagccacggcagaattggaaaagttccccccaccagagatcataggatacagctgaacctcacaggcaagagcacaaacagcagcaagaacgtatgaatcaaatgctgccacaggtccctgtcccttgacattcctacttttacggttagcagtttgattgttagatacaggttgattcgcctcaatattttcagtagtactagcatattcacttctcggtctcttgctaccactagactgtgcttcatggctaacacatacagtcaacacaacaaaaagtaggcgtgaagctaattccacaccagcgcatgattctaaaaagagagcatggaccatagcacgaagctcagacatagcaagatttttggtcgctgatcttgtggtaaaactcgatctagcttttctggttagttccctggaagattcaggcggaaaagttctactgagtattgtttccacagtggcaacaaatattttcatcaagcatgcttccgaaggactcccccgtggaagatattcaagtactttgaggagtggaatgtataaattccatgacaagataggaggttgcagtggggtagcaactatgatttcgggaagatcaaccgccgaagaatttaaagggatcaaaccataagcagcttcccatatagtgcaaattctccactcaacttcaggaccatgagcacaaagcattgaggcaattccttgggcagtggcttcaatggttgcttctgctgcaggaacttctatctgttgagatgaaatgagtcagtttcaatataattttctagtagaatgccaatcgcatatcagagatggaatagcagaaaaatataaagaggaaccatgcctgttttctgtaatttgaactgtagccaccaataggcgcgtgctgaatttctactccctcaacttgacttagcggaggaaaaagcagtgccggctgtgagagtatgcggaaaagcaaagcggctgcagcatcagcagcaacacctgccctcatagacatagcaattcctatagcccgcaagaagtgcaaatgcatccagttcctgggtagctgcaccaagaaaaagaatgtgatcaaagctgatttctttgatgacataccaaagctgactttttttataacaagggacacaattagctttctggagggtaattaagagattcatattacgcttacccttacaccagatgcataatcttcagcagctcgaaggagttccacaagctgtacagcagcatcaagtgcatctggagcccacgacggtggtgcttctaagagtccaagaagaagtctctgcgtagcacttggagttgcaatggcatagtatctgacagtataacaggaaagtgagaaaacaattctgatctagggattcgaggaagcacaaccttaaaactagcaacagactactaccaataaaccctaattgaaagggtaagcccagaaacaatacctatgaaacaaacgtgcatatggttcaagagctggaaggccagcaactagatgctcatctaaggatgtcgttggcggaggaagaagaagtgcagggacagcgaccgctgtcagcgtagcagtctcatatcgagcaacttcatcatcacaaacactcagtatgacaccagctccattagcaacagcccatcttggggttgaaggcatcagttgaggatgtttaccagatcctcgagaagctgccaaagtaggacaacatgaaagttataggaagcaactcaaaacacattctatagccacaggtgatggatacacatttatgaacgaagtgatagaacaactctattgatcagaattatcatcaaaatccagttccaggggatattaacatggaattcttgaactcaccaatggttggcggcttgagctctccagcagcatatttacccattacaccactacacctgtaaataataagcaacatttttagttgtcagtaagcttaatccactacagaacctcaatacatagacctcagcagagagaccaaaataaaagaaggaggccggcgcatgaacacatagaagcatcagtaacagagtctacttaccatcggaaatagtcacttcttataccaagaggagcagcaagtagtatatcactgatccatggagacaaaggccttaaaggtttcctttcatgctgtgttggtgatccagccttaggctctgaagtcggagaaccactagttgtagctttgctcagacaatttctctctgtatctccattttgctgctcagttttataaatgggacggttgtaatgagtcaaaatgcgaaggatttctccacatgccaaagcccattgctccgaatagtcattctgttaggatagtgaacatgttagcacaaaatggtataggttacaccaaatcagtaagcatgatactagacagctattatatacctcactacttgggcaaactaaagatatgaaagaggcaaacggatgagcttccttgctgtacaccaacgagccatcaataagacatgaaatgattggaagaatgactgcatgaccatgctccggatgatgaaggacaaacatcgctgtttcatcagaaaacgaaaatcagatagacattcacacacaaaaagagaagtgtggatcataaatgttgatcatacccagcacatcgtctaaaagtcgcttctcagttgatggatactgatgccggaccaactgatacagataaattatacatgaatcaaaacgtcactactaagagaatactcttattaaactcattaggtatcaagtacctcagcaatgtcatctgggaattgctctgatgtaaattgaccaaaatattcaacataagcaacgacttgatccttatgttgttgaggatctcgtggcggaggccataacaaggaagagaactgaagaccatcgatccatctctcagatgaagatgaactagccatccaggaaccgaaactaaaccccaactagatgaacgaacaatctaactaacacctttcttctactatcaatcgagaatcaatacgacgtagtgttaacattcgccagcaagaacaatcactatacacatctcccagattcttttaaatcctttttatactaatcaacacactgtacactaaatcgaagctgaatcaaacagctaaaccctgtaacaacaattcagaagaacaaaatctcaatcagataagatgtcaaatcaaacaacaaatctaagctgagaaaacaaaaaatgctagtagaaacagtgatttaccaagaacttatttaaaaaaaaaagacatcaaatgattcgggaaaaaatctcatctgagaatcaatcaaccaaaaaccacgaaaaaggtagtagaagaaagacctgaaagtaaatatgtcttcctatgagtttgttggttggttatctctactcttgcttttttttggctttgaggatatttttgagagatcgacgaatatcggagaaaaaaagaatacatacacagaagaagagattgtggtggccttaggagagagagagagaaaaaagagatttggaggcttctccactcggtttaagatttcccgtctgcttacgtgtcatcgatatttccttgcctttgccaccacctttatgcgccattaccatataaccatcatcatcccacatacatctccacccataccatggttaaaaaatttaccatatttttgttacattttttaagcatatatatatgaaattttattttaaaaaattttactggtagtttatgttagtgttgttttggaatcacaatgcgaattcaaattcgtatattgtatgttacaatcaccaagaaaaatgtttgccaatttaagtaattaattttaatcctaataaataaattttgtaaactcagatttactccaaaattctgtctatttttaaccatgagctaagtttaaaatctacttaaacatataattatatcaataatatttggctgttttaaaataaaccattacattcacagtatggcatatattggtaaagaatttgtacaagtaatcagagagattattttatttcaaggtttggtggtcatgattgtattattgagttattaatttaagtatataacatctctcatgtgattgcctaattaattaatagtttcattacacaaaaaaaaagctagtgacatatgtccacagatattttgaggggagctaagttcagatgctacgagatgttacgtacaccttcgaattatccaccgttgattcaagcccactcaacaaattcctttaagagatttcgggcagctagcccagaatagtttcgagccgttcgatggttgtagataaacgggcagcttttgaggaacagcccgttgagaaaatatctaaatgggcctcacacatcttttaagatattttaaaatcttaccacttgtctctactgtaccacataaacaagtagcacaataaaatgatgacgtgtaccaatcagagtggagcaagagatctgtggacgttgatcactcgccaaataagagacgtggcgcaataagatgtgagcaatatattgtaatgatctccatacgattcgtgattgtgtggtccacttctgtctggatggctcttgtctgaagaatactccatggtaacataactgggctttggtcatgtaccatgtgatgtgatgggctcaaaccttacgtggagttatgtaactgggctaaattgtaattttaatttttcagtaattgcttgtaatacaaatatattttttgatatcaaattgtaattttgaggagaacttactattattaatgaagatgataaaatgttacattaatgtatcattctaatcatagtaaatatattaagaattacctcaattttttggtttatgatttaccaattagggaaaacattaattttaataaaagctactttgcctacctcttttttttttgttaatatatcattttaataacaagcttttattaaagtaatattatggtggagaaatttttataaaattctaaaactttttgaaaaggcgtattctcaaattgtaggcatttcagttgatatattataagtttaagttatagtccaacgaattatttcttttgtggtttagcaaacgagatgttcatcattacccatttcattgtcaacaaaacctttagaaaatgatattagttatcttcaagtatgactattataaatttatacagtacaatatacttttttcacagaaggaccgtgacatcaatcaatttagtataagaaaaatcaaatggaaaaaaaaaaaaaaaaatcaaatgaacatctttgcaacgcgaaactaagctcaacacttgatttattcattatgttatactttaaatttaaaaatctttaatgatatcttcttctttttttgctaaattcaaaaaatctttaatgatatataaatttagtaaatattactgattagagatatgctggtttagttttcatccgatcatagttagatgtggtatttacataatataatccataaactaacataattccctttttatctcaactcaaaatatatgtaaaggtgtatattcaaaaaagtttgtcaagtattacgaacaaacaaatcagttacaatattcaaatatttgtcaagtattcatatatttctaaatttcaaagtaagagaaaaaagaaagtggatggaacaatctagaaccgaacacaatgaatggaaatatgagcaagttataatttaaatatgtaaaaggagagtgaagtcaacaaatgatgaggcaaagggtcggctcttgtagctccaatgagaagggtcagacacattttggacggtgacatgtatcaaccccactcactctcttctttattcactcattttttttgttagtcttcttgtgtgctaatgtatggtcaatttgaaattagcactgatgttgactttttaaaatattttcatatgaacgagctggttcatgtaccatgccaacatatgtttttcaaataaattaatcgaattagattcttgttgtgactgagagtattttcgatcaacataaaccattcaaattaacgtcatatcaaacactattatgaaatgagtggtacaatcattgaatcgcttgcttccaacccctcaaaaagaaaaagtctgtgtgcatataattgatatcaactacaagttgaaatacaaaccacaaattatgagtagacacattcgaataaattcataatagaaggctgctaccataatagaaggattgtcccttgttgctgaccatgaataccgaacaacttaaatttcaagtagagatggattatttggggattcggaagaagaagtctactcagattattaagaaatcatcattgtccaaagaaaaagaaaaacaccataaactaagttaaagacacaaaaaccataaactaagtaaacaaaaaaaaactgctaaaatagtaaaggaagactaaaacccaaaaaagaaaagaaaaggagtcgatatcaaaactaaaagaagaaaacagagttgagcaaacgcattgcaaatttcagtcggtggtagagaaaccaagatcatgatcagttggatcaacagatagcctgagaacatccaaagcctcggatactttagacttgagtgcctctggtgactccatcaggtgcaagatctcagcttgatccatctccaacaacattcctgtgactttagccacgtgaagtggttcgtgcctttccacaagtgggtacagttgttctccaagcatctgttcccaaccaattttttaaaaataaaaatcagtaaacatataaatatatagatatgccaatctctatcaactatatatttatgtgactttaacttttatttatttgttataagaccataattctttcaaacatttgatgttaagaaacaaaattcaccaaaacatttttcagttattcaggaaatattttgtaagataaaatgcaaatgtgactgacctctctttgcgtttggttttgcatcaacaattgaaaacatatgtttagagttaagggtttattattcaaaagttatacaccaaatgcaaaagaaaacgcaaaacaaagaaatgtttagctgagatggaaggaaaagaggcaaacccgagtgcgatcagctggactagcagaagctaaggaagaagtgagcttagagattggaaggagaggagctttctggtgagagatcgaagaagcatctattggcaaaggaatgataggaggtaagattccttgaggaacactcgaatccattccgttcctcccgttactcgcaccgttcatatatctcattcccggggacgggttacggtgcataagctgtcaatattcaatccaactcagtttcatgattgttgaaaactataaacagactcagtttagtaacatacttgttgttgttggatgtgttgttgcacgttagtagcaccacgcctgaatcccatacgaggaccggtctgaggttgtctttgaagcggataaggcacgatgaagttgcccgggccagaacctggacgcatcccgggcatgaactgaggctggaatccatatccaatgggctgggacgggaccatacttgctccgttttggcctacgtacatgtgttgaggtggaccgggcattggtccacctggcgggtgatggaaccctgacattggccctggtgctctaatctgtgaaaacaacgcctgaaaaaattgcaaacttatgtacttagtcacacatatagctttaacaaacccatttcttttaaatatgttaaaagagtttttaaaaaacctgtaagtgtgctcgtctatcttctttgcgctgcgcaagagctatgtatagaggttttcttccgatcatcttcccattcatttcactcagctgcattgtctcatatgtaacaatctctcagatatcaaaagagacgaacaataaaagaagaatatattatagttttagtaactcacggctcttaaagcttcttcaggattggaataagcaacaaaaccaaatcctctgctcattccttgtggattaagcataacctacattagttaaaggattgtgtcaaagacaacgtaacatcaacaacatatatatttatgaatatatgtatgagtttttaattaattattaccttggaggatgtcacatttccatactcagagaacatctccttgagtttctcatcatcaacactatcatcaagattcttcaaatacaggttcgctccttgagatttctcaaaccggtttatcctctcttgctcaaacttccttcttagctcttcctctctctcagacttcttttgcgccctcccaacgtacaacacatcatcccctaagctaattccattcatcttctcaaccgccgaagccgctgcttcagtgcactcaaaattcacaaacccgaaacacctcgagtttccgctctggtccctcattacaactgcgctcgatatcactccaaatttaccaaacgtttttcgtagctcgtcctcaccaatctccttggggagattcttgacgtacacgttagtgaaacgcggtgtaggggtgttttcatcacgagcacgctcttgacgtctgatgaagtgtcccacaaaaacttgcttgtcgttcattaacattccgtttagcttgtcaattgcggcttgagccgattcctccttctcgaactggacaaatccataccccttggaccggccagtcacgtccattgcaactttgcatgagaggatggttccaaaacttgaaaacgtctcgaacaaggccttgttgtcgattgaagcgtcaaggtttttgatgaaaatgtttcctttgccgctcaatcgcgtgcttgggtcacggttcgaaagcatgatccgaatgggcctatcaaagaggggagtgtagttcaaggcctccattgcacggtaagctgcaaacataaatcaacatataaacataggcaaataagatctcaattcattatagaaaaccagcatctatgatatttataaatgcacaaatacctatagtttctacaattaatgagattgaaagaacaatttcaaacaaatttcacgtattaaattgaactaattaagaaaaatcataatataagagactgatgcatcaactactaaaataaatgttgtagctttgatattcaaacgaaacatatcaatgtagcagaatcatggtatagtagagatgaactacaatatagaatattgattatatgttaatttctagacaaaaaaaaagatgattcgcacaggaacatgatactgatcaaaattaattaccatgtctaataaaaaattgagattgaaaaaaatcaaatcaaaacactttttcttattgtaatgcaattcatgataatatatatattttgttttgcaagacatgaaccctaacttgcaattgaagcgatatagaattgtatttaccatcgttagggttactgaaattgatgtaggcatatcccaaagatcgacgattctgatcgcggcaaactcttaccgagacgacattagcaacatgtttgaacaaatcaaatagatgtgcttcagtaactttcgggtccagatcaccggcatagagcgacgagttcgggtgggtttgatcggctaccacgaccggggatggaagaggtattgaaaccggaacctgaaccgaagtctgcgccgtcggactgggaacttgatcaaccattgtcgccggtgcaacacctgtggcaaccgccgccgccatgattatgagtttactttttacaagacgatttgttattttcgtctcgtgaaaggaaacaaaatcactgattctaaaaaaacaaagattcgatgatttgtttctgtaagggttttaagtgagaaagagattttctgtaaacaacatgactcgaggatttgtttcttcacaatttttgatttatttattttttaggaattttattcttatttagatttttttttttccttttttagtttcctccgattatcaagaagagtaaagagggataaaattgaattagtgtgatgagtgtggatgcatatttatacataactagctaagcctataaaaccgagcaattaacaatttagtataaataaaatgtcacttgattttactattaatagctaattgaatatttcatgaatctttgataataagaattggtcgcagttttaaattatgtttgcctttatttctttttttattacatgaggttttattttagttacacttatcgagcatgtgctaattttgttttctatatcgaaagcaacattaaatttatttattcataaaaaaatgcatgcttctaaggcttataagcacacaaatctaattaatttctaataatataactaatgaggtcttaagagctaaaatttaataaattgatttaacatttactttggataaaaattgtgattttttatttatgtttttgattagagtaaagacgaacaactaatttttcagagcaaaatttgcggctattgatttggtcattactaagatatcaatcttattactataaatagacacatgaaactatttttagattcttttgaccagatattagattatgaatttatgataaataaattggtaattttttagttagttgaaattaaatcagttgtattgttgatgatgtaaataggtttagtaatgctacgaagtaacttattaaaaatcatggataatggaatcttttatttatttcaatagactacaaacccctttaaatatcatacacatatattgatacacatatatagattcaagttttttattagggataaaattgaattagtgtgaagagtgtggattaatatttatacttaactagctaagcctataaatccgaacaattaacaatttagtatagggaaagtgtcacttgatttttactattaatagctaattggtgtttcataaatctttgataataagaattggtcgcagttttgaattatgtttgcctttatcgcttctgttttttacataagattttattttagttacacatatcaagaatttgctaatttcattttctataccgaaatcaatactaaatttatttattcataaaaaatgcatgcttctaaggcttttaggcacacaaatctaattattttctaatagtgtaaccactgaagtcttaggaggtaaaatttaataaatttatttaacatttacttagaatagaaattgtaattgtttttttttttttatgtttttgattggagtaaaagatgaacagctaatttttgggagcataacttgcggctattgatttggtcatgactaagatatcaattttattactgtaaacagaaacatgaaactatttttatgaaactatttttagattcttttgaccagaatttggattatgataaatggattgatgatttttagttaatttacccatgccaattatactatagtatcctcaactatgccggtcaacactggtcttcaacggagtaaatttattagtgtaccggaattgcatgtctgtggtgttaactacatgacgtcgtatagttcagatatgtggtcatacaatacatctacttcgtatagctagggatacactaatatgcttgacatgtgtgatcatgcattctccgatattttgtgtagctagttatttttcttctactataaatagagatattaaactattttggattctttgaccggatcacatggattacaataaaccattttgaaatctttaaatagttgactaaaagaaaatttactatagggatattgttaagatgttctctattttcaattgtatataagttgtgaaatgtaatctttttaattaaaatataaaaatgatgatgattggtatgttgaatgatggagtaacaaaatattacagtagtgtgtaaaacacatccgtttatttatgaagattataattgtggcattgatacggttcatcaagcttattataggaagcggtcaatgccacatcagcttcagtcaacggaagcgaaagacactgaaggaattagagtctttgctgaagaagagaaggaagagaaagactttgttccagagggaggctttgctgttacgactgaggaaacatatatagccgttgttgccttctctttcattcaggctttttatctgagttgttgagagagagccaataatcctgaagatgttcaagtgagtagtcaatgttgattacttgtagatcgtgagcaaacatttagcgagcgatctctgatattcggatttgatttagttattgctttgataatcaatttaaatctttctttcgaacgtaattctttgggtttatacttttctgtgtgaatctgagctaagagtagcaacaacttaacatgcatccaatgtaggtagatcaattctagtatttgatcaaacttagatatgtcatccaatagcccaaaaagtctcaatccatatgtggtttttcaagtcgtgacccaaaaaagttaagtacataagtaattgtcgtcacataagagaaagtatatacagaagaaaactatgaaacatacaaacttaaaatgtagataaaaatatgttttgaacttttgtggtaaaatgttaaaaatgaaatgacaaagcttcacattatgcgcaaagccgcagaatgagtgcgctcgtacatatctccagccctgccattgacccatgagagagttcactaacttagcctttacttttaactttgcttcctccaaccaaagattaaaatgtaaaaagaattcataagagtatgcttcaaaaactgctttgggtatctaaatcatcaaacttcttagattaagagtttttttctctttgcatattcaaagcttaccgattgctgttgttcactagaacgaggtagagcgggtcgagaggagacagacggaatagctgcacgacaatgactgcgctcgtgccaacgctgaaaaggattaaacaaaacatgaatggaaaaatgcccttgtctgtccatcaaagagttttaagactttgagagaagttgtacctgccaagacctatcaatagagcaacccatagaattccaatgatcaaactagattctttatagacaacccaaacctgaaataaacaagtaaatgactcatgaaagggaaatatatgtaacaaacctagttattgaagagcttatataacttaaaaggcttttactaatctagtgttcaagatttgggacttactgataagacagcaacatcaatgtagaagttaaccaataaaaccaccatccacctgtgggaagatttagcaaatgagtaaaaggcaaagcaagagacagatgattcaaacacaaaaaatgcagaaagaaatttagactcacgggtatagaagctccatgtggaaaggagaaccataagtgaagcaagtgtaaaccaaagctcctagcatcacacatcctaaggcaccaaacacaaatcttgcagtgacaacaagtgaattcttgtctctcagaccaactccatccctaacaagaacacattacgtcattaattaaatggtctaggattccacaaactatacagcatcttatgattctctcatggaactttgtgagcaggttatgcttatgattctctcatggaaaattgggagcagctactgatttgaatgaattcatacttgcataaaccttggagaacagagcattactgacactaatcaaactactattaatgattaaagagatactaatgaagctgaattcaaaacacagaaacaaaatggatcaaacacatacttgattgaatctcgaagtaacaaatagtacataggatcttctgaagcttcttgatttgtcagcttgagaagttgcagaaacagatacacacatgtcgtgaggcttaaaaccaaaaaaaaaagacaaaaaaaaatttttacaacaaattcatagtaatgatcttgctaaagaattcagatacacacaagatgatacctgccaaaaatgatgagcaaaatggtccaaagtattgaaccagaccatgtagactccttatacacaatccaaacctgaattcagataataaacaagtcaaagattaaaactttaaaagagaacaagtaaactattcataatatatctcaatttaaacattaccgctataggtacaagattaatgtagaaatccaaaattgtcgtaacgaaccatctgaaaaaaagcgtaacgaaactaacatgaataaacacatatctgtgtgtctctgtctctgtgtgaaaatgaagaaagagagaaatagagaaatgggttttacggtgtgaagacatcttgacgatcaggtaaaggaaggccatcggtgatgatggtgtagacaagagtcgctagcatcagacagaacataaccggtaataccacttttagtccggtcactaaactagtcgtcgccattgttaacagagagagagacgagaggaagagaaatcgaaaagattgacgacgacgattcgagagattcaactgaattctaaggagcgaaacaagtggggaaggaagcgccacgtcaccgccaaattgctaactgatatttcaaaccgaaccggattcggtttagcgcggctgaaccggactcatcattagtttcccattacataaagaagacagaaccaacccattacatgtacacttgaactgttgttacatacaaatcgtgaaccaccaaatgtcaaagatgaagaaccagaaaggtaacaaaaccttacttagggaacaatacaagttttattggtccttctcagcattaagattatagacacacacaacaagtaatgcataaatcaagagagtaagaaatgtttcttcagcattcagcaagcacaacctcctctttgctcaggcaccgaaccagtatctggctggaaatatctgtagcaccgagttgcaaaaaaagattatatgaaaatttgaattgagagattctggtttttcatcttgagtttaataaggatccatcatatggaggagattcacaaagtgagaggatcacataaagaaagactaataacacttacatatcttggtcgcgttcatttgcaagggcaagttttgtgatgcacaagaaggagtcatcgacattgtaatcttctttagccgatgtctcgaaatagactatgtttcccttttcagcacaccattctctagccttcttctcagatacctgaacacaaagaaaggaaatatatagcaaacaaaggaaatggactattcagatttaaaagcttaagactaatagtaacttaccactcggctatttcctccatcaatatcaaccttattaccaagaagtataaaagggaatgccattgggtcacgtggactagcctggcccaaaaatccacaaaaaacaactatcagtcactaaaagaaagaatctttggatgaagagaaaatgtgatggagaaagcaaaaaaaaaaaacccgtgtaagaaactcgttgtgccaattgtcgagagattcaaatgacttcaagtgattcacatcatagacaagaacacaacaatctgcacctctatagaaagcaacaccaagactttgaaacctctcttgcccagcagtgtcccatatcttaacacaattacaataataataataattcatatacactcttctcttaaaagatcgacaacaatttaaaccaaaaaaaaacaaacaaagaaactcacttgcaatgtgacaagcctgtcatcaatttgaagctccttagtgacaaaatcagctccgatcgtagctttgtactgttgactaaacttgttattcacatatctacaaattgaaaaaaaaaaaaagctaagttttttttttctcaccgacagctacaaaaatcaaaattacgaaaagaagaaaatccaaagaaagaaaaatcaaaaagtttagttaggatactgattcatcaacgatgttttgccaaccctgtgatatttgtacacaaaaacaacaacaagagaatgattaacggatcaaacattaaaaaaaaaacacagttaggtagaaaaataagctaacccgctgtctccaagaattataactttgagtaaagttcgtcttcgcgtcgacatgttcttcagagtatgtatgtatctgaatctgactttttctttaaagaaaacaaaaggagcaacgaactctgttcttaggatgttggaaaaacagagatgagaaaatgaaagtagcgccaagttcgatcttttgggaactaaaaaaagtcttagctggaagactcgtggtccgtggggtttgtccagcttttaagagaggataatatcatagaatataaaataaaatttctgtatgaaaatattagcaagacaatgtaatcattgacaaaggaacaaaaaaaacaggtcataaagtaataatgtgctataacaaaacgtcactaagataaagataaatttgttttctgtaagaaacgtcatcaaaaagtatccaaaacttttttagtttgtttataagaaaaaaaaaaaaaaaactccaaaaggtgattttgcgtgaaaccaacgtctcgaggtttgaggtatggtgctcaaatgttatcatccagaggaagaagacgagccgttctgtttcttactttgcgaatcctcagaagcgaatgattcgtccaagaacccttcaagcttgcctctttcaacgcaacttgaaaactttttggcagcatcagggacatccaaagacagatcttcaagtgattcatcaactcttttaaaccctttagtcatctgatatatcgtcactagtcctgaatcaaaacacacttttagtagcttccataaccgttcctcgttctccttctcttctatgatcctcactactgacttcttcactacttcgtggtgaaaaaacggcattcctagttcctttacgcacctactagcttctctgaggtctccaccagagacatactcttctagaagaatctggatcttctctttcacttccttcactgtggatcccggcgagtttgtctcaattcctcctcctccccagcaacgtaagatcctttcaccggaaagacgtgctttcagcaatgttttcgccatttgaatcactttctcgcccacacttgagcctgcctcgggagtctgatttaacacttcttccaaatcccgtggagctaacacctcgtcaaccacagctcttgctaagaacatggcaaggtcttcaacaaccactgggttgtccaaagcagtgtcgtctgcagattctatgagcatcgagaatgcgcttctgacatctttgggagggaaaccaagagtagagacgagcacacaagccatctccttctctcttttcttcctgtccattgctagagttatcagatatttgacaaagattgcgcgtagctgactcgaagatgcattcaattcggtgtctagacaatgtacgacctctgaagtgtcacctgaaaggaaatactctcggatgatcgacttcgccttgtctttaaaaacattggcgctggagttttcaagtaacttttctcctgcatcagcagagagtgatttcagagaagaagcacataaccatccttcagaagccgctttagagatgaaagactgtaaaatacggcgtgcgtctggtatgtcaagagacaaatcttcgattgaatcaatgattctgctaaacccttttgtcacctgagtggagtttatgagaccaacctcaatcgtttctttcaacagatctagcagcctgacttgagcttttcgcctttccattgccatgatcagtgctcgtttgacaatctcatgatgaaagaaaggaactttcaatcctttgatgcatctaaaagcttcttttttgtctccactcatgacatactctttcaacaagtcgttaattctagctttcacatcctcagcagtccaattatcagtccctccccatctcttctcaacaacttcagcatgaagcggagtcgctagatagctcttctcagcctttctcaaaacctcaacacctttggagttatctggcagcaatttcatttgcttcttgagaaacgcaggaggaagaatgtcgtcaacaattgcccgagccacaaagacagcaagaacatcaactgcatcgggaatatcaacagataaatcatcagcagaagcgaccagtttgttgaaacctctgtaaacttctgggggatcaatgacgtcggcataaagggtagagaggagaaaagcagccatttctttctctttgtcatgtctatccatagccatggagactaacttcttgacaaaataataacggtactcagccattccaagctcctttagttcattaacaacagagacaacatcattggtgccaaagtattcctcaacgattactgtggccttctttttgtactcacttaaatcagcatcgaagcagcttgttggatctgaatgtccattgccctgaaaaagagaagttaatctcaaacctatagaaaaaagaagccaattttaaaatcaaagagagagagacatataaagtgatgaaataagacctcaatggtatcaaaaatagggtcagtaaggtcatcatcatcttctactccccaagtttcttcactcccttccactgcaatagaaagaaaaactctaaacacatataacacaagttaaacaaacaatatccagaggaagtaaaaaacaaaaagctataccttttataggtgaatgtctacgactctttgttaaatcctctgccatgttggcctgaggcaatgggtcgagagaagaagaagaaattttcaattgagaaatgcaaagaggatcctttctcgaatctgtaaggtcttggtgctccattttagactctatctcgaatccttgcaattcctcaacttttcgattgtcacacgatttaatcaatcaccatagttttgcattcctctaaacaatcatacaaaaaaaggattcaatttagaacaatcaacggattcaataaccaaatctgaatttaggtcaaatatatataagtttcattgatcgagtctaaaatcgcaaagaaacaaataataaaaatcgcgtactcgaaacaaaaagtgaaagactcggccggagagtgatacagcgacgccggcgatgaagcaagcgtccttttttggaatcgccgagtcgaagaagaacacgatgatgtgctcctcctctgtaactgattttatttaatttgattttttcaattttatgggatttattttattttattttgtttctggaaataaataagactttattacttctttcttttttttgttaatacaataattaaagaaactatttccccgttttttaatgcttttttaccatttcttttgagtcttttacgctccttcacaaattataaaattatatgtaatttactatttcagtctctattttcctatttcttaaaaaaaaaggcagttgaattatattaaccagaaaaatgaaacaaaatttttaacactcttactgtcatttgttacaaagaggtagagttttcaaacaatttttcatattgtatcaaaaaatattgtagtatcaaacagtttatgatcaatgacctcaactatcatattgtagtatcgtatagttgaaacaatttcttagaatgcaatggaaacagtttacgacttttactataatccttgccactgctgaattgtcggtcaatgatcataaaatcatcagcacattccacgggtaacccttatgttctaaacggctgtaaaggtcagtacgtactccaagtcatcaatactatattaagatcatcatctgattcatctcattaatgatcgatcatccagatattgacgagtgtaaggagcttgcaaatggacgtcctaatatttgtaccgacggtggaacttgccaaaatagtcccgaaagctatcgatgcgacttgcgagatcagaaagagtcagacgatcctcatttgtgtaggtacgtaaatttcagttttgtataccatcctcgaatttattaaaagttagaaaatcgaccttacaaaagtaacgtctacaaaaataactaattcagcatactactgtaaactgttatacattttaatatatgtttataaaaaatatatttgtaactaaagatgaaaagtttattaacaaactaagaatttgtgaataagaaactattccttcaaaaataataattgcataacaaaaaccaaaactgcttatattttattcattactatcaaatataaccactaatttttctttctctctaattttatgttatattaggtataacttcgagtggggtgtactttgttttagttttttttttaattatgaaattttctacgaacatcttttatatgataagacaagaatatgaataaaagttgtgaatatgtatacaatacaataatgtaaagtattttagaactagaattataaactatttaaatagtgaaagtgttgtttatttaagttagttttaaaattaatttgtttctttagaaaatctttgttgatatgttacggagagaaattactttggttatttatgttttagacgttggatgaggtataattcttcttggtaagattcattcgctgtttctggacttgattgtttccctgatcagtttactctaatcacctatgatgttgtgatcaagaaccaccatcggcgtcttgatcgtcttgcttgttatcgttagctgtataaaacagaaaattaagcaccgtaaagacattgagctccgacaaatattcttcgagcaaaatggcggtggcatgttgatacatcgactctcaggatcagggccatcaaatgttgatgttaaaatatttactgaggaagccatgaaggaagcaactaatagttatgatgagagcaggatattgggccagggaggccagggaaaagtgtacaaagggatactgtcggataatttcatagttgcaataaaaaaagctcgactaggagacagtagccaagtagagcacttcatcaacgaagtgctcatactctctcaaattaatcacatgaacgtaatcaagattttgggctgctgtctggagatcgagctttttttattgcaactagcattaggatctttagttattaggcatagttagttgatgcgactagcgttggttaactttacattagtgatttgagttatagaacggtgtgttaacaactctaatcatatataagtagatctacagtttatctatttcctgagaatatttgtatatctgacgtcttaatcatttgatctacatctttatgtaactgatttcttgtcttaaattttttatctattttatttggcttaatatcaaacatcaatagtttattgtgtgaacaacaaaattttagtggaattcgatctttaaatactaactacgatcttttatttgagagagtaaacttaacgttaatttgagatatatcaacgatctttttatttagggatgttacttgaaatttaatttgatctatatcatgtaccaaatcagaatcaactgtcttaatcaacaaaacggcatcacaagagtacattatgcttcacttaaagctggacaccataacttatattgatgtatatataagcatatattcgaacttcataatagatatcaaatcacaaaactattttctaaaattaaaacaaaaagagcgagaaaaaacttagtgttcgaaggtgagaatgtattaacttcgaaaaaagagcaacataacgaggaatatatcaatcgaagaaaaaaattacattaacaaatcaaatcatgacaatatggaacgaaacagtaatactgaaaggatgctgaaacgtaatttattcttatcacgatacatatcatcgaaccaatcgtagttgttattgaattcgggaatttgggagatgggcatttttctcttttatttattcttttatgtggccaataaatgagaatattggaattagaattccacaaaggacattattacaaaaccttttttattatatactaattataattgtcattgttgtgcttgttggggttggttcgaatcaaaacacaccattcccatgtatcaacattgtcccatacctttgactattaatgaccatttcatctgtgcccaatgttatcttcctttttattaatcacatatttgcatatgtattatatgtatgtgatttattacataagtaaaccacatacaacaaaactatgatgatagcataattttaagagaaaaaaaactagtttgacctaaatatagggttattttaatgaccataatatcttttttgctatgttagaaataaaaagttaaaattacccttaatttttattaaaaatgtggggaatatatttctgaaaaaaaacaaatattatgtgaaaagtaggcgggtttatttctatcttttttaagagagtgattcatttttgtgtgtgtttggtgattaagttaatttggtttttttgcattttttatttcgttttattttttttcgtttatttttttcgttttgtattttcttttttatagttttctatttaattgttttagtttaatagaactggaaataaaatgagtatttggtcttttaacataaaatttgtgtcattcaagtaaaccataatgttggagtgttgatctagttattttttcttaaatttgggtcaaactagataaattttggtattctttttaattaaaatttgttggattctcatcaatttgagatgcatttatataaaattatatttatccaatgtaaatggatcttgttatagggtgtgtgtgtgtgatttgtaaatgtagatgcatgtaaggcactataccaaacaagtgttgattattctcgcaatccttgagccaaattcttcacggcatcttttgtcgtgaagttgtgtttgtgtgtgcatctttttcttagctatccctttttcacacagtcactcgtacaccacttacccttgcgaatatgatcaatatgattagtaaaaagagcactaagattcatatgattcttatatagaaattatcttaaataattcattaaaatatacaatagaaatgatgattataattaagaatatgaaaatgggtttctttgttcaaagaacaaaatgggttaacacacgtttcaggttttacttttgttacttaactattgcaagatgcattgatccacatgattttatgcggcttcgatggtttttatttgtaacaaaagatacttcgataaattatgacgatccatcaatccattgtctcgtgatcaaagtctcgaatgtaaaatgtaaaccatcatatataatcatgaatggtttttaatatatcatgataacttcaaataatttttttatccatttggcgttgttactgtatatttttagttctagtttttagattagttgtagcgttctcttgtttttaattgaaactcgattaaaatagtatttatatagaacaatttctctctaggttaggaatattaattaccatactatataaaatgatgaagtaactatttgaagatgctgaatattttaagaaattagttaatatagtggaaaaaggctctcttttttgttctaacgtatgacattatattctatataaatttgatgcccatgatgaaatttcgtttttatataactaatcttatctagatattttagccattgccagcgtcgtccaaaagccagtaattatatgtgcatccttaattatattatatttattccatgaattatttatcaaaataagattacttgataagtaaagaaatatacaagtggaagggttgtgattcttgtacttaattgagtttgtattgtggctgagttaaacgttaccgtttaggtataacacccggctcgaccagtttaaacatggaccgtatattatagcaaaagtggtggagaccgcaatcccacttggccaatgaaccggacagtgatgatactctttcaaacttgaatttgaatactttttatattctctgtgatcgggattcgggaataattggtaccatattgtttatgccaaacaatactcaaaaaagatattctagaaggtatgaaatttaagttgaataaaaaaaaaatcaaaagagcttataatacataagctattctaggaaataattgctacttatctaagaaactataaaaattctactatggaattatttctaatgtacagatttaatactgaaatctaatttttctaagaaccaaaaaaaaaaaactttttgtttagttgtttatgctagtgttgtcgatctgtcgatagtcattcgggttcaaatctatattttgtatagtgtgaaaaaatgtaactttagaatgtaaagtaggtatttctgcattcagtaataacttatctttatatttcggtgagtttttccgaatttcatattgttcaggttttcaaactttagctcatattttggtcaagaaataatattaacactttacaagtatttcttgacgacaatcaactcatcttaactgtatttacaagtttactacttagtctactttactgacgtcggcttgtgattgaatcataaaatattgggttgggtggtcatcttttaggaggaaacaaaagtgtgggtaggtgatcacaccatcatcgtcaaatatttgtgtcaatctgaaactacaccttttgataaaaataacaatatatatatatatatataagaccttatgtggatggcctcgtggcgttgagaaagtgtgtcaaccgatcatgtgcgaaatctctttcgcaattgtgtattgaagtgataaatagtgtaaagtttaaactatagaaaacctaatacaagtttttggatgcgaaatctgtgaacttctagagaaaatggaccaaacatttatgccataaccttttctggtcattgtattatttgtatatattggtaatattcgaccattatttgttaagttccaatggatttataaagtcaggtataatgaatcattttgtgatataacaacattacaaacataagttaaaactccaaattttaaatttttgaatttaattttttgtcaaaccctatgagaacgaacctaataagcatacatcaaagaatttgtccggaaagcctcctcatagttcttgtgaattactccgacaaacattattcatgtgtcattgacccagacacgtattcactcatcaggatttgagtttgtaagcataaacgtaacgaaatttcctcgatcgtcattgctttcggtttgactcaccaaacaaacaagtgaaaaattactaagtaattattaaaccatcatgaccatcacataacgacattttttataagatgtgtcggcaacagtgtaaccagagagggtgtgtaacggtaaagaatagtaaagtaatccatcaaagtaatggcaaattaatcaacgtccgatccatgatttctatgaccggcttgatccgcgtgacaggttaattaattgtaatgaaaagaagtttaaggaacacggaattagttaaggagcagttgttagtaaattcgattggaccctacgagttgtggccttctcggactcggaccagacaaaagacagccaagccgaccccaaaagctcatagttgtatctttcggtgcgaagcaactcaatatggtttatgtaacacgtgtccaaccatatattccccaaatttataaaaagtcattatgttatttatttatttgtgttatttacattttttcgattgaaactggtaacggtcgtaattattctctgtgccccatttctctcgttctctcattggactagctgtttttcattatgtcttaatacacataaattattaatctttaggctgcaatgttgttatagtatgatattttgtgggagtttaatatccattttactctaggaaaaaccaatcttttagtatatagatatttaattatttttagagagatttgtttttttaaattgtattcaaaataataattaacaagagtaatgatgaccaaaaatcataaattaatttgttttccttcagttagatatttattacaattagattctttgaaattttaatatttatttacttttttcttatattattcttttgagctgtgcatggtgtgattctgtcatctagaagaccaagttgcccaacaggttgatgtaatgaaaaagactccttggatactggggactggttaggatacacagccttaaataatttgttttatttttcccttattggggttttgttttggtgtcgtaatgtcatattctcaatttcatcaaattaatacgtcacgttgaaaacccttacaaacaaattaaataagataaacacataataaataaccttactcttatatcatccagaaatgtgaaaattatatgagttcatccaacccacccaaataatctaatttgaaatttccttcagttttatatttattgggttacataattgcatgatataaagaggttgatccatacagttaaaaatgaatatagaattataagtggaaagtaatctgaacatcataaattgatatatcaacatatgtttgtcattattagttaaaataacaaataaataggatgtagtgcaaaataatgttgtaattaaaacgtgtcaaggaatgatgtttgaatttataaattttattaactcgtttattagtgtataacattactgaatctagctttcaagctgacctatatatatatatatatatataatgcattttagttaataaaattttaatttattttatagaaagcaatatttacttttttcttactaactgaattaaaatcatcgtgacataagcagaaagagaacttattgtttggattcctcagaagagaatttggttttgtaagcatttttattttagaaaatttgtccaaattttttacaatagtgtttaaggtattttagttataattatagatgctcatggtgtataaaatccgtgaaggattttgggaggaaaataaagcgacttagatgcttgattcgactatcttgtgtgacggttcgatggatctagaaattgctcaaccaccaaaaaaagggggagattctttacttgcctagattttattatctttgtgctgatgatttgaaagagatttggttggtaccaatttttctatgaaaattaatagctacgttgtagtatcaagcagtggttaaagtctagcctatggtttttttttttcttttcagtttgacaaaattttaacgcctaacttccttttctttataaaagattcgaatgttgaatagtccctaatatttttggatggttgaatgaatggtgacttgcgtattcgagaaaaataacatttacgtgtcaattttatccatcttaacatatgaattatgatgatatgaatatggatttaaccatatatagttattagtttgcgactatatatacacattagacgtacacatgtctatctatatagaccctgttttgaaatattctttactataaatcataaacacattttgttagaaaaaaccatatatgaaacggatctatatatcttgatttaaatttaaaatatagaaattcggatccgaatccaaaaaccttatgtttctcggaccatactagttcgaatcttggatccaatatattttgccaacttcttttttttgtaatgaaattttttgccaagctctaacaaaaactgctaaaactattccatttcaaaatgttaaactttgggaatttttttttgtgtttgtccatgtttgaaatgcatggagagtaacgagtaaaagttatgcgacatttgtacatgtttccgagctaattattgtaaacgaagtaatctcacatgcaacaacatgtgtaaataaactccaaaatcaacaaacctctcgattttgataaattcaggcttcttaaataaataaataaaaacctacacgtatcaacgaaacggaaaacgtaacttaattactcatcactgatatacgaacaatgagactttgtccgttagtcgtttacttaggacacaacagttaaaatctctttcagtttgtcaaacaaaagtcaaccaagtctcttctcttttccgacaaaatgagtcattaacggagtctaaccgctttcctctgtttggtttatctccgagtgcgcgtaaacttcactcttcccattggcgacgtgtcaatctcttttttttcaaacaaaaataaatttattcgtcaataattctttttctaccgaccattctgatcctttttatttatatatttttgtaataaaattattatcaaagtttatgtttagtctcgcttttgttatcctttttttttagtttagctgtgatctcccttttgtcatgattataagtttggtgttacttactttttaaaagaacaaaaaaatagagaaatatttttaactcgatgaacacgtcttgcgaatttaaagcatctcaaaatttctttattaattttgctaaaaataaatataataacacatattcaagccctttattatggtcggatatttttccaaagcttgaagcattcattctaattaatactatgatttttatatagaaaaaaaatcagcattgggagtatcgaaccatgcaagagttgaaatatagagaagaattaattcgtattagctaaacgacgaagctttattgtcaaccgagaagttataacgatctaactttaacgcatgtaaacatattataatgacatcacaaatataaacttattatataaacacttgagacagataaataaatatactacagtactaattatttagagagagtagccgttaaatcgttaaaatggatagttacagtagcctcccattttaacccaaaaaagaaaaagagtaataatcaactttgtcatacatttatttgccacaagattgttaatccctagaaccgctaacaccacgtcattcgaaatctctgagttattattaaatgaattctctataaccttttctactattttattcttctttcggtcaaatttattttcaagttaataaatcctgatatattttggagtacaatttatactttacgttttgccctactttggagtgtttttagagcttttttctttctttttttcaaagtggacgactgaaacatgtaattcatgtttgtgatactgattaggaaaatttcataaatctaaatcgccaacaatttttaataaaatacacacggctgtttcgaaactttttcaagatacatatcgattaaaatttcaaatccgaaaaataatggtttttatgatataactaaaccgttggactaaaaatgggccgaaataacatgttaatattaacggccgcaaactattgcttgatccgcttggcccattggacgactttgtttgtaaatgtccgaatattttttcaagatatttatgtatttggtacttcaaatctagtacccaagccttagatcattaaaatttagaactcagtatataactaatgccattttttatttttggattcgatatttttttttttagtgtaatattaaattatatttaaaaaaacaaatatacgtttttataatttgtgcttcgtatgtttgaaaaagtaagctctaaagatttctgatgatttttcgaaaatgtttaaagaaaatgtttaaacaagctaagagtcgaggttaactagtcatgggagtgaatccagttttaaataggcatcgtcatactgcttgtcgcctaataatcgtattgctgaaatcagatttcgaatttgtttatcaacccatatggtgataccctttatattatgatcccacgcacctcaaaaatttcggcgttggattcatgtcactcctagctagcaacctcagggctcgcagtatcccattcgtcttaattagttaagattttttttaaaaatttattttgttcagttattattcatttcattcgaacgattaaacaaagattattatggtctcgtgatttatatgttgacccttctaatattctaaatttaaaaataagaaaaaagaggaaaattgaggcaaaacacatgttgccgagtcattatcaactaggggtgcataatgatggaacaaagcacaaatcttttaacgcaaactaactacaaccttcttttggggtccccatccccgaccctaatgttttggaattaataaaactacaatcacttaccaaaaaataaaagttcaaggccactataatttctcatatgaacctacatttataaataaaatctggtttcatattaatttcacacaccaagttactttctattattaactgttataatggaccatgaaatcatttgcatatgaactgcaatgatacataatccactttgttttgtgggagacatttaccagatttcggtaaattggtattcccccttttatgtgattggtcattgatcattgttagtggccagacatttgaactcccgtttttttgtctataagaattcggaaacatatagtatcctttgaaaacggagaaacaaataacaatgtggacaaactagatataatttcaacacaagactatgggaatgattttacccactaattataatccgatcacaaggtttcaacgaactagttttccagatatcaaccaaatttactttggaattaaactaacttaaaactaattggttgttcgtaaatggtgctttttttttttgcggatgttagtaaagggttttatgtattttatattattagttatctgttttcagtgttatgttgtctcatccataaagtttatatgttttttctttgctctataacttatatatatatatgagtttacagttatatttatacatttcagatacttgatcggcattttttttggtaaaaaatatatgcatgaaaaactcaagtgtttcttttttaaggaatttttaaatggtgattatatgaatataatcatatgtatatccgtatatatatgtagccagatagttaattatttgggggatatttgaattattaatgttataatattctttcttttgactcgtctggttaaattaaagaacaaaaaaaacacatacttttactgttttaaaaggttaaattaacataatttattgattacaagtgtcaagtccatgacattgcatgtaggttcgagacttcagagataacggaagagatcgataattgtgatcgtaacatccagatatgtatgtttaattttcatttagatgtggatcagagaagataagtcaaactgtcttcataatttaagacaacctcttttaatattttcccaaaacatgttttatgtaactactttgcttatgtgattgcctgaggatactattattctctgtctttattctcttcacaccacatttaaatagtttaagagcatagaaattaattattttcaaaaaggtgattatatgcatgcaaaatagcacaccatttatgtttatattttcaaattatttaatacatttcaatatttcataagtgtgattttttttttttttgtcaatttcataagtgtgatttgtcatttgtattaaacaattgtatcgcgcagtacaaataaacagtgggagaggtgaaaatgcagttataaaactgtccaataatttactaacacatttaaatatctaaaaagagtgtttcaaaaaaaattcttttgaaataagaaaagtgatagatatttttacgctttcgtctgaaaataaaacaataatagtttattagaaaaatgttatcaccgaaaattattctagtgccactcgctcggatcgaaattcgaaagttatattctttctctttacctaatataaaaatcacaagaaaaatcaatccgaatatatctatcaacatagtatatgcccttacatattgtttctgacttttctctatccgaatttctcgcttcatggtttttttttaacatattctcatttaattttcattactattatataactaaaagatggaaataaaataaagtgtctttgagaatcgaacgtccatatcagtaagatagtttgtgtgaaggtaaaatctaaaagatttaagttccaaaaacagaaaataatatattacgctaaaaaagaagaaaataattaaatacaaaacagaaaaaaataatatacgacagacacgtgtcacgaagataccctacgctatagacacagctctgttttctcttttctatgcctcaaggctctcttaacttcactgtctcctcttcggataatcctatccttctcttcctataaatacctctccactcttcctcttcctccaccactacaaccaccgcaacaaccaccaaaaaccctctcaaagaaatttcttttttttcttactttcttggtttgtcaaatatggtcagccatccaatggagaaagctgcaaatggtgcgtctgcgttggaaacgcagacgggtgagttagatcagccggaacggcttcgtaagatcatatcggtgtcttccattgccgccggtgtacagttcggttgggctttacagttatctctgttgactccttacgtgcagctactcggaatcccacataaatgggcttctctgatttggctctgtggtccaatctccggtatgcttgttcagcctatcgtcggttaccacagtgaccgttgcacctcaagattcggccgtcgtcgtcccttcatcgtcgctggagctggtttagtcaccgttgctgttttccttatcggttacgctgccgatataggtcacagcatgggcgatcagcttgacaaaccgccgaaaacgcgagccatagcgatattcgctctcgggttttggattcttgacgtggctaacaacaccttacaaggaccctgcagagctttcttggctgatttatcagcagggaacgctaagaaaacgcgaaccgcaaacgcgtttttctcgtttttcatggcggttggaaacgttttgggttacgctgcgggatcttacagaaatctctacaaagttgtgcctttcacgatgactgagtcatgcgatctctactgcgcaaacctcaaaacgtgttttttcctatccataacgcttctcctcatagtcactttcgtatctctctgttacgtgaaggagaagccatggacgccagagccaacagccgatggaaaagcctccaacgttccgtttttcggagaaatcttcggagctttcaaggaactaaaaagacccatgtggatgcttcttatagtcactgcactaaactggatcgcttggttccctttccttctcttcgacactgattggatgggccgtgaggtgtacggaggaaactcagacgcaaccgcaaccgcagcctctaagaagctttacaacgacggagtcagagctggtgctttggggcttatgcttaacgctattgttcttggtttcatgtctcttggtgttgaatggattggtcggaaattgggaggagctaaaaggctttggggtattgttaacttcatcctcgccatttgcttggccatgacggttgtggttacgaaacaagctgagaatcaccgacgagatcacggcggcgctaaaacaggtccacctggtaacgtcacagctggtgctttaactctcttcgccatcctcggtatcccccaagccgtaagtatctctctctctgtttttttttttgtttatccattggctaattattttagtactatatctgatttgtcgtttataataaggaaagaagtaaatcaataacctaatttgatgaattttttttcatttttattaactgcagattacgtttagcattccttttgcactagcttccatattttcaaccaattccggtgccggccaaggtaaatattctatttttgagctttttatttaatctaaaattaccctttttgttttggataatcaaagtcgacaatcttcttaaagtgttgggacctaaaaaagctaaaagcatttaatacgtgcagattcgtaatttaataacttattgagaagattctataagtaaccaatatttatatattcgtttgagtgaccatatatacgcgatataccaaatttacaatttctatagcctacgaaaatttgtaatcttgattcctaaagctttttatcttttcttccacaggactttccctaggtgttctgaatctagccattgtcgtccctcaggtaaaaacccgtttaaaatcagttttacttattttcatttaggaaaaattatgactaatatatatatttggtttcttggttaaatatagatggtaatatctgtgggaggtggaccattcgacgaactattcggtggtggaaacattccagcatttgtgttaggagcgattgcggcagcggtaagtggtgtattggcgttgacggtgttgccttcaccgcctccggatgctcctgccttcaaagctactatgggatttcattgaattttagcagtggttgtttggctctctttctctcataaaacagtagtgttgtgcaaatcctacataaagaaaaaagaaaaggaaattaaactcattgggttggtttgtattttacctaaacccacgaagttcctttttctttttgtaactcaatttaaatttggagtatattttactttttgttaccttcaaggcttcaatattacgacttcattgttcggtaataaatacctcataagctacaaaagattatgtaacgatttaacacaattatttttttaacaaacaaaaacaacgatctaaacagttcatattaactgatttgataacttatttcacaaaaaaagtatatgcgaaatacttacaaaatatctttacatttgattgtacatataaaaccaaaacaagttttaagatgaatgtggctagatacaaaaattaacggtgaaataagagcattctcgatttatatgttttgtttttatctattttagttaattctttaatcaagttgtttcacatttgtttaacctgattttcccgtttccaatggataaactcggattatgaaagtaacttgatgtacatgtttggtaagcttattggtcaaagtatgacaagccttttcccctaagtatgataagttttgggaaattttcagaaagcacactcttttaagttttagtttttagatgtatataacataactaataacatgtatcaaaagaagtttggaagagtttcttaattatttgttaaggttcttcctatatatatatattctgaaaaattcataaatcttccctaattaaataaaaaagatccattagataaaaccaaaatgaaataatatgtagatttaaaccggaaggtactaaaccggaaattggaagaggcaacgtgggccttatcttcttcttcttcttcctgctagattttattcttttatctcttgagcacacacacacatacaagactctcctcacagaacgatttagatttaatcgggaaaaagttcagtcagtgacactaatgttcgaatcgaacatggttcttcaaacactatcttcttcttctcctccaattcaccgtctctatcttcaccattctcagattctcccttcttctgggtcacccagcaagatttctcttcaggtaaacactccaagttcctctctttcgcttcacccatagtttacaatctcactgtactctagggtttcctctgttttttccccaatcaagaattttgattcgtaaattgttcttacgatagaagaagattatgtggaatctgaacaagaacagagtcaaaatttacccttttattttgttcatgaacttgctaatcttcctccttgtttttgaacttgtggatgaaggcagatacatggaaggactttggccattcgatcttttcatggtacttcacttcttcttccctgcttaaagtttcatactttactatacatctagatgtttctgcttgaggtttagattgatagctttagattatgtctttgcagaaatttctgctagaggtttaccggctttgaacaaagcttccttgaagaagctaccaatcaaaggatctacctttctgctggggcagagcttgttgatggtttctgctcacccacagttggcagcagcagcagaaatcataaagcctgaaccgatttacgaagttggagagttatttgaacttagtattcagctttcttacttgctgttactactggggttgcttggagttggtactttctatgtgatccgtcaagtacttgtacgcagagaactagacctctccgctaaagaattgcaggtaccagacaatgtgctctttgtggtagaaaacagtaggataagtaactgagatggaacgagtctagagtagagatgtaatattgatgtctctcgtatcattgtctgtctcttatcttttaatgctattcacataataattgtagatattatgaacattagacttatttaagtagctatgcttgctcaacgtttttgttaatttgatcaaatctggatgctatggttctattgttgtctttatgacctgaaggagcaagtaaggagcggagatgcaagtgcaacagagctctttgagcttggtgcagtgatgttgagaaggaagttttatcctgcagccaacaagtttttgcaacaagctatccagaaatgggacggtgatgatcaagatcttgctcaggtaatagacttttacactaataccgttaccaagtaaataaaaaatcaattgacactgcaatatacaattcctgagacaggtctataacgctcttggagtgagttatgtacgagaggataaacttgacaaaggaattgctcagtttgaaatggcggtgaagctgcaacccggttatgtaacagcttggaacaaccttggggatgcttatgagaagaagaaggagttgcctttggcattgaatgcgtttgaagaagttttgttgtttgatccaaacaataaggtggctcggcctcggcgagatgcgttgaaggatcgcgtgaagctttataaaggtgttgtggctgttaagtctaagaaacggtgacggctcaaacaagatgcaaactctgaaccaagaaccgttggtctctctcccccttgtgtatttttttggtttggtaatatgtatggagattttgtgttaatatgaaaatgaaactttgttgttttttgtaaccaataaaatcagatgtttaaaacttaatagccattgtgcccaaaaaaaaaaaaaaaaaacttaatagccaataaaatcactcatcttattattcggaatcgatacaaattatatagttgaattatgtcaacaatcaacataataataagctcacacatcacacatgcaacataacaaaagaagaaacataatcagaagatgagactatagttgagaaatgagaagtcttttaaggacatttgagtttattgccatgtgtacggatactggcgtagcaaggacatgatgctgtgttgccggaggttcccggcggcacacactgacacttggcacaacaacttccacaggctctgtgacaaactttcttcctcgatgtcttactgcatctccttgcgcatgcatgcccacaatctataaaaattggctcatttaataaaaaaaaggttgtggggggcaaaaaaaatacttagaacaaaggaattagagtgttgaaagagtagactaactgattcttggacgatggtggtatgttctcttaaacgccgcagtttggttctcgtcattcgtctgattagcaacaaaaaaaagaagccaacatttccttatatattactctcttgaaagtttgtttagtatgtttttgtatcactcttacctgagaaacagaggaagtttcattgttgctggatgatgacaactctgcaagtacctatgaaagaccagagagatttttcattgttttactttggtttgtctgaaatagagaaaaggtagtcttgaaaatggttttaacagtttacctgagaaagcagaagaaaagagatgatcagcgtaacaaaagccaccacattcatcttcttcatatttcttgagtagtgattttgaagtagtgtgtgaaaatagtacttgtggatgattctttatatagatacatttcagctactttttattttctgaacaattactcatgttggatagagatcacatgcatagactttcatcgctggagccaaacataaatcacaggtttttattggataaatcacagattatagattgcatttgctgtaaagtgttggagtttgatatgcaaacagttttgattggttcccttttttcggaggatgcatggaagaagaagaagaaaattcaaacctagtttcactaatatcttaagctaactcaatttgttacgtggaaatgagagtaatttttacattagcttgatactttggtagtttatgtcttaatgatagtttacagctgtctcttagttcagacattgtgacactgagagagatagatgaaggaaacgcagacgcaatattgttcgaaaacacagatgtagtgtttggcgtttaattgtctattttatacaaacgtcattagaaattttctaacaaacatgaaacgtcgaactgaaaacaatatcgcatttgtattggtgttttcataggtttctttaattttaatatatgtatacgagaacacttttagttttcatattggatagaaaaataaaagagaaaaactctacaagacaagtcaaaatgtttgtgttactaaatataaagacaaagcacagcgtgcaaattgctaaagtctacattaattgtgagggagaaaggaaaatgacccgagagggagacatcaatttaatgacaattttgattaaaaggcttataaccaatgaaaatattaatgtcctcaaaatgggtcagatccaataagcggcacccttcattaggcccatctatatttgagaaaatttatcatctacaattctacatcgtcaattcctaaagattgattgtataggttttttttcttgtttcataagaattattctttcttttttttatgtcttatgcatatttgttaatgttagtgagtcacaaaatttagatatttgaattcactaaccattttaccaaaaataaaaatttactccactatagattgttgtccgtctaataagaaaagcggtgttgaaaacttataaattcatcctctctgttgcaaccattttgtttcttatgttgacaagtttgtcctacacgtccaaagttttatataaaagagatcaaagagacaacaagttctcaagtccaaaactaaacactattttgaatggatacttcgccaaggacccgaattgtacctactagacgatccaactcggtcaaattctcctcgacggttaacatttcaacccggcgatcactctcttcctcctcctccaattccctcctattctccggcaactctccggcaactcctctccatccacttggcatcccattttcatgggaaaagcttcccggtaaacctaaagagttctcgtatcaccggaaaaacgaatcattaagcaacctcttgcctctccctcctcactggagtaaccatagccctaacaccagatgtaagaagaacacgtcccctgcggccatgagagatcctttcatggcggcgttggtagagtgttccaaaggcgctaccacagacggagaacataccggcggcgaatcaaggaaggtcttgaggaagagcaggagcatcgggttactgaatctttactcttcttgtagaagagcttgtgaagtttctgaatccattgtttatctcccgaagtccattgcttcctacgatcatcttcatctcagcactcgtggtcgtcgtcgccgatgattgatcacattcgtcatccttattaaatataataagatttgaataaaagataattaattatacaatacgtaaataaatatgttttttctattattaatgcatataaaaaggagcattattgcgttagattctctagaatctgtgtgtgtgagaaaaaaaatcgagagatgatgtgaaaaacagcaaatgcatggttagatccaattccaatggataagttggttaatactcatacgttttttgtgagagtgtcaatgcacttttatatgtgaccattaaggaagaaatatgatcatctacacagacagttcagttaaaatcataatcaatttaattttgtatagactatagagcacttggatgttttcatcaaaacaatatgtatcatgtatagtatttaggagcaatcgacttttcgtcgatcatgccagtcaattattcaattttactcttttaattaggaaaagcgaattttatcatttttttcttgaatagtaggggttttaatctctaaaagacaatgtaaatgtatattttctcgattgttatttcttaactaagctaactactggaatttctagtattcttttatatatttagtcggtcgtataaaatgatatttaaatgaataatggaagtgatgggagtacataaatgagaaactttcattgccaacgacagacaaagtttacaaatgatgggattctaatttattgatattcaccattcaaattccctcatgtgaatattattcatacacagttaacatgaaattatgtttggaggacccatagtaataaatattcatgaaagtggaaatttcaatcaagttattcatcaaattaaatcagttatcgttacagtttgcaaactgatatcatgaaagttttagatttgagaactttcgaagacaaatccatcaaaatgatcaagaaagttttgtggatattgacacattttggtatactatgttttctcccaatactttggtgttatatgatttaaaaatgttcactagtaccagtagttggaaactaatttatgtattgcaagtagatgaaaatgttcactagtgtttattttgtctagtttaatcatctgttgatcgtagatatttttcgttttttttggctacgaaacacgttggattcctcatttgagaacgggtggtcatgaccaccaaaagtagcccaaattagaactcttcttctctatttagtaaggaggttgggtcatggtgctcaacttttgagatccaagaaaaattgctggattcacatagtcaaaccataacttaagcctaacttatggatttggcatgccactagttggagactaataaattaacgtagtattgcaagtagtataaaatgttcactcgtgttgtttctttattttgtccgtaagttttttgtttttttcgttattactctgttgatcgatagtccacttttgaggactaaaaaaaacaaagactagagaaattctcttttgaggactgaaactgattagatgcttcatgcttaatcccgtataatggatattattgacaaataaaatagttatggtcttttctttatatgtttgttttttgatatagatgaagatactttgattaatatatattaaatcattctcaaatctacagatttatcataatataaaatatcacaaaatatatagaaatgttcaaattatcaaaatgtagttaatatttgttgtcaacaagatcagatatacttattataaattgtcttttaaaaaatattttttctataaaaatcttcaaagttttcttacaatcaacattttttttaccaaaatcattaatttgattattgactattgccaaatttcagtttacctttaaaaatcattgaataacttatgattcaactaaaattttgagtattgattgaaacataagaatatatgattacatatcataaccaacctagagattcaatcctataactcccttagacgatgaatcttgttgttctgctaatcctaacattactccttttcattgtttcttatgtagtagacgcaggccaagtcattttggttgattccaacataactcgctcttttgtcgacatggaagctgatttctgtgagtttctctgtcgattttgcttgcagttacgttttcataactttgtcaccacttctttggtcattttttccattgattatatatatttttctttaaaggtacaaaggtgtaatactttgcttctaacaaaagctaggttctgaaaacagagagatttggaatatgtttgaatctatatttgttgaaatttgttgatcctgatgaaagttccatgtttcagctccatcagtgactacggtggaaaccggagtggtttatgtagctgagcctctcaacgcttgccgaaacttgaggaataaaccggagcagagcccttatggtacttcccctcttgtgttgatcataagaggaggctgcagttttgagtacaaagtcagaaacgcgcagagaagcggtttcaaggctgccattgtctatgacaatgtggaccgcaacttcttatccgcaagtaaactcatgcctctccatgtctatgctatacaaagtctctaatcttgaattgatgctataaatcttgattttgggaacttttttttagtggggggagactcggacggtataaagattcaagcggtttttgtgatgaagagagccggagaaatgctcaagaagtacgcgggttcggaggaaatggaagtcatgttggttcctcctaatacagaggactcggtgtggtcattgtacgcttccatagcattgatcttgtcgctggctattttttgtgttatggttacttgtgtcttcttctatagatattgctcaacaattagaaactctacatctcaattcaatgggatgtgccgtagaacggtgaaagcaatgccgagtgttacattcacttgtgcaaaaatagacaacactacaggtttctcttgcgctatctgccttgaagactacattgttggagacaagctcagggtcttaccttgcagtcacagttgagtatgttgtgatagtttaaactatctcagcttgacaacaaacttatgattctataattcttttggtgttttctcagagtttcatgtcgcttgcgtagactcgtggcttatatcatggagaacgttttgtccagtgtgtaaacgggatgcgagaacgaccgcagatgagccactagctacagagagcacaccgtttctcagttcttccattgcaacatcatctctagtgtgtatagactctcctcctttgggatcctcagtttctttctctccagcgcatgtgagctcgtccttcattcatcaatttgtcaggtcttcgccaatgaatggcagccgtatctcagagaatcttaggcgacaagcctcaccattacagtcatcatcacagcgatcacacctctctatgaagtcttcccattcactgggttattcgaccatgtcacctctcaacgcgatgggcatgtcaccataccggccatacccaagcaatgcatcgcctggattattcagttcaacaaatcatctgctttccaattatacagcaaatacattctctcatttcgcctctgcacactcgcttccggactagtagaccaagcttgcaacagaacactgcagaagaatctgtctccttaggtgcggtccagtcatgtaggtttcttctgctttttgatgtcaggaatataccatcagatcccagtctatcaatgatttgtatacacctctgttagtgttggttttcattctttcatttttttgctcgaatctgttttgttacatcagaaacttgccagggaatgagcctagaatcgataaaatttgtcaaaactgagtttaaattaatctacaatgttagtggatttttataagactacacagcacaactagccactagattcttaagtcactctatcctttgtcgtttagctttgatatctctcatccactccttgcactcctctgcggtgccgttggggtaagccagctgccaagtgagcagcttctgttgctgcaaaacagagcaattggcattcagtaaaagagataagcaagacaggatcaatgattcaacagtacgagattactttgataacacagcttttggatcgagtttttagttaaaatcattaaggctgagtttgcctagtgacgaacagtttcataaagccacatttgaaagcaggatataatagatgtttcagaaaggttatttgcacgttttgtcacagctaaagactagcctcagataatatagtgacctaagaaacagaaacagaggcatgcaagagactagatctacaagttcaatttgtactgagcacaactccaacatttaattgaacatatggagaaaccgttttttttgtttaagggtccatgacagagatctaggatgagaaaaagttctgagttctgagagattgaggattagggaatcaatgaaaagagaggaagccttacccattcacggatgagccgggatcctcccttcagctcagcaatttgcattatctccctgccattgactagaggctttgcatcccagatcttatcaagacctgaatattaatgatagaataagaaagaaacactgtatgtggaatggttccccaggcatattgataatgcagttctaatgatagaataaatgagcttttctaaagatgattttctctccaccctactcatgcatcacttttcaaagtcagaaagattgcccagaaacaggaattatgaaatcagcttctcatgttcttttgatgttcttagttctactagtgagtctggtaagcacaaaaacgtggggagccttggtaactagtcacagccattacttcttctacctcctcttagcaatttctatcttatatgctaccatttatcaaacattctaacgcttacccagttcatgaatggtggcctcaactgtcagataagtttctcgcatcctttccagttggaagtccagctgcccgatatcttgatgatcgttgctaccgtcaaccgtagcagacaataacaaagatgttaacagagaaacacgccagaagtctttaatatctctaagtagaaaccctgtaatagttgtaaaacaaaacattttagttacatacatatggtcagatataatatggtcattataccacaagtgttataatactccgtcgtctagaaattaccaatgacactgactaactaatatttactagtgattttttttttatctgctcaagttttaaaagtgggagtaatacaatactacaaaggctatagaagagaacctgtgagtactcttatttttgaagttgctgggatcactggatcattaagggtgatggatttccaatgctcaagaatatcagcggcccaagttagctcgtccagttctacatctttcttcacttcaagggaaggaatcaacgaacgaaatctctccgtggtctgatgtatattcataacctagagaagatggaattcattatcatgttagtgatgaaactgttatgttgtatagcaggcaaacttaaaaggtatggtaaaacgagatacactgctattaaacaagatcacacctataatctaatgtcacaggtgaaggctctgattgtacacagttaattgttttttttccgttattgccaaagaaaacagcacaagtatcaccctatagttactaaattaaggcctaagatattgaacataataatcagaactcactgtttcagcgtcactggtcttcctcttcatggagaatttaaaaatgtggttgacaacaggaatctgaaaaagggcgcaaggttgattcgggtagacaactaaactcagatttatttagcccaagaaaagatgataaaataaataagggagtgcgtaccgatttgcccttagtgtccttgtatacagttttcctaaaagggagaaacatagcagcatagagagcaagccgtctttgttcaccctaaaacaaaatgataagacaccaatcaaaatctaattgactataaaaatataggggaaggcaatctttagcagttaagaaagaagcaaacgcgccagaataatgactcacactgaactttcctggccgaggtgttttaagtaagctccacatagcttccaagtaggattgggagaggctaaaatagcaagacatgtgagttagttttgcaaattatgaatagcaatgtcacagaaccagatttgcaaagttagccagtgtgacgagtagaaatgagataaacctgccacaattttctggtggtgaaggctcagctgaagagggaagggcaaagacaacactaaatagtttcaggtcagaaagataggtaaccgctgaaactggtccattcccagatatcatcaagtcaatctgcaccaaagaatcaagttgtgtaacgataaaccctaaaaagggaggtcgccagagaaactagccatattgagtaaacaggaagtatacctcattcccaatccgctctctgctaattttttctccaagagctacccttacttcctcacttgaagcagcttcttttagttcttcatccaaagtaaaaccaaaccttgcacctgttatggcagtatattaggacggacagacaaaatgacaaccacagagctcaaaatagaggatctgagatgggaaatgtaataacatataatgaaaaaaaaaacaagaaaataaaccacacgtaccaaagcgaacagcccggagaactcgcaaaggatcatccaaaaatgtggcttttgcaggcaagggtgtaacaatttttccggacttgaggtcatcgatgcctgtaatcatatcagttccttttaaactattattttgaacgtcacagggaatgaatgatggtaacaaaaggatatactaacctctttctgtaaggtcttctactgcgccagagttgatattgtagaataaactgtcaaatttaagaaatcataattgtgtcccaatttgcattcagagatacggagatcacaaatatgctacttctggttcaaagggaagaaaatgagtgtatgtacctatttatggttaaatctctacgaaaagcatcatcttttgcggtgccaaatttctgaaaaaaaagcagagaaacaaacacttaaagataagcagcacaagcacttaggcccttactaatatagtttcgatttcaggacaggttgtgtcatccattcacagcagataaatacattcaaaccacataggaaaatgaataagaagcagtaccattgtaggaatacgactattctctgtgtattcttcacttctcaagttaacaaaatctatccactggtcataaatccgcaactttgctgtctccaagtgtttagattggtcagggttcctgaaaacaccaacacaataaaaccagttaacatcaaagaactatagcgtatctgtaagttacaaagcatagaagagttcagaacctttcaataacagtgtcgccttgtacttcttcatctctcgaagataaatattccttaaacttatcaagaaattcacttccagacatattatcaatagctatatcaatatcatcactctctttccctagcagctgaaaacaaagataaaagcaaaaacatcaactctcaaagactcttaactatatcaaccttaatcatagaatctgaaaacggtacaaagctgcgtgtaccttatcacggacccaaccaccggcgacacgaagctgtgtgtcaaggttacagtaacggagagtactaagaagccgatcgaaaattttccgttctttgtcagtgagctcaatattctccttcaattcgattgaaggaatcgattgcttatcttcctctccaacattcgtcatcgccgcgttcgtcgagaaccagtaaccacacggacgagacgagacaccggaaacgcgaagaagcgttgatgaaatgcgagacgcgacggtaagggaacgattaaggttacggaagcgaaaaggagaaattagaaagagagattttgggagatttatgagagtgttgatcggaagagaagacagtctcatggtttttagtatcatcgtgctttttccgatgcagcgatttacggcagcgttctgaaccggcgatgtgtttgggctaagtcggatccgtaaaagttagaatggttattaggcccaatagtggcccaatttcctttactaagatatacaattggtgaatcggttatttagatcaattcaatatataattttaagcgggaaaagaaaatgaatacgtctctttcatctggtgcaaatggataggtgattatgagtaacactatttagttcaaccattgaagactttacgtgaaacctacgaaactatgtataggtctttaaatagatttacacgcatgcgttagatcatgtataccaacaaaagtagcgatcacccgtacgtacaaagagagactacaacacaaatttgtattagcacaaattaaaacacatcccgactcatggagatacgagtaccggctccgaacttcatggttgtccaaaaaaacaaaaaaacaggtaaaggcattgtacataaatgcaaaaagtcaatttacagctagctaagttcagttcccatcaactataagacctgacttgaaagcaaaaacacaatcctggatttaacatcgtccacgtgaaccgcatgcactgacaatggtttctatttattttctaaatccacgttatatttgatttgacggtaatgtacacatcaacttgccatgaaaacgtattttctaatcctcgaatatttcaattatgcaatgatcaactactaattatgattgattttcaagatagctaaaaccactttcttttacattttttttttgataaaaaacttaggctccgaatggtgactgcgttttgcggtacggaaaaagtacggtgcggtttaaatagtaacgaaaatacatagatacatatgtatatgtaaagattttgatactattacagcactgttgcggtgcggttttggatgcggttttggttaccatatttgtataaaccaaaaaggaaacatatagtactccagaaacaaatcatttgatttcaccaccaagttacgccaattggtcaatttcaacctatcacattatacaaagtcaaatttaaaagtgaagacaaaaacataatagtcgtctaaacgaaacaaaactcgagaaaaagctgatcgaaccggcgaaaagtccaatgacccaatcgacagagattaagccaaattaacatgtcagactcaaaaacgatgtcgttttcttcgcgtgaacgccacgctccaatcacctgctctctacgacccttcatgccttcatctctctcttctccaccattaccacagtcaatgagagaagaaaaatgagagactttccacgttcgtagtcgtctctaatctcccctctatattatatctaacatcttcctttctctctcttttttttttccttctttctatatttatcacatttttcttcaccggctgatttgtttgcccggagattatctctccgtcgtaattaaggtccgttatgtttatccttaccttcttagatgagcttcgacattttgttgtaacgatttcttgttacatccataagaacagtagttatgacgataactaatgttaattactttaatctagataagtccaatcttaatatttccgttacattttttacgttaatgttccttaatcatcatgtccaaacaaatacgttttaattcatttataattatccattgttccagatctatacacacagaaacacaaagttaaagaatcctcatggaaggagtaaactcttcaagctctatatccgacctagacgaattggctcggttacttgaccggccgagggtaaatattgaacggaaaagatcgtttgacgagaggtccttcagcgaaatgggaatcttcgacaacgttaattctcccggaggatgggaaactccggtgtcttcggctagaaactcgtttgagccacatcctatggttgcagaggcttgggatgctttgagacgatcattggtttactttcgtggccaaccggttggtactatcgctgcttatgaccatgctactgaggaagtcttgaattatgatcaggtttggttatttggattgtttttgtgtttcataattaaaccttgttctgttttgtaatgactctgttattacaattttgttcaaaatgttggttaggttttcgtaagagactttgttccaagtgcactagcttttctcatgaacggagaaccagacatagttaaaaactttctcctcaagacaattcaaatccaaggaagggagaaaagaatagaccgattcaagctcggtgaaggcgcaatgccggctagtttcaaggtcattcacgacccgatcaaggaaaccgactctatcaatgctgactttggcgagagcgcgattggaagagtggctccggtggactcaggtttctggtggatcattctccttagagcctacacaaaatccaccggagacacttctctagctgaaacatctgaatgtcaaaagggaatgagactcattctctctctttgtctctccgaaggtttcgatactttccctaccttactttgtgctgatggctgctccatgatcgatcgaagaatggtaataaataatccctctatttcttctctttataaatcattaggaatctagtagataggtctctagacaaacttaggtttggttacagaattagtgtttaacgaactgatacttgtgtagggggtttacgggtatccgatagagatccaagctctcttcttcatggctcttagatcagcaatgtcgatgctaaagcacgacgcggaaggtaaagagttcatggagaggatagtgaagcggctacacgcgcttagcttccacatgagaagttatttctggctcgattttcagcagctcaacgacatttaccgttacaaaacagaagagtactcgcacacagcggttaacaagttcaacgttatccctgactcgatccctgagtgggtcttcgatttcatgcctctacgtggcggttactttataggaaacgttagtccagctcgtatggattttaggtggttcgctctaggcaactgcgtagcgatccttgcttctttagccacgcctgagcagtcggcttcaatcatggacttgatagaggaacggtgggaggagttggtcggagagatgccggttaaaatttgtcatccggcaatcgagagccatgagtggaggattgttaccggttgcgaccctaagaatactcgttggagttaccataacggtggttcttggccaggtgaatttctgttctatactttcttgaaactatattttgaacaaaaccaattttttgatagtgacaaaataagtattttatatctttttaaataaccttttgggatctaaaggcgtgaatttatcgttaaaaagaaatgtattagctatctaaattacttttaggctttataaagttggaaacaaaatcattaagaaaaaaatcctctttacggaaagtgtttttgttagtcaaaatactctttacttatgcacggctaatcatatggagcatttcacctttgtttggaaaaaagcagtattgttgtggctattaacagctgcatgcataaagacgggacggccacaaatagcaagacgggccatagacctggcggaagcacggctgttgaaggatggttggccggagtactacgacgggaaatcaggaaggttcatcggaaaacaggcgaggaagtttcagacatggtctatcgccggttacttggtcgccaagatgttgttggaagatccttctcatcttggaatgatctcattggaagaagacaaacagactaaacctgtcattaagagatcttattcttggacttgataatttgttgtcaattcttttgagaagagcaggctaaaatttgatctaaattttgttacacaagtcaatgcattttgtattattattgtttcccttagtgtggagtagtgggattattgataacctctttgtagacgattttttctaccatatattttagcttcgattagcagcaatcaataaccgcataataccatgaaataaaaataagctgcatggtaaaataattttagattaaaaagttgcaaaataaaatatattactaaatacatacttatttgcagaataattttctttttgtattttttgaatctaaaaagtaaatcctaagtttttgcaagagttggtgcttccggcatagaatcttcttcaatccatattggagcattacacctttgttttcctcaaactcggaagcaaagagaaatggataaaagctaaaatctaaatattttgtgacttctgagtgaggcaagtagatgagagtaaaaaataaagattaatgagcggaagagagaagaaaataaaaaagagtaaaaaaaaattatattaagttatttgtgttactctaaattcttccacaaaagaggatgaaaaatattacctcaaaacaagataagacaaaagactatcattagtttgggagtaaatgagctgatagtgtattttttcaatttttcattgtgattggtaaaagttaaaggaagtgagaataataatgatttttctttccaccacgtaggctattatattaaacttttaaaagatgattaaattaaacttttttgttagctactattaatttaaatttggttatgtaattagtgtccatatgatatatgaaagggtgaacccaagtatttcactctttattcaaaacaatcaaaatttattatttaataaaaaatttatttaattataaaatctaggtcatcgttacaatgtcactaatttagagtaataatttttcttaggttttattttatttactcacagatttccaaaaatcagatatttttttatttagattgtcacataactgatcaaaatttgatacttttgatgaactttggcaagtttactacactagtggtaatttctttaggctcaagcacgtatattgatctcattagattactacaacaatagtacatcacaactaactatttaaaccacactatttgatggactctttactgtttttatttgtacattatataggtacaaggatctgctggtgatgatttggttggaataccgatgatgatttggagattgataactttcactcttatctgttttcatctccaatacaatctagggtctatttgttaatagttgtactataggtttttaagtacatcaaacccaatcatctattttggtagatacatgagcttgtcattggtcatgacgtacagtactcactttctctttctttttagcagctaaatataagttatataaatacatacttaaaatgagttacatagagagttatagcgatcaaatatgttcatatctcctcgagtatgaatttttgggaagcctagaagtttatccatctcatttggctcgagagacaaacttgttcttacctatccaaacgaaattctatttttttgcattgtttgatgatccaaatctgtacgtgtagtggtggttgtctatgatatttctcaaaaaccattatagtttttctacactattatatatatatatataaatgaatactaagctcaaaaatattttaaaataattgataaaaacaaaaatatatatgataaagaatttttcattatcgtctttagtgaatttgctattatcgtctatagttttggggactttgtaaactttggacctagctaaatttaattaccagtccaatagatttttttttttatgtacgatcttaaattattttttctttagttttcgatgactaaactaacttaaacccaactatagtgaaaaatttagaaattaagtcaaattagaccgtaagactaatacctttttcatacaaaagaagttaaaaaatatatatatatatatgtagagagtaaataaaattctcggtttggttgtataaaatattttttgtcattatattattggccgttttagttttctatacaacatttaaagttttttttgtcatggattcgccttgagagtctttagatcaaagttttttacttaaggtttaattgatgggatgaatcttcaatggtttatgctttcatatttttttatgtgacatgccaccatatttttaggatttgcattctaaatgacatttacattttgataaataaataaaatatatataactttttaaacctaattatcttaaacatattcaatgagtattggtcaaaactaagagttagaaatagaaatcgtataaatttttaatctccatgcatagataaactttctaaacatagtaaacgaaaatggatagagtataaattttttcttgagatgaagaagattttttaatatactaaataaatatctgaattatctgtaatatagaatatgttatgtgaggggcagacaaataaatgaataaaatactcaaaaggatgtaataattgaaaataccatggaggaatgggaccatttaggatatgaacgaagaagaagagagattctcagccatgcaaatgcaatgaaatcggttagttttgtcaggtgatggccccagccttatttaattttgggtttgcgtttcgtttcctgactcgcgagtcttgagtctcgtgacccaacttatccaaataccaaacatatatccgatatctttcatatccaaatgaacaagttgcttcacaaaatcactatttaacaaaacaaatcaaagggttgcagtaaacaaaacactattagtgttagttgataagctttggatctaattgtccaattcaacgtcaaaattttaaaacaatgaagaatttaacgggaagcttttaaataacccttaattagtgtttgttgagtcaaattcaaccataaacaaaatatcacaaaatggtcgacaacaacggaaattttgttcatcatcaactctgtttaacgaaaccattagtttggtaggtttacaaatattcaataaacctatatatatatataaagtttgtcagagtttgtgtcttacgtaactacgtaagtttccttcgagacattacagaaagattcatgttagaatagttactactatgagcctatgacacataccaatcgattctttttgtatttataaaactttgagttatgtagagtgatgaattatcgttcttaacaaaaacaaacacagcaaaaaaaaagaaaaaagagatgaactatatctatcacggattcattaaaatttaaaagagatgaactatatctatcacggattcattcacggtttcaacaatgtccttctctttaagttttcttagtcaacgcttaaactattttcttgatatatttctattttgcttgacatttacccatgaaaccaatacatcacaaatttataccagtatttccataattccatgatcataataaatttactattagcttaacatttttttaaaaattgacaagtttgttttgttgctttaaccggaaccttcaaaatattcgataaaatgacaatttttttaaccaaaagaaatattaaataagatgacgttttttacactagacgcataaatgtaagaagtttacgtattgattttgataccaaaaaaaagtttacgtatagctagattgataaaaaaacaaataaggaaacactagtgcatggctggctaaaagaacatgcgattcaatctagctaactacatgtgcaacatcatcacttttctcctattaacacgtactatcattaatattccactcatttttatttaagtttctcgttatataaaacaatttatcagtattatctccttttccattattcattgatcatagattcggttacctaccacccaacatctcacatgttgtttttatctatcttctaccccatctcacctgcttatattctagaatttggcctcctttggaataatatattttcttagaaaagctaaaaaaaatagaaataattctttcgtctaagttattgaattgtgaatccgagaataactatttactagtagcaacgtacaccttgttgtacaaaatttttaatatatatgcgtcttttcttataagagaattatggaaatgagatattgaaaatgaaatgtatcatacatatttttatagcaaaattcttacatatataattgtgattattcagttatgacttttgtctttcaaaaatgctattttgtcatataatagtgtataacaaaaaaaaaaaaaaagagtttgatcccaccaattcactaataaaaagggctttacaatgtattaactaaaaaggattaaatggaataagattttgtctctagatgcacatgataattcggtatttgatatctgtaaaacgaaaccgcactgacatattgttattaaaccagcttttaggtgagattctacctaaaagaacctaaacgtcgatttcattatatatcattttcttttaattaaaacaacttttaaggaaaccacatgctggaacaagattggacctggcacgttacctgatgtccgcagtccactctaaaagcttaagataatggtgacgattatttgttagtattagttataatcataacaacaactcaacttttaaaaaataaaaaaatcgataacgtgcttcttctaaaagcttaatgtataaaattcgaatttttattgctgaccaaggatccattaatgtgttggtatccattacgtaaacgaagatcttagttaatttttaaagaaagaccctaaagaaagttattttgtcaatctctagttatctattgcatatttgtcattatgtttacactcgtcattcctcgatgaaaggttaaccacgttgactttaaactttctttgtttttgaatgagacaaacaaaagtaaattaaagggatttaacttctaattacaacgcttgcttacaacttaattgataggtaatgatagcgatcaatcaattatagacatacatgtgtcagtcttcatagagatttaatgttttgagttcctccaaaatcacaagttttgcatatactgaaacaaccaatagtatgtaaaaacacaaaatcacatgtataatggtattgatgaaaatcgtatatatagactcactaaactatttccccccggaaagttggtgaatgaaaatgaacctaaattagatttctcttatacatgtctccctaaacaacttaactggtcaaaatttaatatcttcattggcattacttgtcagttgatatcttctatgccactgaagtgatcaatgaagtagttgtatggaaccaaagtgatcaattaaatagctgtttcaccaaaacaaaaagttatgttatgtcattttcaaatttttctttgaattcctaaaatacttgtaaaggttgtaggttaggttatttgaaattcaaaatgtaagtggattagtatgttaaaatcaaaaaaaaatgaagagaagacatgcgaatagccaaaaaaataggcaagaactaaaaagcacatacaaaaagtgacgacaccaaaccaaacatcatttaggtatggttttaacgtctgcatcaaagttgctctgcgtattatctgcttgaaatgactcattcaatagtataatctaattaataggaacacttcaaataggtgaaatttgacatcgaattatatattgtctccacatttttaagttacatggcttggaattattacatattttcagaaactatttgtgacgcaaaaaaatgtgatttcatgatttcatcgcttgaatttggtaatttcattaaaatttacatttcactgaatttaattgacatacgtaaattaaaaaatgaaaacattaattctacatagaaatttgaaaccaaaaaaaactcttaaaacatatgacgtatatcatataacaagattaatcacaaataaaatgtagtattaaattaattagtttgctagattatgaaattataacatttataaaaattaccgttttttagcatctgcaagtacaacatgccctaattgttgtttttataaatttctttgagcacaatcttttggctttgccatcaaataattatgctagtttcttacttgatgttacataacaaatgtgaacaaaaaaaaaacacaattgacgatctaaatatataaaaagattcctaaagaattctcgattgactctctaatgagttctaacatcagaaacccgacaattccgacacgactcattacgaaacaacccaatccgacaacacaaacacaccgcatcactctcatgagctccaaacaactcggaaccccaccgtcgagtcgactcagccgagtcaacaacactcactttccgagtcgactcgtaccgataactcggtccaacagagagttccaaattcaacacccaatcttcctcgttcccataatccttctccgacgtcgttccactactctcacaattattaaccataccaatctcttcacgcaccggttccggtttaaccggtccagagaaatcaagatgtatagtctcaacgacatcgttttgaagagacgacggagacacgacggattcgttgatcagacggtgagagtttggatcaatcccacggctgagaagcttcctcttgatatgagtgttccaatagttcttgatctcgttatctgttcttcctggtaatctcccagctattaaagaccatctataacaacaacacaaagtttcagaatctttcacaaatataatcatattcttaaaaaagtgtgagagaaagagactaacttgttaccgagcaagctatggagcttgatgatgagttcatcttcttcttcagtaaaattgcctcttttgagatctggtcttagataattcatccatctcaatctacaactcttaccacatctttgtaatcctgcacaaagttcaatcaaaaatcaaatctttacctctctgtaaatataaagaaacagaggatgtatgaataagtaccagcggcgcgagggagagatcgccagcaaccttcaccgtgtttacggatgtaatcaacaagaagctgatcttcttctttagtccaagctcctttgttcatgtgagctttctcgcagcatggtgatcttcccatctttgttgatctctatatgtatatatgtatctctctacgtgtatttggaggaaatagtgttttattttttttgcaaggaagagagttcctgtaggatggtgttttcgttttgaatgttatttataataactacctaacattattttaataccaaagttaaaaataaaaatgtatctaacaaatgaaatgatgtgttcgtttttttgtgcctaaagaatattgtaacaccaaccagaaaacacaaatttgattgtagtacactcacaggaggaacgtgggtggagtttcctaactttttttgttttttgttttctgagatgtagatcgtacggttttggttattgactttttggctctttagaatcatctcatctgctcaaaaaaaatatcataatcattttacaaattccacaattcattgcaacatgtactgtttttaaccattcttattgcatataaaaaaatatagtcacgcgtaactttcgtataaaaagatcgattataaaagagaaaataactaaataacggtttaagtaatcactaatcagttagtgaataaagtgtttttaacatcatcaaatttacttcttagtttctgtaacgattttgtaaactcgttttaatatcaataaatttgtttagcggaaaattaaaccaattttttttgcattattgaattaaacaattgtttactgcattattaacaaaaaaaagtacttaaacctaattttgggaaaatgttaaaaagaacaaaaaaaaagtagatctgggagaaagtaggtagatagattgggaagatgagtaggtagctgtcttttttcatctctctcttctccaatcactctctccacacgctacttccttcacgtacctccacgtgtcctttcttatgattttatcacattcctctctcctttgtctcttcaattataaaaacatgaatattatttagattagttggataactgaattattgggtttgggcatgtgtacttggtccttcttctactgttgtgtctcttaagtttttttttatattttattttcggatttcacattgtaacgacggtccaattaaagaatacatttttaaaatgaatttactagtaacttgtaaggtacttaaatggtatcaatcaacattgggatgatttttcttggaaattggaataacgtcgctataacaggcgattagataaattagtcgcatagaatcgtataaatgttaaatgtttttgtctcacacgccccatacgtattttagtcctttgcacttttgcagaagttatcagaattcttttcaatatttaaagaggagttgaattttacaacagtgatgtaattctatctaaagcttaatttcataagtttattatagttctgtttttctttctcaatcgtaaacattttttcttatatagaaaaccccgtacaatctaactactattcaacgtaatttaactactgttcaatcttcaatgttttgtcataagctagtaatctatgcttaattaagaaagaaacataagaagagtcatgagcggatgggccttttgttcatagcattgtattggtcatgggccattacttgcaaagcccaacatggctaaccgcaaacaagcttctaatttcatcacgctacgccaaatgccaaacattgttgtacaacacttctaccttctgagtcttcctgactattggctaacatgaactacgacgttcaaagaaaggttcttcggaggtacactgatcgatatggaattggaatcgaaggttccctatgcacaaaagaacatggcgaaaacacgattcaaaaaaacataacgtccgaagcgcaactaaaacttaatatttcgtgttaaaagccaactaaaagttacatttccgttttgtaagcagaaagtgtgactattttatgtgttcttaacaatatatcatttttttttttactttgttaatatcactttctcatttctaaacgctttgtaatattctagcgaaaatataatttattaatgatttttatttttacatgcaaattatacgactgaaatgttataggaatagagacatgtttgtatcacaaaattaacttatgtaggaaaaacaaatagtataagtctatcgttcccctctctgttcaggcgtcaagcctcccttgccacatttaggacaactcttcataccaaatccttgacaatcaaaacatctgcacatattcaaaatcccaaattaactctccttaagtactcattgaactgtaaatttttagattgatatttgagaaccatgtgacattgttagttattacttacttccacctctcaaacatatttccgttcttcttatttttacctgttccctgtagacaacaagagaattttgtctagtatatgcataaatatagagtaagaaagagtaaaatgaataggtatggtctggaaaagattgatcatacactaaaggtattagtttattacatagtatctagtaatgaaaatcaaattagtaccttgcaaccgggacattcaattgctcctttggctccacaagtctcacaacttttgaatatctgtttatataaaccttttgaagaattaacaaaactcttcattgacgatgataacatatcatattgtatatggatgtatagtgaaatcttaccgaaccaagagagaaatttccgatttttcccgcagaaactttgattgtatcgcgtcgccccgaaacaagctgactttcaaaagctagaatcttcggttctaaagataactcactgcaacaaagtggaaatttcaacatttttgtaactcaaattagaactaggaagtaagatatctatgtacatctatatgcatatctatgcatacaagtgatagtgaatatggatggtgtgagaaagctaaagaatttgcttggttgtggtttgtggatattgaaacggatcatgtggagggaatatgttgacaaggattattgacttaaaatacataagtgaaagaagccaaaagaccctacaaatatccattgaaacaaattaaattataatttttacctaactaataaacaatatcaatcacaatttaattctttattttaaaacagtaaaaagcataaacaattaagagcttaacaatcattttttaatcaaaatatctaaacagtatacattcaagtaaatattactttatgcatgcaaaatgtaaatctgaattctgaatatgttaatttttctttttacaatgtatcaaattttataaattaagaataatatattttcttataaatttatccaattttaatttaagagtaagatattagttcaaaaagataaagaaagggacaaaggataattaattcaatgaacacgatcctaaaatagaaaagtacgaaaacaccccttatcttccgaacacttttccgatcgcaaaatgatcgcctgaaaccatcgccggcttcagagtgtttgatcgtttctccagatagatagattgatccaatatggcgaaatcggaaaactcaacgacttcgactttctcttctttcgccaacaagattcaaccgtccaacgatgcagagtccgatcccgattcgtatgccctcgagaaattcaaactctacgaaaccagagcggtaagcttaaaccgattcagaaattgttgattctaaagactaatgaggaagattgcatcaaacgtttctcatttgatttcaccatcgcttaggcactctctaatgcgaaaaatgtgtgttggaatgattggaatcgttaagggaaccctagattgaattgcttgtcatataattttctttgtgcagaggttttatctagtagggagtgataggaataaaagattcttcagagtgttgaagattgatcgttcagagccatctgagcttaatattagtgaagatcctgttgtatattcgcctcaagagatcaagagtctgcttcagcgtatcgctgaaggcaatcgtgccacgggaggattggcttttgtggccaaagtctatggaattgctggttagtctttggggaagcaatgcttgtcttgtttgtatattttggatcttgtgtagtgagctaagttgagtaaaatttgtgccttgtaggttgtgctaagtttatggagtcatactatttagttttggttacaaaacggcgacagattggatgtatatgcgggcatgcgatatatgctattgatgaaagtcaaatgatcagtgttccacatgcaactattcaatctgatgttgcgaattccaaaactgaactaaggtctgtatctaggaattttgatttccctttctgaagtttgagtgaagctagctattcccacttttaaattcttattgcaccatatattatttcacaaagttctttgtatctttcctttatttgcaggtacaagaagcttctgtcaagtgtagatttgacaaaagatttcttctacagttacacttaccctataatgcaaagcttgcaaaagaatgttctatcatctggtgaggaagggatgccttatgataacatattcgtatggaattcgtatctgacgcagcctattcgatcaaggtgcaacaacactatttggacactggcattagttcatgggcactttaagcaggtattgtcttagggcttcaatcctatgtttgatgccaggagttaaaatggttctaactaactttccccatcattcagataagactatcaatatatggaagagacttcagtgttactttagtctccagacgttctcgacattttgcaggcacacggtaagaattctttcttatcaggcctctaatgtatgacaaattcatggtgaccgtttcgattttctgatgccctttcttagttataccttttatctttaggaactttggttagggtgaatataattagtgatgtgaccttttctagaccagtttggatgattgtctccgttttttactgtaaaatatatatagcccttttcattctgtaaaacttgtatttcagttacttgaaaaggggagtgaatgatcgtggaagggttgcaaatgatgttgaaacagaacaacttgttcttgatgatgaagctggatcatgcaaaggaaaaatgagctcagtggtgcagatgcgagggtcaattccactcttttggtcacaagaggcctccagatttagtcctaagcctgatatcttctgtgagaaactaacctagcatgcgtctgttatctatattacaccatttaatgtgtatgtattttttgatctacttgcttcttataaatgactcctgattctttaattccgttgttttggcctcagtacagaggtatgaccctacatatgagtcaaccaaaatgcattttgaagacctggtgaatcgatatgggaatccgatcattgtgctcaacttaattaaggttactctttctatttattaatgtccttttttatctagagatggttatgccttttgtacttatagacaaatatccatggaaatattcagacagttgagaaaaggccaagggaaatggtgctaagacgtgagtttgcgaatgctgtgggttatctaaattcaatttttcgtgaagaaaatcatctcaaattcatccactgggatttccataaatttgcgaagaggtaaaatgttgtggagttgttttcccacattttagcctgaactcacattgctttatattgtccatgttatagcaagtcggcgaatgtattggctgttttgggtgctgtagcaagcgaagcccttgatttgactggattatatttcagcggcaagcctaaaattgttaagaagaaggctagccaacttagtcatgctaacactgcaaggtaattgtgttgatgatatggtctgctacttatattcaaccagaaatttggttttgttttgtaacctgctatatattattttacacactggagctatttgttacctttctcgctgtaatagagataagtactgcagggaaccttctctgcgtgatctaagagcttactctgcggaactttcaaggggtgagagtgcaaatgatatacttagtgctcttgctaatcgagagaaagagatgaagctaacccaacaaaaaaaagacgagggaactaattcttcagctcctcgttaccaaagtggtgttctgcgtactaactgtatcgattgcttggatcgaacaaatgtagcacagtatgcatatggtttggctgctttaggccggcagctgcatgcaatgggtttgagcgatacacctaagatcgaccctgacagtagcatagctgctgcacttatggatatgtaccagagcatgggagatgcccttgcacaacaatatggcggctcagctgctcataacactgtaataatactatttatcaccttcgaccacctcttaacaaaacaatatttgcaatgcttattcagtaacgttgttgaatggattataggttttcccagaaaggcaggggaaatggaaggccacgacacagtctagagagtttctcaagtctatcaaacgatactacagcaatacctacactgatggcgaaaagcaagacgccataaacttgtaataaacctccctttcttgcccaagtcacttcagtttcttgctaagtctttactatttgtagtttgccagtgatgtagcaatagtacgaaggcttttagaataagtttctgagttctaggttcatttctgataagaggcaacagagccctggcattagcttaggcattactaataataataactgccaagatattgacttgtctgatggatagttggctaagaactttttcttttttttagtttctattgaatctcaagtcctagtaactaatgacctttatcccgagcagattcttgggctactttcaacctcaggaagggaaacctgcgctctgggagctggattctgattactatctccatgtttcagggattggagatgatattttcccagatatcgggtaagacttatatttaatgaacctagtgcttgtcagattgtggttcttcattatatgcaaataatatttttagccgtgccggatactggacgtcaagtttaatggacatatgaaccagttcgggcaataccaaagatgttaaatttaatttcccaagataatgagatatctaactttgggtgtatgcagggtccagtccattgctaaacctatgagtggtattggagtcaatcttgcaccagtgccagctttcagagacgacttctcgcggaagaagctgacatcgtttgacaaactgatagagcagacatgcagttcaataaagaacgtgaggctttgtagtgagacagaccaaaggccaggtggcaacactggaagcactggtgtggctcctgatgcagcgtaatgattctcacttgaaattttcaatcatcttattaggcctttgccttgagttttgggaatgacattttatccctttaagaaagtagaaagatagtttctagtttagaaaagaacatagctttaggctcaaaccaaaccatgacttttcgaatcttagcttatttttcttgactttctatctgcagtgagattcaactcaagagccccaattggctgtttggttcaagaaagcccgaagagagtagctctgccacaaaatctggtgcagacgatagtgagaaaggagtaacctcgactgagagagtcaacgatttctgcaacttggactggctttctaagtccgaccgtcatcaaggagatatcttccaaaggtactgatttcttttttcttctctctgacatgtaaacatccttcagaatgcaatattgaaattctggttattattagcaaactcattactgaatgagaccctcaactattgaccaagtctgttggcaaaacattcagattttgtcgccagtgcatcaaatcacttattcagttgtttcaatttataggtatctatcgattacatcaaccaatgaagccaatggttggtatggtggcactctcctcggtgaccaagatgaaaacagcgaaatttacagacattacgcccaattctgtcaggttcagattcttttatcttgctggaatgatatattgatagattgcagaaactaagatcaatattccgtttcttttatgatctgatttaaacagtgtccagcgatggaaccatttgagaacgatcatgagtttgaacagaactttgcggaagttctccgcatgaacacaatcgatgtaatggacattgaagaagaagaaacggagatggaaagcgatttcaatgaatacactcagatcggtagcgatctcgggatcattccaatgcaatgcaaacactttgctagtgatccttgttggctagccagatggcttgtcggagatgataaggtcccgaaggtcatttaatcacgaaaccaatgattttgctccccaagaacgtcacggagacacttcttttttggttgcatgtttgtgaatgtgttcgagtgtgcattttgtgtagatatatgtaagaagggacaaacccaaagcaatattttgtaccccaaaaaatatttgttggtttatgattaagctcacgtataatacagaatatacgaatgattcaacctcagaggcaaaaactagtttccttcgctcccctctacaaagttccccacttttgttctttgttacaaactacaacaaatagaatctttttttttttttggtttttgtcttttacacttacagtagcatatctgacttggctggtaatctcttgaagaaattggcaggtactgaaggcattctgctcctgaaccgtggatgacgcagcatgaacagaccgattatgattgcaatcacctggaacggtgtgacatagataaacacggcccagatcaatgcgaagacgatgaataaagcagttgctctcgggtctctccagctaagaagagcttgaattctctccccttgagtcgccagatcgcctacgactgtctgaactctaccaccgacgctcctaagcctatcatacctcattctgacaatgtctgccggtctgctggtcgggaaagtgtcgaactcttcgtctagctcgtctgggtgtgcattgtctgcttgggacactcgagcgtccatgtgaggtgggtgtcttggtctgtaccggtaattccacatgcctatcacaaagaggtagaggaagactgtgggtaaaatcagttctgggtagcagacaagaatcaggaacagaacgtgaaccagacacgttgtgatcgggtttctccatgtgcagatatcgttgaaccacttgcagaccagagtgaccgaggagagaagcgacatgattctgctgaaattagctttgcttctcctgagactgaacatatggtagtctacatcaagcatgtactccacaacctctcgtctcagaggtggctcggaccttgatagtcttgttgcaactatttgcatcgcctgatgcctaagcaagtcaatatgcctgactggtattggttgaatataatgcattttgggcaacaacggtcttccatactgtgccatcatgttaacaaagccggtgcaggtgtacctcagagctagctgaagttcaccattcttctttaaaccaccaggtgtaagaaccagcaacgggtagaaatgagtgtaaacccggtctgtctccagcgtagatagcctgactctaactttcccaatcctctggtccttaaagtcaccaccatcgttgacatgactattgtcaaagactccaattgttatgaccgtgcaaggatcatgaacttcccaagtatattgctcgttccacttaggcgcaagtgcgtctaaaagagtcctggttctgacccatttgttaccatatttcgccacacaatagggatcagtcattctcccatctttacctttcataggcatcaagttcctagcactgagaatcccaagctcaagaatcccaatactcggcttcctcaaatgctttgaagaaggttgaagatcgctgctgaaatgagtggactcgtcaaggacatggtaccctgcttctatacaaacccgaagcagaatcttactagagaacttctcttttcttttctcattctcttcctccatagacattgaatgtctttgtagattaaaccaccgtggatcaggcattttcccaacctcttgcctgaccggaacatccctcacaggtataaacaccctccccaatatttcatctttccctggaccaatcctatcatcaacagaaacaatcaccatatcctcaaacggctcagacacaacaaacataagctcctcatgccactgcggattcatcgtccgcatctgaggcgtcctcgtcgctctcatctgattccccgcttgaatcttcacaatcgcatcaggtactctacctttatcagacggaacaagatcctgagcttccattacgtgaattctcaagtaatacagcttcggcgagaagtaaactttggaccgcgtatttgaaagattcgaatggctcactcggtgcgcatccgagtgccaagcatctggaaacgactcatcagcttgagttcccatccaaacagcaagcataatctctcctctgttcgtcttcatacctttcttatcctctaacctgtaccactgtggagccaaaggactatctggaggaactctaagaggaacttcagtgagatcaatatgaactcttccaacgaaatcgtctttagtcaaaagatctttatctttcacagtgacttcaagaagattcgattgtaatctctctttagagaaggcaaagatctgtttccagatcggattcgaattcttctccaaatgcttcgttaaacctttgtagttccctagcttcacttcaacgtaaggatctaagctaccggaaacatccatgacaggaagatctcgagctttcacgacgctaacgtagaggtaatgcatctgctcaacgagatcgtatgtgctcgacgttttatctccactgcttctgtaatagtaagattgtctcatacgagctgctaaaggaggactagtttcaattagctgaaactccggattctgctgtctcggaggttgcatctgcattactgctccagtcggtggtcctggagctctcatgaaatctgacctaaactccggttgattcggaggtggaggataagctt

SEQ ID NO: 50 - DNA, 92948 bp, Arabidopsis thaliana
gaattcggccaaagacaagcgaccagaccgcgagaaacagcacgaacataaggagtttagcggttaggcgctctgcggttcaggttgctttgtgagcaatttcactgtctctgcttttgttctttagtactattggcctcaaatgtgtctttgtgtttgtgtttctaggctgtaatgagtagaatgttacatcatagaaacgcaaaatacaaataaacaatcagaacctatgtaaccttatgttagaatcaccattgcaccattaaatctttaaaagcttataactaatttactacccggtcattgactcattgtctatagtagcttctttatagatgtttgagtggtgtgtttattacacgtttcaaaatattaaaaaatacttataactgtataaatatactatatgtatatataaaaggtttattagctcttggtaagtggtaaattataaagctggtttgaagtttgaaaagttatattagaaacttgaaaggacaattattttgaaaataactcaagactgagattttttgtgcaaaacccaaaaataaaaaccctctgtttttccatacaacattaaatattaattctgattttcaactgtagtttgattcgaggcgacctcaatatccttttattttctgcttacatgagtttccacatgataatagagtctattattaattactagatgaacacccatgcgtagcatgggttttttgtttttaaaattgtcaaaaaataggattatggttttttgttgattttgatgttcattttgataaattcatctatttaatataattattattgtttatgattagattcatttataactcgaaatattaattctactacaatatgtatatttatatatttattattctaatatttcactatcatgatcacatactacaacaatatatgatatactgatacaatgtatgtagttatattatttatgtgttttgaaacttgcataacttaattgtaacaaacgattttttattccatatattctctcgatctagtacacaatcacatcatgatatgctagtaatttaagtcaacagtgtaattctcatccctaccatatagtcatatagagtctcatgttgttgtttttttggtatgtctaatgtcttggatgactattacgtgaaatgtacataaagaaggtcatatgataaatcaaattcacaaaacgtaataataaaaaaatatccaactaaaattattaaattaatatgaggttaggtagcgaacatctaaagtgcaacacaagtaaaattttagtcattatgggttaatgactatttataaaaacaattaataaaataagtagaaaataataaaagtagtgcttggtacattattatgattttttatttattgattatttttaaaaaattcatttaaaagtgagattaatggagaatttaacacaacaaaaaatttttgattttttttcaattatttttgctagatttttaatttaactaatgtaaaatgacacacattatttttttgtgtgatgatgtgtcactcatatgaagagtgttggccaactttcatatatataattattaatccttttgtccattcgttaacctccatactgttgtccactatctatgaactcacccacgaaaagtgacgttattgacgttgctcgtgcttatcctaattcatggatcgcgacaaataattatgtgatgtaacgtttcaaatgcatatatatgtcttaccgtgtcaatataatgagtaaatatctaaataatacaagaaatacttcgaataatgttcttaagtaaatcaacaattttttctgctacagttccgcttcagtatattctaaagtattacaatatctcttacatacataacacacaaaaaaactcccacaagagttacgtatttattaagttataaacagaatgttaccgagaactccaacaaccacaagatttgccacggctacgatcctcaccgtccatttccctggaaccgccacgtgtgaagacgaggacgtttgatccgtttggtgaggaggttttctaaagtagtaagggaagtacggcaaaatagcattcggcggtggagggccatagaagctgctgccactactgtctccgccaccatacggtggagaagggtagttaggtatattcccaaccggaggagggtaatttggtaaattcccagctggagtagggtagttaacgcctggaggaggatatggtggtggttgagtcatggaaggtgtggaggagccaccaccaataggcggcgttggataacacgggtagggacatggtgtgtcggatatgactaagtaggggaagtaaacaagagaaaagacgaagattaaggtcaagaagagaaggccatgatcgtttgtgttcatgttttcttttgttttgttttacaagaacttggtgaaagaatggttctttttttttaatggtaaacaaagaactttggataagagaaagtaaattaagataagttttttttggcaaaagcttagttggaaggtgtggactctagctagaagacacttgtcttgtgaattattggaacgaatggtttgctaactagtattcttccttaatcactttaattattggtgttaatttatcgctagtttattcgattttagtccgtcttagtcatagtttattaatggatttattttttgttagttgtggattaacatttaactagtgtagacttatttactcagaatgttctaactatgtaaaatgcctgattaagtttaaattactgatcttacactattttcttggatcttggtttggttataacctttaaaaataaatttaaatgggcttttcggcgctctgtgtacactgtacagacgttttggttaaataatcgtatattattgacccataattgtatcgaagaacatgcaggctttgctattaaaaagagagacgtaaactgcaatcattttataaaataaaataaaagccattttgttaaacgacagattttagatgaatattctacacatcagccactaaatgacctaattatgtcctctaaagaaacaaatgcgtcatagatgcttaaagtggttgatagatgtataatattttaatcctcacaaagaaagatggatttccacaagccttattgatgcttcaagtaaaaacaagtcattaataaaaagattgaatatatgttttttcctatctcaaagtataagaaaatggtttctaccaaaaacaaaaaatagaagaaaatggtacttgtgattataattttgaggacaatttgtgagcatatctgtaaagggctagacgttgagtgaaattgaaggttttaaaggtacatcataactatttcatttgttccgaggtatattagtatagatgcatggcactgataaacaatcttttgtaattgtaaatttattaaagtctaaagtcatttttttctttcacaaacctaaaagtcataaaatgacatttatttgaagaatattaatttaaaatgatttttgggaaagggaaagagtaacaaatagaagaaaattgaacccaactcgcgaatttaagatgagtttaagacatttagatgcatggcatcgataagcaatattaaattaagatgcatggatttttctcatgtaaaagacggtgcggttgttatgggtactacaactcgcgactttcattttaccaaaataagtcaaaaactgataatgacattgccaagtaaaattaaaaccattacaaaaaagaacagaatatacatatatatgttactaagtgagcttgcacaaaactaagtataaaggagtttgtggtgtgttgcctttttgaggcaataaaagcataatcacagctgtgtagtgcacaattatttcataccttataagttataaagtccacaacaattgcagcctctaaggaaaaagagcgaattactctttcgttgcctcattggttttctttttttagctagttactaatttgggcaaattaaataataataataataataataataatttgggcaaatttaatctttctttcattttggttttaagaataaaataaatgtataggagatcgttattgagttttaagtcgaatacgaagatctcatatcgcatagtagaatatttaaaatacacagaaaagtaaatgtaatagtatatttttctgaaacaaattatatgccaaagcttagctaagaaaaaaacaaatgtttaaaatatagattatccaaatacattattttgtcttaaaataaccaaaaatttaaattgtttttagttttataaagtctaaatttgaactacacttggtttagtaaatgatttatgtaattagtaagcgttgaaaaaagaaataaaaacgtaggtgtgagatgggaggtttggtagaaaataagcgttaggcgaaacagattcacatgtcatgtctgaggtcggctttgcaggacccatcttttgttgaaacccaagttgatctccatttctttcctctctctcttatagcatctacacgtgtctttttttacttttgatatcgtcaggtgtccttttccacctcaaaattgttattacaaatttaagttttagttagtatacatttcaattttcaaaataatttagagtttaggtcgtttttttgtttaatatgaagaagttccatcatcgatttaattcatagtttctacggataagcggtccttaggttatagtcatgaagggttattaatttcttggcagctcaatacatatagtctttatatattttcaaaataaaattcagttttgatatataaaagagatatactcttatacattagaaccatattaaaatatattttatattagttattttaaattagtttggatcgaattagattaatttatccagattaaacatctcttcactacttattatagtagtttctatatcaattcatcatctctctgtagtttattaacttcatctacaatattttttgtcagctcatgccatttaaaattaatttaacttagttaaaacatactgacttttcataatctacttatgcatataaataacaatttattaaaaatataaagaggaaagctaaataagacaaaatattttcgaaaactcgcctttctaactttacaatttcctttttgaaaaaaactatctttacttttattaagaacaatttgctttttcataaaattattccgcacaaagaaaactttccaattttgagaatcaattcatcaatggcaagttgaacacagaacaattttttttgttggtaaatgtgaacagagaacatatcacatcaagagaatacatttctagaatttacatatttctctgaacagaaattttagtattcgtaccttattaatttggttaaaaaccattagaaaatttggatataggaaaatatattgaaacatatataatcctagctagaaaaattattaaccaaccatcaataacgttcttcaacaactaattaaaaagtatctaaaacataccaacagatcttcaaatatattttttctccgatcatgttaatttcaaagaatcaggaacgccataattccaaacgcgattagaccggagagcttcaccaccataaaactttttccggcggccgctccgaattgctcatcaacggggtagagatttcccggcggacccgtgatgtacaagaaattagccggcggaggcggtgggcagtaggaactgactttcttaggcggaggcggtggaagagccgggggtggaggacatgcaggtggtggcggagacggtggtggaggagatggcggaggagggttttggatgcagcttggagagcactttatgggatcgacctcatcgagctttcttgcttctaaagaagcatctgatgatgatgaaccgttgatgagtgttggacacgtcagcaaggcgatcatcatcacggtgaatatgacgtcggatccccggcggtgagaatttcccggcatgttgtgaacttgtgatcggcgttttttgattttgatcaaagagaaaatcaaaaacagagttttgtatatatggtgagcttaaagagttgaaaattaagaggagacgtgaaaatgaattgagaggtgatgatgaatgcgttctcgttacgtaagtcaagtgcatgggagtcatagacttattaaatagtgtattgtgtatataacaatttttctgtaagcttctagtcatttttttaaacgaaattatacttaaataaaagtatacactagtctgaacgtaaatgataaattaggaagaaggttagttaaggagcactgtactcgtcgtcggtccactaattggtcgtattttttcatgttaggtggatcccctcatgaactattttggtttttatcgccattaattttttatttttttttgtgtagaatcattaattagcgattaaaatcccaccgttgtccaccacaacaaaaggcttaaactatacattaatttatacatgttttagaggtatattatagtggtccactaatataactgtatgtaattttcatactatatttgttgtactaaatggtttatcttgaaaaaatgtgtataattaatgttttctcagccaaatatgaataatagttaaaaatcttaaagaagtataatcgtatacgagaggctttaatttgtgtatagcatacagaacaatgactctgtttgcagaagacctttatggatattttcttgcaccaaaatatataaatgctagtatttttttttgtttgctaaaatatataagtgtatatatgcgagtgcgtacgtgtagttgcttaatgcgtaagtgagtgcttttttaaaggaacattgctttagttgttcgattacataaatgagaaggtcgcaccgtaggaggaaactctcttatggtatcgtatgaaagagaaaaaaaatggaaaattgatttcgtctgattgaagagtaattcggggcagaaagtttaacagcgtctactatttcttataaacatattacccaaaaagtttggttttggttggcataggacattggatatacacataatgtaaaacagatttaagtgcctattaatcataatatagctctattggtcggtctgttcgagtgatcgtaatattattatgtggctaaaacaacaaacgacttgcctcttgacttgatattcctcatgcttttcctagttgtttaatattttatggaagcaagtgttctcacagtcttactttgcatcgttgcatatcaggtacgagtataaaacgagaggatctcattgtgaaaccaaaggacatggtgaaccaaaaatgcaaacaattttgctattaggacttggattagcactaggggggagcttaatggacctaatcaacatggccacaactttagcatcagtaactgtaatgacttccatgctcgaaggtggtgaaggtaaaatatgcagcttccatgtcaaagtcgagatcgttctgctacatttttgatgattccaacatttttatgtatataaaacttgcaattttcattgcttagattcatgccattcaactaccacacatacaagctccttgtgaaggtaaaatatcaagaatatcatggaaaccgtaagtggagaggaaatttggctactgtcgcttagcctacctttctcttccaaggatgaagtgaagctccattcttcaaattaagtaatgatacaaaaaggccagttaatctgtccacttgatattatatcgtttgtgaaactaaggagaagaaacgcgacttggtcactaaaggaaaagggccattgggacattatgtaaaacatgcccaatgtgttaatgggttttgtgtgttaagtatcaagtaggttaaggtggagaaatatcatccgagaaaactgacatcaaccaacaaattttcttaaagacgacatcaactaatggccctgtaacaatcctttgagtcatctcattcctctctaaatcataaatgaaaaagcgtgaaggttgattcagcaagagacttgcctttgaaaaccaaacctcaccactgcgactagtgccacccatccataaccgatctccatgctggaagttcatctgaaaatcaggcaagacaaaagcctttttgtccgaccattgactcctgccgccctcttcaagaacccaaacatccacaatacgatctctaaagaaattcaaagattgaaagatagatacatttccgttgtagttcatgagatttctgcaagagaagtccttccaacaagcattcatgggtaattaaatcaaactaaactcttcagaactcaagttaaaactcatacacacgcatatatttgcatcattccaagccctacaatacaaagcaccattaatggtgatcaccccttgcgagcaagaacggaaagggcgatgaggaatgtggcactgtgtctttttccattaagctccagcgctccaagtatcaacacctgattctcggatctcactctactctttcttcttcattgctcacctccctaaccatgctaagcactttgtattcatcatgaacaggatcgtgtccaacatagaacacattgttatcattattgcctttcataacgggtaattccacaacctgtcttgtgttgaggttacaaattcgtactcttctccaatttctgtacagagctcacgaagcggccaccctctattgtcggaatggtcagatcttggccgattacagagaccgatgtgtccgagtgatcatgattcgaagatgtgtgcaacgcatactcgctatgtttttcgctctccacaaaataggtgagataacgacttcgtggtgagggtttaaggaatcagttggtcatatctgataagaatctcgatcaacagttcctcccgtaaggcggcgctcatgatcagctcctccttctctttctttttcctcacgtatttttgtgtttacaaacctaaatcatatctttctcttttttttaagaacaatatcacctaggggtgaacttattttacccaatcagaagccgccacctaatcaaaaaactaaatacatttaattataaaatctaaatcttaaatttcttttataaccaaaatcaatatataattgcttgtaattacaaaatctacaccataatcctcttttgtaaatcaaaaccaaaaattaattttgtttcattataaaatctaaatttaaccattatttttaaattcaaattgatatttaatctcgtttaaatataaaatctataactgtttataaaataaatcattttggtggaagatatatttttcaattaaataaatttgcttgtttttggtgatatatgctgattgattaaagggtgaataataggatttactcatataagtgaaccaaagtaactaaaaaaaatggtattgtatagaataattcggcaacgggaaaaaaaatccatggttatccccttttattctcattttcttaatatttaccaagaatgcagcatcgcttctcctattatatttttttattattcatcaattattctcctaaaattgagttcatatacacatacaattttcagcttgataatatttagaaaaaatagattcattcatcagctattctcctaaacttggctttaagaatctagccaagcatatttatccacaacaaatggttttgcacttttttttattttttttttgtgtgtatatgtgacagcataaattttatatcttaaatattgagatcatcataggaagagagttcgagtgaagaggaggaatagagaggtataggaaccatgaaggagaggaagatagaaattaggattatatgttaataaatgcttctttttaaaagaaattttgctcaagtatttgagcagtttttgtgaaatatttgtgaagttttggtggtataagtgattctacatttccactttgctattatatggttagcatttaaaaatggttatgatatagttataaatctctcaatatcatctttaatagcatttgcaaaatctatactatcataatgtgctattaatgcacactttttgtagtgaatgttttgcatgcttgggagcatggttgtggttttcatgaatagtcttattgatatactttctatccattttctcttatctattcccaagttatcttcagcatctactatctctttatacagtactgttgatgttatggattattcgcttttagtcggagtggacgaggaacacaaagtgcttgttataggaatcatcgactttctgataaactacacgttgggcaaaaaattgagttttcacccaaggcttcatgtataatccctcctatgcagtacaagaaagaaggttttcagatatctctagtgaaaacaaagttaggctggatatgaatttgctagagaaagacttgatttttgttgaaagaaaagtcaatcagcttccggaagccttctaatctctttgctaggtttggaagtttacaatcgtatgacaatattctagagtgctcaatcggtttatggccgacctctagaatacttatactaatctccaggaccataatctctaggatctcccttgatcttcaagcttatccctttccatatgtgatcggaaggatattcaccatatcttctcaaccgaccttcgtctttgatgaccacgccaagtcagcaaggctacttggcacgtcacatcaagcgctacatctgtgccatgtcagctcacacatccatgtcaggaactcagccatctaatgtgatataatgcagctttttgattcccaacagctccttgatttcgattagctcgttgttgtcagaatttggattttcatgattaaaatacaaccctaggggtgaacccaaaaattattctaggaggattatgttaaatgttgatggaatgataattgaattcatattactctcatgagattttacgtttgatgaatttaaactaaacgatagcgagtttgaggcaatttactgtatcggatgaatcaaaccactttgaatgttgtaacagagagatagtttcatgattgtgtcaaatgaatcagagacactcttcctctcctttttctgtttcgaccacttttgagttgtggctttggtactacactgctctctctattccttgttcgttatcgagagattatataagagacaacattagattctcaataatctcagtttgattgtgtcagaagcaaatcattaacactcttgttcatactaagaagcaaaatgattttgattaaccatcaaacaaggccaatgagattcctaagtttttgtgaggctcaaactgttctgatccccaaatgcttcataccgaagtcgttgacttggtgtcttcagctgacttttctgatttcttgtttcccaagctaactaccccattataaatactggatttatgggtggttgaagatgataattgaaccattttgtcaacaacaactcatataaattagaagactaacatgactcatttcgctttcggtcttgaagaaactttcaaacaaccacaaaaatgataattttcatttcatttcatttcaatcatttaatggattcgtcaattcggaatctgtcattttcttcacttgatggaacattatatgtgagatacagaaatttatgagctaatgttgtctcaaagattttgataccaccagcgaagaaaattgactcttcaggtaatcacgccggtttatgaggacatgtggccctctaattgcctacggaagcaagtgaaatatttgacatttaacgaataatatttctattttatttgtaactgttgcgtgtcttctaaggtactttgatcagaagaagagtaaccaattcacgtgaaccgactccatgaagtaagtagcttgtgattgagattgaacaataattcaaatttatgaaacaaaaactaaggttcaattcaatacttattcattcatctccaatattattacaaatgtaacaaataaatacacagcgagcaaaacagagttcgattttcgaacaccattttcgctcaccatcttcaatttcgattccacaaatggaattccaaaaaaaatcaaatcaattaaacaagaatattaacataatttaataaactcaataaaaatgagagcttgatgaaccttttttgtcagaagactagttattattggcatgctttacgaagaagctctaacaaagatatggctttccttttgcctctctctgttccattcttcgataaatccattaacgggacaaccgcaccgagtctaccgatagtgatcagtttctcagtgtctcttttacacagcgaaagcaatatcgctgctgcgttctctcggtttctagtttgatccgtttggagaatacctatcaacgcgggtagagtattcgcttttactatcgcggatttcgcgtcttgattatttgcaagaactgagagaattgtcaaagcttcatcaaccatccggtggcgggtggaatcactgagcatcttaaccaatgcagttactataccggctctgactgctctacctttgtttccatgataaatgcagagattgaacaatgccgttgctgcatctttcttccctctcggggtcccgttctcgagcagatcaactaaggcaggtatcgcacctgacccgcctattatgatcttgttctcatcggctaacgacaggctaaaaagtgtcgctgctgcgttttctcttgcttccatggttccggctctaaggacttgaacaattgaggtgactgcaccagcaaacattatcagctctttgttgttttcatatatagagaggttgagaacacatgtgattgcgttttcctgcgttgcaacatcctctgaggttaaaagattcaccaaaacagggattgctcctgcttctgcaatcagaatgcgattatccgtacttctctttgacagagagcggatttcagaaaccgcattccttcgatcctctgttgaccggcttgagagtctctgaaccaaggcccggatcaccgacatatctccactgttttttgtcctgccgttaatgtaacctgcaggttgctcaatgttgtgttcagcgcaccaccgagagatgagacttctgagaacatagtttggtgtaagcgtaaagttttcgagtttctgctgagtcttaggacatgttagattcccacagtcgatccatctctgtatgtatgccctctcgtaagtctgccattgtagagagacaatatcaataaccaagcaacatacagtcaaattcattaaaagtgctataaatctcaaaaccaaacctgtcctgtggcaacaatgacaggatccttcatcagttcaagcgacaccggacaaagaaaatcaaccggaatcgtgagtttatcagatttcttcgattcatcagtgttcttgttaaccattttgtctaatctatcagtatcagcatctttggacaaataataagccaaagaaatggaagagcttctccttagaggcggcgaactttgtttctcctcctcctcaccaaaatgaagtgtttctgaaacactctcaagcttttcctcagctttgatctttataacattactaaaaccatctctctccattggctcagataaagcactcgagaacttgttcgaattcaacgatccatatctctgcattgctcttcgcaactgtgatctcgctagctccacttgttctccaacttcgtcagagatatcataaagatcatatggaagattgctcaatgctttctcaagcttccatgtaacacattggaactgaaatgagattctcttcgcagcaccatcctttaatcaacaaaattcaaaatctttcagctaaatcggagataaccgtattgtaaccaatggtctaattacatttaaccggtaattctaatgaatctgggaattttcatgagattgaagaacaacaaatcgtgatttgattttttttaaggagttagttagatttttttgcttacagaggaatcgcgagcttggaatcgagctgtggagagaagacgcttcgcggcttgaagtccgaccacgagatcagaccaccaatcattctccgacgacgacgaagcggcggaatcgataggagttgagtctctaatctcctctaacaaatgcgttaagagacaaactcgtcgagtgagatctgcgcaatccttcttgaacattccggtgttgagtggaatctcgacgatatcagcgattaggtcgagtagagaggccggtgagacgattcctccggccattacgccgtcgccgatcaacctccgtcgatcggaaaaattgaaagaataattgaaaaggaaagaataaatgagctttgggattggttctttactcagaagcgactaacgttgcttttatttattcacgcgaccattttgtcaagcgagaggtccttgttacggcaccgttttaaggacctacgtcttggtccactttttttgttgttgtcaacttttttttttagtgtatatttcaaatcataattaaggaatagtctcgaaaagaagaaaagtcattaagaaattaaatagtcttagtctatatttttataagacaaaataatcaaagtttaaattctaaatctaaatcctaaaaactatgttataaatccaacatctaaactttaatacctagaaaaaatataaaacaatgtcaaaaacgaaaaaaatctgacaaataaaattaaaattagaaaaccgacattattgtataatggtttgtgctagtaattttgttatgttgctattcggattcaaactcttgtatgttattgacaaataaaaaaatccgacaatcatgtatttttctaagttttgaaagaattaacttattttaaatttctatattggattattaataaaataaaggactgagtagataatgtcaaaaaaaaaaaatgagtagattaataaataaatgagagggaaaaaaaaggcgagattggcggtggtagatgtaggagaagaagagaacaaaacaaggaggatacagttggctatggaatattatggttcataatgcaaccaaacacatataattgaaatgaaccacacacacgcttttaattatacacataagagtgatcgagcaccattacattttctttctttgcttcgttgtaaagccgactttatattatcatctctttttatgtaaaagaaagttgtaatgggttttaataatatatataaacagaatgggtcaatctaataaatattcggaccacaatgttaaaaattagttatctgtttttttccggccggaaacaattatggtgatttaaaagattatcatcatcaatttttattttttttgacgttatcatcaccaattattgattggtatatattcttctacggtttctgtaaatttatcatgaaattccttactatgcttttttttggttaaagaattatttactgtttttgataggaggaaaaatgatcgtccacgttcagtatacggcatcatcagcaaaaccattcaaaaatgtttttactggaacggccaaatatggtataacgacttatagcattgtgtacgtgtgttatacaataacaagttctctaaatgtttcgaagtttacatggtataagagcctctatgaaatggaaacctaattcgttatcatggagctcgtccaatggtgagaaagaactcagcaccaagttggtggaattatcaacatcataagagagttcttctagctctttggtgcaagtgacatgtgagaattacaaaaaatgggttaagaattaaaaatgcactcaaattattggtttgttagaatgaaagtggatcacaaatagaatgtggtcgtggagctagaaactggagggtagaggctcatatcagaactcacctcaaagtccatatccgtgtcaaggcaggcgtggacgaggacatcaattaaggccgtagtactgtcccgtattaaacacaataataaaatcgtaccttgaaagctataagaaaatagaagagagtgaacaatcgacaaatgacaacgagaaacatttaatgaaatgaaaatatctatgctccagacacagagataacccacgggcagccaatgaagcactccacttgcgaatttgtaatagaccctacttgacaatgagtagaagagccatatcatgtatatttaatatttaagttggtgtgttgtagaatacgtagaattgttttgtgccataaaaattaagaaagtgtttattttgttttcttagctcgtgtataatcaaatttaagtagttgaattcgtggaattgtagtaagtaactgtgtgcttcgactaagtgtatggtgtgatggtgtcgtggtgacatttcttcggttcttccaaaggaagttaaaccttgcactgcccgcttgatcccgtttgagagaaatgagtccaataattaaagatatcataaatttcttaagttaaaaacagtgtgttgaccgatgaaatattatacaaaaatgtcttttctacctaattgagagtcacacatctttgatccaatttttctctattacatctttgatacaatttattacatctttgatccaaattgcactctattacatctttgatccaatttttctctctatttttctaccgattacacaataacatattaatttgtccataaagattgttatgaatggttcagtgttacaaaatctccattattccaccttgcatattgctgcggaatgcccaagaaacaagactaaagaggcgaataaatcacagaagcgaaaacgctctaaaattcctaatctaatagacgcattcgcctctttgatttattcgccacaaacaagttttgttagtataacaaataaaaattttcccttcgcagaaacaaagtcgagattcgacaaaacgttcaccattcgaacaccaacaacgacgaaaagaagctaattaataaaccaaacagaagagaaagccttggcctgcaaataaccgtcatgacttagtgctggctgcaactaacgccatgaatggtctatcaattaagaactcttttgatgtaattcactacaaaatctaaatttttgacccgctacaagatttaattgggagatacgttgaatctcaaaaaaaatcgtaagaaactacaatcttccttcctataggcatgaagcttgttgtatgcttcgccaacgttacgtgtatgacttataatgccacgtgacactctcttagttggcggtttttgtctaaatcttttatgtgacgtggtgcgttctgatattcttattggtcaattatttttgctgatgtggtatgagaaaagtcaaaatcgtttcaaggagatttgttatcttagctaaaacaaaaagaagttattacaggaatagaaagagagagagacgaaaatttacgctgatgacgtggtaagggaacgacggagtggggaaccacaagccgttcttgatattcaacgtggtttgctcatggcggcgcgtggtagactcgtggtggcgcgtgggaacagaagcttttcatctataatcagaaaatactcattgaaaagtccatttccctctattttgttctttcttatttcttgcaatttcatctctctcatttttttttctgataaaggtgcaatctcatctcttgcaatatggtattaggagaaacgaataagaaagtgatcaagaatgtgattaagctcttaacgatggtgattttgatgggcactgtggtgatttggatcatgatgccaacgtctacttacaagaagatttggttgaaatccatgcgtgccaagctcggcaaatcgatttattttgggaaaccaggtaaattcacatcaattttctttataagtcgtcatagatctaatctagttttctattagtttatacaaacatcatttatacataagtgctggttttctaaatttattaggagtaaaccttttggtttacatgttcccaatgattctactggcttctcttggatctatttaccttcacttgaagaaacaaacgagagtaaaccaatttaataggtaattcaacacttaaactaaccaactgattattctctagttaattaaccgctttttaatatcgatattatatgttttttctgttaactaaaagtagaatggataggaagaagatagacaagtttggtgcattgaaaagaccaatgttagtgaaggccggattagggatagtgacagtgaccgaggttatgttcttgatgatgttcatggctcttcttctttggagcttagccaattacttttaccatacctttgtcaccatcactcctcaatcacttccaaccgacggagataacttgtaagtttttatagatagattttcttgcgattaacgttaattttgtatgtatcgcgaaatataacatatagtttataataatcatgtagattcaattaacactttggcttattattaattaattgaatacatatttgcagggatgaaactatatttgtgggtctaaaaattgagttagtcaatattcattaggaaactcaaaaaaaatattaattaataaaattgattgacctgtttattctctgaatcattcaaatcatatatactgtaacaatttggccttttataaacaaattgtgagataagttttttgtatatttctaattacaaaatgatatataatttttttttaaatgattgacttttgtgtttgtttttttataaatgacaaaacccaaaagatggcaagcaaggctggattcaatagcagtaaggttaggtctaacagggaatatatgcttggggttcttattttatccggtggcacgtggctcgtcgttgctggctgcagttgggcttacgtcggagtcaagcaccaagtaccatatatggctcggtaacttggtcatgaccttattcacaagccacggtctttgttattgtatctattggatatccacaaatcaagtctctcaggttagtctatgttgggctatctatataagtatggcttttggttaaattcggctttggctacataaaaaaaaataacagacgtataaaattatttataactcgaagtgtaatatatacacgtagttcaaatttggttttggtacgaacataatcaaccggtttgatcctaatgctcagtgctaaacccttcttgttcctgtgaatagatgttggagtgggataggaccggtatctcgcatttagccggagagatagctctggtggccggacttttgatgtgggccaccacattcccggcgattagaaggagattcttcgaagtcttcttctatactcactatctctacatggtcttcatgctcttctttgtcttccacgttggcatctcttacgcgttgatctcatttcccggtttctacatcttcatggtcgatcgtttcttgagatttctccagtcgcggaacaatgtcaagctagtctctgctcgtgttcttccttgtgaaactgtcgagcttaatttctccaaaaaccctagtgagtttaacaatgatccctctgttttgtctttttcaattgattatctaatcaagaatcctatgctaaacatgttgatacagtgctgatgtatagcccgacgagcatattgttcgtgaacataccgagtatttcgaagcttcaatggcatccatttacgataacttcgagtagcaaactcgaaccaaagaagctaagtgttatgatcaagagccaaggcaaatggtccagtaagcttcaccatatgcttgcttcttctaatcagatcgaccaccttgctgtttccgtcgagggaccctacggccctgcttccactgattacctacggtaattaacctaaatcccaaacagagaagttcaacattagatttcgtgcaacacaagtaacattgatactctgtttttctttcaagaatagacatgactctctggttatggtgagtggaggcagtgggataacaccgttcatctccataatccgcgacctactctacgtgagctcaacgaacgcttacaaaacccccaaaataaccttaatatgcgcgttcaagaattcttccgacctctcaatgctcaacctaatcttaccgaactccaccgagatctcctcctttatagatatccagatcaaagcctttgtcacccgagagaaagtatcaacctgcaatatgaatatcatcaaaaccctcagtttcaaaccatatgtctcagaccaacccatctcaccaatcctcggaccgaactcctggctgtggctggccaccatcctctcttcttcattcatgatctttataatcatcatcgcaatcatctcaagatatcacatttacccaatcgatcaaagctcgaaagagtacacttcggcttatacatctctcatttaccttctagcaatctctattagcgtggtggctacgtctacggtcgctatgttgtgtaacaaaaagagttattttaagggtttatatcaaaacgttgacgcattgtctccgttgatgatcgagagctcgccagatcagttgctaccggaattcaccaacattcattatggagaaaggccaaatcttaacagtaagtctatttaagattatatataacatttttggacatgtatgagactgtagagtatattgctttatctaagttttcactatgttcattgtgtgaaagcagagctcctagttggtttaaagggttcgagcgttggagttcttgtgtgtggtccaaggaagatgagagaagaggttgcaaagatttgttcctttggttcggctgcgaatcttcaatttgaatctattagtttcaactggtgagtttttttgattggtgtaaaagaaaattccaataaacaaaatagtatctaccaaaatcttctcaccaaaagaagtaaagagagtcaacatctttcgaaatcaagatcaacttcgaagtaacttatgcactacaaaacaacaacaacaagttggtactcaactagacattaaagaggtgatgttgataacctcaatttaactccactacataaccggttgttgattttgcaaaacagagctgtggtaaacaaaaatgttttattttctgttaacaaataagttacattggaacaataacaagaaaaacatttatgcgtcaacttgggtttagacaaaaaaaggcttatcaagttatcatagaactcaacagaaatgatcaatttagagagtacttattatttctgaatttggactcataataaaatcaggaaagaatggttctttcaacataagccagtactaaattttagaattcctactaggaattattaaagtaaagactatgttacattctcaatatggagtttcattttatgatgtctgattagtttttatctttttgcaccatcaaaacttcgcagagatcgatcattagaccttgacatatcaaatgatgaccttaagcggcctcatcatcatattgtcctcatggtccaatatctgcaatgcaaaaacattatattgcttttaaaaacaaattctgtagtaacgattaccaatttaaaaatattttgaaatcctacttacgtgacaatggtagacatagcccggttcctgagtcggatcgaatgggtaagatgcattagtgtggatataagaaaagcggacaagtatcctcgtaacatgtcccggcatcatcttgaatacgttcttccaacccctctcgtgtgccgtcaccgctgtctttttcccacgagcgtatttgctaatttgacacttgaccgcgtcgttttgtttcgtcatacactccttgaactcctccaatcctgccgccagtaatgccgtttgctctaccactttgaacaatcctagatgaatgtgtaacggatggttatcttccgtcaaatttatcacttcccatacctgattaattttacaattattattaaacttttccaaagaaatttatagattagactgttaattaacaacgtacctctgtagtccctgattttggagtttctgtaacgggagcttcatagggcaaaccattgactaacaaatgagttggctcatcagagttactcacatactcgtacatagagatgtaacgcgtgagaacggcgtttgacacgtcagcattcggataattgatgagcttcttgggaattgtacatgtgtcatcctctgattcattgttgatgataaatttcattaccttgccattttcttcgttgacaggatcaccactagggtaaggatatggtgcgtcattagcaagcaccaccgttctcgacggtgatttgtagaaatcaacaacaacgtctacaatttctgatggagataagagaatcgatttggtcatcaccggctttgacaaatacgctgaatcagaccccacaacgatgaaatctagaccgttggagaagaaaaacttgaaaaacctagcgttgcttgcgtttatgatacggaatctgtatttcctacgtcggacgtttaatcttggccatgcttttccattaacgattatcacatcgccaaaatattccggttgccactgcgggtgaatcgatgggttgttcccagtggcgttcatgtaaattgacccgtctttacgaaagctacgatcaaaaatgatcaacggtcggtcgaactcatcgccagtaggtagctgaaagggagattcaacggcgtggtggcgaagaatataggcgcctaccaaaccggcaaggaggttgactcgagtcaaacccatggcatggtcatggtaccacatgttaccaggttgttgcttgttctcgtaatgtaacgtcgttttggtccattttggtcctgtttctctgaaaccggcagtgaaccacgcgtcggcgtttccgtcgcttgttggttcgtggattcctccatgtaagtgaacaaccgtaggaattccaccgtgtttcggagttgctggggagattgtggggtcccaaggaaggatgtgagatttaggaaggtgatttcgccacgtaacgtatgtgtctactccatatacggtttcaatcgtcggaccaggaactgttgccttgctccgtgatgtaccgtatgcaaacactggcgtcgcaggcaaatctctgtggaatttctgttacaataaatttattgtcacgccacaaccatactctgttctgttctgttcttttcttactataatataggaaaaaaaacaattctaattgggcctaacagaatatggccaaagcccattatgtcttttttaaaaaaaatcatcaaaaacactttatttaggtgaagacttgagagtaaacgcaaaacgaatctaatcattttttcccaaaacgactaagacgtaattacgtaaacaagtgaaataagattattctcaccagtcaccaacccataagaatcttcaagaaaaagaaattgaaagaggaaaagaacaatacccatttagtggagaacatgccgatttgaagagaagctggtttgatgataccatgaacagagttaaagccatagagtctgggcatatctgggaggtcgtcgacgaacatcttaagctttcctacttcgaatagttggtcctcgagctctccgcacgtgctacggagccatgtcaacgctattattagcaccatgactctctttatcctcctccgacacaacagagattccatttctgacaagtcaattcagttttgagtgtgtgtgtgtgtgtgtgtgtgtgtgtttctgactgaattattaacttcgggtgagagaaattaagttcttgattagattagatacttatatataggagtgtgtgtgtgagtatttgagagaacgtggttgtctttggttcacacccatgagtctttgttatagtatcgttacaaatttattctatcattaaactaagtttggtataaaaaatttcttttaatggttgcatgatgtgcagatggcattttcctttttcattattcagtgacctttctttccaaattgtttgttttgggaatttttgtttgtctttgtattattttatgagatttcactcttgtactcttttttttttttgtcacactctatagtctttagtaccggatttatcgaagtctgcatttaatgaaagttgcgtataatgtgcaacgcttaatgactagtgaaacaaagaagaagcttaatgacaaatgagagcctaactcgatgattcatcctttttagcttacaatggtatttgaggtaggtaggttaggtaggttgattagtacgtataactatgagtctttgatcgataatagatcttaaaatccataatttggttgtcagttagcaatcagttccaagtatttaagagtcttaagaaatcaaaattaaaagattactctttttcaactttcctttttttgggattctccccaaagataatatgtttgtgttggcttcacaggtgaaaaagctagtagcgacgtatactaaattacaaattaaatacaatggcatccgcagaaaagcagagaaagcaaacattgacgagggaaaatacaaagaaaggcaatactaaaaagtgacgataaaatattagcaaatttcatttagctatgtatccagataccaccttcttacgtggcaaaatatctcgaattattgcattaaacctcgtattatttatagttgaataaataatcacactaattgtcttgattattgtgtgatacgaaagctctagtatcctagacgcgttaccaaagcacctaattacatttaagggaccggaaaattgttaattcgagaaatcatacttaaatctatctctctctttttatctaagtattcttagtctctttttataaccacttaatcagaaactaagacacaagcaagtctctcgataattttgtaatctacaagataaaattcgattatagaaaaacaaaggcaaacatctcacggctcgtgtcgtaaaaagtaggaactcaagtgtgaaaagaatttaagagaatggtccactatcctaaactcgatgcttcttacgtttaagtgtccatttggtaatccattattatgcacaaaccacattattaatataaacctactatagcatgcaaatggaccgaacattacatagagttattttcactcgtaccaaatgttttctagttacttataattttagtgtcctgcactgctattaatttgtggttagagtttcatatagtgattgtataatgtatttttcagtaacaattaaattaattaaatcataattggtaaataagattatttcacatgtataaatttggacaagcgattgtggtgagaaatcataactaaacctcaaaattagggtacgatctttattttattttggaccaatttttagagtacgattttaaaagcattttaacttttaaatgagaaaacttcttcccattttgtcaaaaataaacagacaaaatgtttagcattttcgtttgcatgtttttgtcatctggttggggaatcttgtgtaggctctaaagaatttaaatacgtttgaaaaagaaaaaaaagttgggctttaccccaaaatgtttcttgaaattcatgtggcccaaaagatggttcgaatctgataaacatttttcctaagcaaataccaatttccatcggtgtatcttggaaatatatcaaatttaaaacaaagaactgattgatgcatgaccggcttagcattattactttcacaagtccaaaattttgaaccatgtcgcatttaataaaaataggtgacgcgtaaaacgagacacctaccaagaggcaagcgagagcaggtggaataactttttgagtggatagagagaatatcttttcgagagatacacacaaaccacattgtgacaaaaccaaccgctttaaacgctcctcatctacaaatgtttcgaccgcaccaaccggatctcatgaaaaagaaccaagacaaacaaaagcatctcacaagaaacatcaataacattctaggattttatatatcaaccaacacaacttcatgtcagtccaaaacagctacatgacacacaccaaaaaaaaagagaaagaaaaaccaaacactaatatatcacactccagaaaagattaaacttttaagtcttgtttccaaaagcaaaagatagatatcttccttagcaagcatccacactttacatgatgttgcagctattgttattaccagcgtcttcttcactagacatgtttgttgcatgtgaatgactactttgttgttggtactgatcacttgcgtaagggtaataaggataataactgtagggactaggggtataattgtaataatacccattgcttgatgctggaacgaaagatgatctttggtacatcatttgctgaggctgatgcatcatttgcctactctgcatgttcattggatgatgattattgtacccattcatgttcatcatcatgcctccattactattggtgaggttgtgattagtgacgccgttgacgttgtttaacggtggagcttgaagctgttgttgaatcccatttggagggtgattcactgcgttggttgcgccgttgaagccagcaagacccatgagagctccaatctcgttggcttcaacaccagtgctcattttcccggcggttctcattctcatagccgccattacttgttgagtgttctggttatggttgctctgtttttggttgactttctttgatgctgcgttgactccgttgtttccattgttcatcgcagctcctccactgtttttcttggcgttgacgacgttttgttgctgctgctgattcgccggtttaggaaactggacatctccgtcttcctcttcactgccatctccatcttcctcagctacaaaggctgcacctttagggccgttcttgggtttacaggcttcaataccacttttggcagacccctgcttctgacccttttgattaacgttcttgatgaagtcgttagtcttgggcttttgaggctggttttggtttgggttaggagaccaaagctcggcgtgtttcccggctttaacaagcttgttgatgagtgtggctgagtcaactgaccctgaaacagtcaccttttgatgttctgcttctatcttcacgtggcaaactcctgttttggtcaaaacatgacaatgtatctatcgagaatccaaaatgagtaaagcagaaatgtattgcatgtgtgaaatttagaaaccttcgatcctctgaagaagtttcttgactttcttgttacagccctcgcagtgaatgttgactctgagtgaaaacgtctgtgttttgcaatagtcataaccattaacacaatgagagactattgcaaaaagataaaaaaaaaagtggagaaagtcttaaaactacctggatctttaggagcttaaagtcttcatctttagtcatggcttaagaagaaagaataagagaaatgagtacacgcgttttagatatcgtttggagtttagataactttgcaagcttggtaaaggaaactcgccttttgaagaataggcaattaagtggagaggctttgggtttagagacttttgctctgaaatttgaaacgatgttgagtgagtgagtgaagactgacacttaaaagtaacagcgacctgaccacacttcctcattaaattctgaattttggagtttaaattgcattccaacaaaagcattttgaattgtacgatatctttatttaaggcatattttacatagtacttgtagtattattcataaactatgatattaatgaaactaagaaatgaaaaaacaatagagagagatatggagaaattgaaaatgttgtcagaagagtgcatgcatgaagagtcgggcccaacggtctgtgtctagtcagtgtttggggtttgccttctcccacactcttctcgagcttctcccctctctttcccccaacttttttcttctttttgtttatagaataatactaatttcttttagaaaaagtaaaaatgagctgacatacatattatttttagaatattttcactatactacgtttttggttttaagaaaaaaattgcatgcaatattttgatttcttgatttatgagcagtggccagtgagcacattctgactgaccttgttagtgtagtgctagtgttgccttacatttcggcctttttaataaaactattatgggccttaaacaaaaaaagagacgcattacgcattaagcccattaatctgtttaatgtttttttagtctggctgttcaatgttggccctttgattcccccacttaaacttaatttctttccaaatctatataacacataaataaaaaaacattaaaaaaatcgcaaaccctcgatggattttcaacttgatctaatgggagtttacaaatcatacatatgatcaaagattacgtgattacattatatttggttagcttttaaaatatgtttactaataatcacattctcttttttaacctagatcatgagctaaaacacatactaatcccaaagtctatgaaatgtcatgcagtctagtcttgtcagttaaaatgagtatgctggtcaaaagaaaagagcaataatggtcgtagatagtaggactttcccccttgatagaaaaatttctaccactcgaataacaccaataaaccacaccacctcgatggctcgattactatatagttttgaccgcatacaaatcaataatcagtgcatttatctacatcaaacgaatttaactgtccacaataaatatatacatgatcatcatacatactatcatcttgattttgcatacaaaaaatatacttcactttaagatttgagagttgccagctacctccaatagtccaatatatgttcctttcacgaaaattatagttaccaaaactcgtattgctcacatgatttgttagatccgtagccaacattacattatggtatttaactcttgatgtaaactgcatataccaatattatcctcttatttcgtgaaatgccgtgattagtgtttcaagttgaatgatttagccgttcatttcccaaacaccgtacacgtgacaatagaagaaaagctacaaaaccctggacctcacagcatcaacgcaaccttgactcctaattatcaagtcctctctacgccacgcgttttctgtgttactccacatcggtccattagttttgtgtcttttcacaatttcacatgccataatagaattttagaatatgtatgtttttaaattggggtcgaaattaataattagtcatgtcatcacccgacaatgtacttacctgtcctctgatcatattttcatatttagttcttctttttttgttagagctttatatcatatgttcttgttgacaaccaaaaaaataatgtatttagtccttttctcatcactataattaaattgttcctaatgtataacgtgttatatgctacatcgaatttgatttaagatataacctcagagagtcacagaagcaggtgttatttatttcggtcaactcgggaagtcttctattagtctagattgaaagttcaacgtacgtatcatttgattaaccaaccacgtaatattataaggaacagaattaataaaatttattaacaagaaaacttgtccccttactggttgtcgccaaaccatgctatactccaaaattgttttgaaaaaatgaacacatacaaagataagcaattgcacattgaattatttaatttccattatatatgtattgtctaacaaatatcttatcttatccaaagacatcatcgtcgacatatctacttccaccgaggaacaataccattaattacgtagagatacaattggacccatgcgaacaaaatgtttgccgtcggatcttacacttgtcgtaggtgcacaacaaagggcagagatggcatataattgtttgatgtttggcttttcacttgccaacgatttctttagcgtcatagaatctttcaactttttattaaccaaccactgccttcacaaaactattttagtagtatggaatgaatacaaacaaaaaattgtcctaagatagttattttattccataggatatgaattggatacaattatattgtatttatgtatgatatttttggaattaaccaaatttataatttaatacttcaccgccatactaatcctttaatcacgggatgtttaaagaagaatgtcaccgtgaacgacatctcaaccgaacgaataaaccatttcacagttatgtttatactatggttatctttttcgcttaaggtactagtattccaaaaaaaatatatatatatatatatataagataggttaattttaatttatctaatatcattcgttttttgttttccatttaattttttttttttaacatctttactcttatattagatagtataaagataatacaaagtgttaaccaaccaagatggtggtgtagtataaaactgaaacagagggtctattgcggtgacatgagatgctaaagcatcagctgcagaattcctttcacgattgttttccatttagtttagattgagattgcaaaaacaaaaccattttaagtaacttcaaaacttttatagttaaagaactaaactttaaacttggttttgttttttttttttctcctaggtcttaactcgcatgaaatgaacttggtttattcaaattaaacacccagaaatacataaaatattttgaggcgtatattaggttaatctcaatcgaatgcttccaacaaaaccttagtttttgaatggaacacaatttaaataagttcaattattcatacaaagcaagtaagtaaaactatatcattaaataatctactagttaaacgcagagtaattactatatgttgcgttgcttctcacataatacagtaacaaaaaaggttccagtactttaacttcataaaacgttatacattacaaattataacatcggctcatgctatctatacttattcacataacggtgcaggcgttagggttctcgtcgctaaagagggacatgagcttatcgtcagtacttcccggctgcgcctgagcctgctccgacttcctcacaaaacccggcggggctctcttgtcgtaagctccggcggcatatggataagccaccattgtgtatggaacatacggccacagctcagctttctttttcccagtgctctgcactgtcttcagcactttcttgggatcaacgtagccactcaccgttactttgtgcatctttctgttcacttccactgattttgctcctaagaaaaaaaaaacgagtggtgtgtatatattagtaaggccatgtttggctgatttggaagggaattgtgttttttggaatatgacgtgttagattacataatcatggttattttaaaggtagagagagtcaaagtttaaaattttcttatatctgtatgcatagtttcgtgtaggagataattaacttgaagcataattaattgtttgccctaactaatagaaaggcgagtagtatttaattgactacgtggaacttgagagttgaagaacgaacctttgatggaggaaacagcgttcttgattttgcgttcgcatccgtcacagtcgatcttcaccttaatattcaccgtctgtttattagcaaaattttgaaaaggttaagcaactaagaaacgacgaaacaacaactaaacggctgcgtttagagattttagttacctgcatgactttacgtttcttccgttttcgtattgagacgtagaaatggttagagaaatactcagaaagataattgagagctcccatgtttactgtcacaagcgagcagagagatggagagggagagggagagggagagagctagtgatgcttagaatgggtgtcgtgtcttatatagggaagtttggaggtggtgattggtggttataatgttccgagtattaggaaacacacattaaattatttattgatgaattgagcatttatttaatttcattaggtgtataacgatatcattatttaaactaagaggtgtcctctaatctatagattaatcgatgtccttctccaaaatatttcccggcggacaatgaggacgtttctaatgttcctttcgatcatcatgtcactttcttctttgcttaatggttagctttttgtgttaaataaatttagaattaacaatagcaaagatgattatataatttactcaacaactatattgtttcaacttattatgtattttatttagcgatgctacaaatttgaaatattgtttctattggcggaaaagagttcaacaacaatttagatgcaatatcagaagcaaaaaaaaaaaaccataatataattagtcgatttaaatgaacctgcaaaacatattatatggattggtttagcatatgcatttggtttcttgttgtacatttttaatgatatataaatgatgttatttagcatatgcatggaatatctgcaaaggaaaaaaacatactgagtatattattatgcactttgacttttaattttctcaaaggattgatattattttgtgtaccacgcaagcggcatttgcgacccacacgtatacaaataattgaaaataaacatatctagtaaacattcacaacaaaaagaaagaaaaaaacacatctagtaaacaaatggagcccacctttcgaaattgaaaatcgaactggaaatttagcaaccaatgctgaggatgcatgcattttattattttcctattctatcgcgattgcttgtgtcataataattcatccaaagatctttttgcatttaaatatggatagttttttttttttggtcacaagatgcacttttagatgtttaatctgaacttatccatatggaccctcgaaccatatataaagtaccttctaaggtcaaccaagagcaccgatataaatgtataacacacacacatagatgagaatgctaggagaaaagttagtactaccatctgtatattttcgtccgctaactaaaaacaaaacaaaatcgaactgaaaaaacccctaaaataagaagaaatataaacaaagcgacaacgaaacataacaagaacgagaaagtacgttgggggattgaattcagctccaaaataagtgtggttctatgaaatttttcagacctattattgataacatttctaagatggatatggacgtttatacatataatatggtagtcccctagattttataataaaatttgaaaaacgttatttaaagaaatgtatacggtggccatttttcaatccagattagagaagtaattgtggtcgtagaatattaattcatgcatgtcctcatagtcaattttacaaaaaatcagaaagtttagtctttcactgatgtgacctgtggaacatcatgatattttatgaatgttaaatttaccatttttttgttttgacagcttataaaatcagatagtttatacgttaaccaaaagtgccgtgtcaaataatacgacttccggcccatagatttcttttatctggctacaaatgaaaaatgtttagttatacatattttatagagtcttatgtcatgttcttatattttgtggtacttacttatacaccaggaaaaacaatcagtggtcacgagaatactttaaagtaacagagagttgattgtgcttaagaataaacttaattggaaaaatttggtttaggggaagattaggttgatattttggtaaacgtcccttttacctgttcggttttatcttctcttcatatttagtggtgcaacgcaacttctggagatgaataatttatagtcctgtaacttgtggaggcgaataataaataattcagtcatatcatatgcatatatgaatatatgagaaaacgatattaatataattaatatcgttgtaacttgtaagtgcgtcatatatagttgaaatcatacgaaagatatcgcaattaaggatcaatcgaagagtaatattatattatttcacactttttcaaacctggtcttacacataacacatcttataaaacatgatatcatgcgttttacgttaattggttgataatttgattcactgagtgggttttacgttttcttgttgattaagatttagggtataagcaagttaactaagcaactatagggtaccaaaactatctttgtaaaataaacatatacaacaaatgttttgatagagttcatgaaattgtacaatgcataaaataaaacattgagaagttctaactgagtggtcacatatgttagcggtccatacataatttaattcgtcatcattagagaaacaatattgcaaatatactaaatctgagtttgagaaaaaatatagcttgtagacacacttcagtacctagtgatcaaattatcatatgacatatgatacttatgtgagtgtgactatgtaattcctagttgaaaaaatacattgatgattgaaaattacagtctagaaattataccaactaaattaccttggtacaacttatataagtaagtagtccctataataagcctacactctctacaaaataagtaaaggagaagccttgaaggagaacaacatgtcaattcaaaatagtcatggaatcactaaaaggccttaaagaagttcttaaggcccaaaataaataggtttttcggaatttgaagtccagttttctgcgaaccagactagttctgctcactttgggttctttcaggtgggcttgaaaactagacaactgagtcagaccaagatctttttttcttttcaaatcaatattgttgttgttgttgttgtaaatcaatctttgtgtagaaaaaaaagtgaaaaaaatgatcttgttatgaaattcaaaatccatacagtatttgtttttccttcatgattttacttttttaccaattaacttaataatatttttgtccgaaaacagatttttcgaaatatttgttggtcatcaattttgaattcaaaaccgacttgatgagattgatcaatagttcaatactcataattacacacggattctaaaagataagagaaacagtaagtcggttaattttggattaagtaacgcacaagccaaagccttctcctgatcgaatcataaaccaaacaaatctttcttttaaaagaagcggacacaaaccctaaccaccaaccctctccgtcgtcaaatttcccggcgaaagatgaaacgaattgttcgaatttcattcacagacatggaagcaaccgattcttcaagcagcgaagacgagtcaccaccgtcatcacgccgtcgaggtaagaagctagtcaaggaaatcgtaatcgatcattctgatcccccggaggtcggaaaaactcggttcaaaatcaggattccggcgagtttacttgctgcgaggaatacgacggcgaataagaagaagttccgtggcgtgaggcagagaccatgggggaagtgggcggctgagattagatgtggtagagttaaaggaagacctgaacgaatttggcttggaacttttgaaacagctgaagaagctgctcttgcttatgataacgctgcgattcagttgattggacctgatgcgccgactaattttggccgtcctgatgttgattctgcggtggtgaaaaagcaagattctgatgctagtggtggtgcttctgaagaagttgtttgattttcttgtttataactaactttgcaaggttacttttgtttatcatcatcttttgtaaatttgatcatcttgctctttgctttttaacttctcttgtacatgtttgaattataaaagttctaatttttcaatccagattcttggttttcataattgtacattttgatcagcataactattgcttaaaatttccatattggttttaccttaattgatcaaaagtctttcttttggatcgaaattgagacaattgttctaccaactgtacttgaaaaactgctatatttctcttgcaatttggttatctcctgatctcttttacttatgatgactctgttagatgctgctttcatgagcgtttctttgttaaactaacttggtcggtcttgttgtcactttcaccaactgaaaagaattaatatgttttaagtatgttaaattgctgtcaagctagctagggatgttgtaccgaccagcggaaccggtggagcagtaactgatttattaaaaaaggttgtgaaaaaactgatctggttaactttttgagccggtcctcctcagtaggaccatctttgtcaaaactttgatcagaccgaaaagctgtgttcaaccacattagcctaaagcttagctcacaaagaccatcagaacagaacaggctgaatcatcatcacatatttttttaacaaaaccatataacaaactattagaactgaattctcataaagctatcaaaaaccctccttttttcacaaacctgggttgaattagtagtaggtttagccaccttatctctgaaactttcttgataaccttaattatacatcttacaatgtttaacctatggttttgtttaacctcaattatacaaaaccattaccactaatgggctaatagtgaatctggcccaaaatgtatttgcccttttcttctttagccaaaagccttctcaataagtcttcttcttcttctctgatttctttctcccttcttctctcggtcttgaatctttctttgtttgctaatatggggattaatacttaaacagagaagtttgtttttttccaacttaattcttcaagggcatttcaataaataacactaagtcccctaagtgacaaacgacgacctatcagctaagcaaaaacccttagcttggcagaggcgtcaagggtttcaaatggggaaatcaaagaaaaaggttctaaataaatctctgattactcatcctagcaccagtgacgatactctccaagtattcttctttcttaccatgtttgtttcatgttttttggaaatgaattagaattgtaattagacaaagatcatgctaaactttttgcagttgttcgatccaacatcgtctcctacaaaggaaaaagttaactggaacaatgttcttggcatttctgattacctctctaaacaagccaccagaggttttagggttctctgttaatatttgttaatttctcggttctttttttttgtgatttcttcctctcaatttggttactacttaattatgatagtgaaaacgctatggactggagaaactccaaaagctgaatcagttaaggagacaatggagtcttacttcaaggctcttctagggtttttgctctgttgtcatggaagcactcttggtgctggtcctactttgtcttcaatcgtacacggttctgttaagcaaatcgttgactccagcttcagattgtttcagggttctgtatctctttacggtaataatgaaaagttttatacttttcaactatctcaatgtaacatctattgaactcgtcttgtcaaaggatagtgtagccactgtttcatttgctttcaacatacacttctcgtgagtgctttaactgtggatgatgttgccggtgttttgtttgtatctgttaaccagatggatcatatgaaaagggggaaaagccgtctatttcgcagctttcaggagcagttttggaggcatgctctagtttcaagaaggttcctacaacaaacctcatcgcgattggcagtgctatttctcaggtttcggttatcatgaaggatgttcttaatgagatgaaaaaagtgaaaccagcttgtccttcaagtgagggtgaggcatctggtgatgatttttctcctgagcaaatagaagttgctaaaatggttgctgacattgtgtatgaggcgatgacggtaataatagtcattcgagtaatcaccaggatgatggagaaggagaattcaaatgagaatagcgtgtttgtggagtcgctagagaagctacttaagttgtgtcaaagaagtggagtagtgatagaagagcttggtacttgcgtttatcatccaccgctgaagatagacaagataactcaaacggtgaagatactagagggaaatctcgatgaagttgaggctcaagttgagtatatgaagaggtcttccaacgcctttccgggagtttgcagaaagctgcgagacgcgatcaaactcatggaagttggattggaaaaaagaaaggatttgaatcaaattctgatttctcgtcaaaacactctctacaatgctctccaggtatgtttcttcttacctatttttgttttgtttcatgttttctcgcaatgaattcgacaaggattaggccaaaatgttttgcagttgttggatccaacagcttctccgatgaatcgatgttcttagatctctgagcagccctctaaacaagataccatagggtcaatgttcggtttcctctgcatttacatgagaaacagacatgtctcttataagttaaagactgcttcaccttttcccaagttcatctttcgttgagactttatgttcatgagcgtttcttgttaaacatgactctgcttctttaaaggatctgaaaacttttcccaagtttatagtctctgatctttctttaatactttcctatgcaatgtttttgatcgcttcatagtcaataacaagagacttgaagttttttctttaacttgaaaagcaaaattttgtaagggcttttctgtaaataataacactagtttccaaagtcttcaaacgacgtcgttacgaacctgtgaagctttagcttcgacaaaacccttaagctagtagagacgtcaagaggttgaagcaagacaaaaatggtgaaaacaaagaaagaagatctaaatcaatttctgattcctcgtctcaacaccatctacgaaaccctccaggtaaattttcttcttatcgattttggttcttttcacacaattagattcgtaatttagacacaagattatgctacaaattttgcagttgttcgatggaacagcttctcctacagtggaaagagttaattggaacgatgttcttcagatgtctgatcacctctctaaacaagccaccataggtttttatttcacttgttataatttcttgattccttttgtgatttcctgttctcaattggtgcttgggactactcctaatagtgggaatgctatggactggagaatctccaaaagctgattcacttaaagagactatggagtcttacttcaatgcccttcaagggtttttactctgttgccatggaagcactcttggtgctggacctacgctttcttcaatcatacatgtttctgttaagcaaattgttgattctagcttcagattgttgcagggttctgtttctctatacggtaattaactgaaagttttacactttcttccattatgccacagtttgatttgctttcaaggtgctacttctagtgagtgcttagttgttgatggttttgtttttgtatctgtgaactagagggatcgtatgagaaggataagaagccgtctattccgcagctctcgggagtggtttgggaagcatgttccagtttcaagaaggttcctgcaacaaacattactgcgattggtagagctattacacaggttgcggtttccatgaaggatgttcttagggagatgaaagaagtgaagccagcgtgtcctttatctgaatgtgaggcatctggtgataatatgtctagtgatgatgatgatgatgacgatttaggcgatgatttgtctcctgaagaaatggaagttgctacaatggttactgagattgtctctgaaactatcatggtgataaaagaactcattcgagttatcactggtatgattaagatggagaatccaaaggataatagtgggtttgtggagtcgcttgagaagctactgaagctgtgtcaaggaactggtgtacaaatcgatgagcttggtgcttgtgtctatccaccgcaggagatgaacaagatgaagcaaacagtgaaggttatacagggaaatctagacgaatttgaaactgaagttgagcgtttgaagagttcttcagacggcttttcgggagcttgcgggaagctgcgaaactccttgaaacatatggaaactgaattggataaaagatgtgaagctgagctagtagttgaaatgcagaatgttactcttgacagttagtttggattttgcaattgagttttttttcggtttgtttcagtggcttgtgtcttgtagtaacattcatctaatgttcaatgtgttgtacacgtttcttaactttatagatatggtacttagattttgttttcgtcataacattctttagacatgatcatgtgaatgtagcaaccttgtaagactttacttgataaatgacaagtaggtaagtatcacatgagaatgtttttccaaaactaaatcgaaatggtaaaccggttgcatttctgggtcgtgctttaaccggtcggaaattttgacttcagaaaggaaagttgagcaaagaaccgaatttaacggttttaaccgtggattttacgagattgaatcacggttgaaccggtccggttaagagaacattgagataaacccttattttgtttaagctccgggagatgtttgatcgccgacgcacgggagggagagatggcaccacaaggcttcgtggagaattaatggccgctcctccttcttctctcggatccattgaaatcgatactcttgaagtcttgatcaattcaaagctttggttcctatgtgttcctctctgtttcctcaatgatcctatgtctccgtctctgtctcagagcttcgagatctttcttctctatttctactaccaacaacaacaataacctctcacgcttcctctttcgattctctactcttcctcattgcgctgcatcgtcttcttcttcatcttccaatctcgagtcttattacgctaatctcattttgagctctcacggagatagtaataaacctaatcggaagtggtcttctcatcagtttcgtcttcttctaactgatccaaatttgcttattagagtcctcaatatgattcgggtcaaacccgaaatcgcgtttcggtttttcaattggatacagagacagagcgatgtgaagcagtcaaggcaagcttttgctgcgatgttggagattttagctgagaatgatttgatgagtgaagcttatttggttgctgagaggagtattgatcttggtatgcacgaaattgatgatcttttgattgatgggagctttgataagttgattgctctcaagcttttagatctgttgttgtgggtttacactaagaaatctatggcggagaagtttttgttgagttttgagaagatgattaggaaagggtttttacctagtgttagaaattgtaacatagttttgaaggttcttagggattcaaggatgatgaataaggcttcagcggtttatgagacgatgattgagcatggtattatgcctacggttattacatttaatactatgttggattcttgtttcaaggctggtgatttggagcgagttgacaagatttggttagagatgaagagaagaaatattgaatttagtgaggtgacttacaatatactgatcaatggattttccaagaatggtaaaatggaggaagctagacggtttcatggagatatgcggagatcggggttcgctgttacaccttactcgtttaacccgttgattgaagggtattgcaaacaaggcttgtttgatgatgcttggggagttacagacgaaatgctcaatgcgggtatttatccaaccacatccacgtataatatttatatatgtgctctctgcgattttggaagaatagatgatgccagagagctgttatctagtatggctgctccagatgttgtgtcttataacactctgatgcatggatacatcaagatggggaagtttgtagaggcttctctcttgtttgatgacttgagagctggggatatccatcccagtattgtgacctataatactctaatagatggtctttgtgagtcagggaacttggaaggtgctcagcggttaaaagaagagatgaccacccaactgatatttcctgatgtgattacgtacacaactcttgtaaaaggatttgttaagaatgggaatctttccatggctactgaagtttatgacgagatgctgaggaaagggattaaacctgatggttatgcatacactacaagggctgttggtgaattgcgacttggagattcagacaaagcatttcgtctgcacgaagagatggtggcaacggatcatcatgctccagatctgaccatctataacgttcgtatagatggactctgcaaggttgggaatctggtaaaagcgattgagtttcagcgtaagattttcagagttggtcttgtcccagatcatgttacttacaccacggttattcgcggttatttggagaatggccagtttaagatggccagaaacttgtatgatgaaatgctgagaaaaaggttatatccctctgtgattacctactttgtgttgatttatggtcatgcaaaagctggaaggctagaacaggccttccagtactccaccgagatgaaaaagagaggcgttcgtccaaatgtcatgacgcacaatgctcttttatatggcatgtgcaaagctggtaatatagatgaagcttacagatacttgtgcaagatggaagaagaagggattccaccaaataaatatagctacactatgcttataagcaagaactgtgattttgaaaagtgggaagaggttgttaaattgtataaagagatgctagataaagagattgagccagatggttacacacatagagccttgttcaaacatttggagaaagaccacgagtcacgagaggttgagttccttgaaaggctattactcagttgacgaggaagcaaagttggtgacttggaatgatcatttttttacatggagctggctggttccgtccctgagtgcatatggtcaaaattttatgactagtatgcacaatctagttgatggctcagcttgattggtatgtagaaactcttctctcagctttcacaaaggcttctacattatctgtgattgtagattgtaatgcatctatagctatacttctctaccaggggaaacacactctgagctatggccagaatcgatccaatgttgttgaaagctcttttaactcattcttacacagcaggggcaaagagaataggaataaagatgaccaacacataattgttgtttgcaaaggaagttcacactcagtgaagaagatttcctgtgtattgtttaattctttggaccattttttgggaatagagaaaaatgttgaaacatataatttcatttttgggaggaaaaaccaaaagtacaaagctctgcttctctcaagactctaagcatgttttaggtaaacactagattcacttctctctcttttgtaaccattgcctctgtgctctgtcacatttcatttccactgcatcattttgtacaaaatcattcgtcactatttctatttatatgaatcaaataaatatgaaaatacagacttattactaatttactaattttggttttttaattttactgatgtaatgaccaaaaaaaataaaaatcagcgttgctaaaaatggtaggaacaaacaaagaaacaatatcaaaatggtccacgttttttttttactttgaggaggttctataaaaaaaaaaagccgaaaccctaacctctcaaacaaaccatcatcatcttcttttttcactcatcaaaaaaaaactaaaccctagaatgcgtatcgctttctttgacctgaatgtgcaatcaaactcctcttagatctatggctctcgattcttccggaaaacaacctgagcagcagcaacaacaacaaccacgagcctcctctggaaacggcgaggcaagattgaagcttcggagaacccctaatgaagaacatgagcctgagaactatgaagatctacctttggactatagtccttctctgttcacctctcttgagcgttacttacctgagcagcttctcaattccacacgaatcgataaagctagtttcatgagagaccttcttctccgatattcccctgatactgagcgagttcgggtaaaagtttcttccttttaccgattcttgttagttcgagcttatatttctgtaatttgagcttgaatttgtgtctcattttcaggttctgaggcataaagaatacagagacaaaatcatgtcttcttaccaagtaatattctttgtcggattgggttaacaaagtcttaatcttgaattggttatttaaatctgttttgcttgttgttaatctgattttgcagcgtctgcatggagagatctatactcttgaccctagtagtttctttgcgccatcgtttcttggagcttttagtcggaagtcagagccgaatttcagaagtagtatggttgaatcttatcctgggattttcacttttgaaatgtttaaaccacagttttgtgaaatgttattagcagaggtatgaatttgacttaaagttatcgtttggacagagctaaggttgttctttgtcttcttatcaaagtcttgattgatttactcaggttgaacatatggagaaatgggtttatgattcaagatccacaataatgagacctaatacgatgaacaatttcggtgttgtccttgatgattttggctttgatagcatgcttcagaagttggttgatgactttattagtcctatagctcaaggttaagattctaattgtcatttgcagattttttggttattgttgcaagtttgttatttgctgatgggcttggttcaaatcttgtgtcagttctgttcccggaagtctgtggaacctctttagattctcaccatggctatattgttgaatatggaaaagatagggatgttgatcttggtaagtattgggagtggtctcttcttggtagtagttagatttggacttgtggaacacatctaaaaacttgcttcttgattttagggtttcatgtggatgactcagaagttagtttaaatgtctgcttgggtaaacaattctctggcggggagctgtattttcgaggggtgagatgtgataagcatgtgaattccgatagcactgaaaaggtacttgtgaaacccaaccatcaagcactcattgtctcaaccacaaaggtcttttatttataacttgttcttttgtaggaagtttatgattactctcatgtacctggtcacgccattcttcatcgtggacgtcatcgccatggtgctagagctacaacttctggacaccgagccaacttgattttgtggtgtagaaggtaaagatattttcatcagccaatgaaagtttcatgaaccatttcatgggatttcatattcgccctctctttctcattgtagctcaacttttcgagagatgaagaattatcagagagatttctcaggttggtgtggaggatgcaaacttgataaacagagaaggcagcgtgattcgattaatgcaactaaagaggtatgtatatcatcaatgctgcattagaggtcatgtgttttttacaagcaattgttttgctttttaactcatgtttttggtaatatgcagatactagcaaggaaagctgcagagaagacacttgttgagctggcttcaaaatcatgtgccgagtaaacaaaaacaagaatatgtcaaatacctcatcttctttgtaccattccagtggctatgtgtatatagagaggcaagttaaatcgtttgtttgtaagcaagcattagatacctttgtcaaaggtaaattttgttccatttttcagattgctgcctgtaacaataaatttcttagaggagtgaaggcaaatgaaatacacaaatgttatctcttggagaatttgagaatgttggaagtttttggaagtaaaaatgtttgtagcaatcattactatttatcttttctggctttctcaaaaaaaaaaaaaaaatacatcaagtaaagaagtaaaaggtttacaacattttgtaagcacctaaaacaaaactaaaaacaccttttggttcaaattccccttttgctctctttaagcgttttatgcaacttcttagcttgagtcaaaacacaatcttggtcgaacaaagctgacacaactgctacaccttttaggttcggtgcatcgatctgcataacagacccagcatttgagatccctatgcctccgattgcaacaaccggtaattttgatgcttcacatacttcttttagcccatcaagtcctatggtacgattgttggccttagtgttcgttggaaaaactcctcctgacccaatgtagtccgcaccatctttccatgcttgatgagcttgttctggtgtcttacatgagacccctatgatcttgtccgggccaagaagagaccgaactagatcaaccggcatgtcggattgaccaacatggactccatcagcatcacaagcaagggcaatgtcgatcctgtcgtttatcagcaaactaactccatgggaccggcatatatcaatgcatgcttttgcttcttcaagaaactcccgtgtttcggcttctttctccctgcaaaagcactgagatgtcatttgggctttcataagagagagatacaaaaaagagttgaagcttccagttatagcaaacatgatcaaacctcagttgtatgatggtggcccctccctctatagcagctttcaaggcatccacaatggaacggttccattttttgttcattctagaatctgtaacagcatatagaaacaggtcatctggattgaatatgctgcatcgagaactttgaggatccttcttaagaccaaaaaaatggtcaaaaggtccttgcatcccactgccaatgacaatatctttgctgtaatctagggcattatcgacaaagcgtttagccacctgccaacatcagaaaggtccgggagtagagattattagcctttattaatacatttttttaataatacaaacacagatatctcagcctccccaaatactttttcccgattatcaatctccaagtatctatgttgaaatttgaacttatagaaaagaaagttttcctcttaatcaatttcactgacgaagagtcaatgcagacagactaatataaatcatagagagccatgaagcatagcaaattatgcgaagaaatgttttcgaaaaagaagcatatatatatattataccttgacggctgagagcatggaagagccttttgcaagctcagctgcaatacaggaagccaaagtgcaaccagtcccatgagtatttcttgtagctatgcgaggagaacggagttcatgaaactccttgcctaaacaagttccaaatttttataaccacaaatgtattgagtccgttaagcctcctcaacaacaaagacaaaattagaataaaaagatcactgtgctatcatcataccatcaaagtaaacatctactgaatctgatgagtcaggaagatcaccacctttaacaagtacgaatctgaagcacaaaaaaaagtggatcaacatcacacaataatgctcatacactgagcataaccacataataatcaagcctaaaaggattaactttatgtccagggcaccacaagcagaaaggtttcttctcaattcgtcccaagttgtaggttaaattaagggattactaaaaaaagttgtagactatatagattagagagtaacggcagaaaatagaaacctaggacccatttcatgcaacgactttgctgcagaccgcatttctgcaacagtctcaatccgaaaaccatcaagtaaagcagaagcctctttcacatttggggtaattatgtcagcaattggtagtaatctctctctgcaataagaaaccatagttaattaacaacataacacaccaaatcactgaagtcaaacacataatgacaacaaatgcataaaagctttacctaaagatagagagaatagaagaaccagccaaaacgtgaccactagtagataccatcacaggatcaacaaccaaagctaccttaaacacaacaaaactatactaagcattgaaagtttcaaaattctgaaaaacagaacaaagcgaggtaatctctaccacgaactggaaaatctgatagattttgaagaagaacctcaacgatctcagtagaaggaagcatcccagtcttcacctgagaattcattactcactaattgatcaatcataagagagtaatcaatcactaatcactaatcataagagcttacgacgtcgaattcgaagtcagagaggacggatttgagctgttcagagataaattccggaggaagaagatgaacagattgaactcctcgagtgttctgagcagtgactgcggttatgacggaagcgcaatacacaccacgagctgcgcagactttaaggtcggcttgaattccagctccggcgccggaatctgatcccgccactgttaaaacttgcggtacctttctaacgctctccgtcgtcgtcattgacgccgtcgtacttctccaattcgccggccaactcctaattcctcctaagctattcatttctcgtcccttctctttattttattttattttattctcatcaaatattttcccattttattgactttaatgtgaaataaaattagtaaatttcatcgattttcatgaattatcaattaccgcgaaaaaaattcaatgtaaatcaattttcaataattttaacaccaaacttaagcacgaattatttgtatgagataagttaatacttgtggtccacgaaaaagggacaatataatcaaaagatagataaattgatatatttgaaagcaagcttttatataattgaagaatattcatatatacaacgtttcagactaattacaaattacaaattacaaatcacacgctattttgaacaccttattcattcggacacactaaaaagggaccaaagccgtttatgttttacaaatcagcataatgcatcttcaaatcaaaatgcatcttacattacacgtgtaattattattgatatatatcataatatatacaagaggctatacaagtttaccgagtggtttggtttggttcaatgttgtggcatgagctgagtcaaccatggaccatgaactctgactgagacacaagctacaacaccaagggctcgagctgtctctaaaaccctttctttcaatcctccacctcctcctactttcttcatctctgtttcaaccattctcttcccattttctccattcccagccaataaagctcctcgagccgctttgtatatacaacttgtaactctctcatacactgtgttaccttctcccaaactcttccccaataatcctctcatcatcttcttcttctctccatcttcttcactcattgttgtttcgattatctccgttagtcctgctccttccttcccatctaacaactccaacaatttctttgccatactttctgtttcgctttcgctctttgcaagcatttgacgccaaatgagcaagctgcataacacaaatccttttaagatgagaaagtactctaatttctatatgagtcttcttaccaaatgtaacaatcgttcataccttgtggttaccacaattatattctgaatttcagcttgaatatccctcacgcgaaagaggttgagctgaaaagtttccggtagaacttctggtgttaaaccagctacctgattcaccagcttcaacaacccaagcctcactgccaaatcaactctttctcccttgcattctgatagttgaccttatgaaccaaaaagcaaatgaaaacattttagtgctataatctataaaagaaggtatttctagacttcttcaatgagggtaacaagcaaaacctgcagtgtccataacagttgacttggacgtggtattgactggggatagaaagcttccacccgttttgagagaaatacccatggaggatctctcaaccacattcaaggctgaaagcgtattgttgtgttcttcccactcttctttgctagacaaaagagttgatatccaccttcgtgtcactggtagtgattcgtaggcttgagtgggaggtccataacgcttttcaaatgcttttgtaaggtaatcaaagcctgctggtccttgcaaaaagggtttcatgattgctatgcgacctatgcctatctctcgcttaagttcctgttggatatagaataaaaaatgaagaaactgataagtggacaagcaaagcaaaagtatattttttctttctatccaaagctattgctgatgaagaggaagaatgaagaaaaaagagcttgtacatacagacctgaatttgctcaagaatgaagcggatccccttgactattgcaacagcacggaagttaccagactcatcttcagcttcacacaacctgtgaagttccttgagtaaatcccggtgggtgctttcattctcacggtcattagctggggcagagagtttccgcagagtagccaacgcaaactcaagcatctttccaaggtaatcgatatccaaggtgccggagttgagcaactaccaataaaagatgaaatgagaaccaccctctaaaatatataaaaaacgacagacacgtaatatgagaccagagagatgaggcaaacctgtgagagaatgtccagatcaatagtttcagttatttctactttccagctatctggtaccatctggcaaagttcgtcactcacttctttcataaggttagagatgcagctatagtctggcttctccaatttcatggattccatgacattatcccagaaagctctctccatagtctcctttatccttctctgcaacacacatttacaaaatcaatggcaagaacatactataaccagaatttgtaatgagtccaacaacaatgtgcagaactgcaaagaaagcaaaccttaagattgtcctcttcatccttgacagtggatccaccaggaaagttgaggttcccatcatgcaggaactcattcaccatcaactcattctgatttgaaacctcgtccacagtgccattactgactctagagggtccagatgagggtggagtatcatccttcaataaagaacgattaacacgatttgatccttcaacacctatgctatctttacttctgctgctggaactagacacagactgaactggagatgaagctgggcttggagaaaagaaatgtgcgagctgattagccatagggcttccatcctccttcgcctgaaagtactttgttcgtgtttccaacaacgcactttccatgcgctcaactcctgcaactccactcaggtgtcgtactttctctgttaggagttcttgatcttgtgttacctacaacgagaattcacattacacaacaaaaatatcaaaagactaaaaaggaaataacagagagttgagtaagcaaacctgcatttgaattgctttcttatcatgagtgagcatagtgtcaaccccttctggagttagcttgcatttttgaatcatagaaagctcaagctgacaagctgctctaaccaggtcatcttccaacaaccgagcatccttgactttccaaatcacaaatgagttcaaaaaggagcaccaagccttatcgaataagtccaactgagatcttaaggtccgatgttttgattctccacccgaaacctgaacaggaccctcttgaataacgtttatcaataacttaagctccctcacaaaccctttagccgcgttattgagagcagcctcttgatcaccttgaccattaaaaacagcatctggatggccgagtatcataaaggcagaaagaacaactctgacaggatacctagacatcttcactgatgtcccagccacattcctaacagaagaaaccttctttccctttctgctcctcagagtactcggcgtagcctttctccttggtgtggcaactcttttaagaaggtgatcaatattatccaatatggacggttgagaaaccgtggtaacattcttagaagcttctaagcgaatttcaaggcgatcaagcaaagatttaaccgttttaagagtgttcagcgattcaagtagcatcgcaagctgctcaaacggtaatgactcgttaatcttcaaaccatcataagctttcgccaaatccaaagttgtcctcttctgccttacaaagcacctccaacacctaaaaacaacccaaagtaacacatactatcaaaacgctataaaaagaaagcatatacaagaactgcgtagcgcttcattaccttgacagctttctagaaagaagatcagcatcttcctgcatcatatcgcaatagagactaatggaatcacgttgtcttcttctctgacgaagaaactccgatctatatctctttgcctaaatcatcaaacaccaaaaaaacgtaagattaagaaacagaacagataagagtaatataataacacaaagaccaaaagcttactctttgcaatttgtcttcaagtttatccctcattttacttctctctatctcacgctgattagaaacagagttggcaacatgacgtacttgttggacacgagcacgtgctttcttcttctcagcttcaagcaacccaagacgtttcttctcagcagctacacgtttctgattaatcgaagcacgaactctttccttatacttactctctctagccatcctcctcatcatagactgtgacgttctctctttagcacaagcccttttctgatgagacgccttgagaatcttcattctattagcttcagccttttgaacacgagactccacttgagttccaagcttcacacgttccctctccgaccgtatctccacacttgttttcgctgcttgtcttaactcatctaacttcgccaaacgcatctgtgccttcgcaagaatctccaacctaacaatttcaacaatcaaatcaatctacagagataaaccatcgaaagacttagactttgaattgaagttttcaccttttttgttcagcagccagaagtcttgcttcgattcgttggccaagttcttcatcagatgatcgtgaaggacttctaggtttagcacgagcctttctcgaaacgttatgataaaattgctatacagaattcacgaaaagacaaaaactttaagcaaattaaatatagaaatcaaagacttagtcatttcagaggtaaaggcttaatcaggaaattaaaaaaaaaaaaaaaacagaacctgtcttcgtagatgggcatgaagaagcttgtcttcaatatcttgaacagaagatactgtcttcttattactacagtcagacaaaagcctctcacgaatcctccgtggaactctcatcattaccgccggagtattattaatctccggcgaaatatctaaaacgatcgcttccccacgatcttcctccatactttcgatcaatcagtaaaccaatctcgatcaacaatccaatgaattcaaccaaataaagcaattttcagagatgataaaagccgaacaagaagaagaagttgctttgtgtgtttttccttctttcccttctttttattaagaaaatcatttttttttttgttttataagggaaaaaaaaaagactgtttggtcacaaagcgttgccttgttggatcgaaactgcgtatttttgcattcaaaggttatctaagaactcgacacgtaagcgacgaacctaaccgtgttattttattaaattgacaataataccccttttgttgtagcagaattttctgacgctacctactctactatccgaaataattgattacttctagattttcttttttttaacccacattcttgcatgatcttataatggcaatagacttgaattttaaaggtaatcatcgacagctaatcagattttagtaatcaacgtgatcaagttctctcaactcatttttcgttaacgacacgataatatatgctttaaacaaaacgattaaacgaactaggcaaaaaggtcgttggaactaagcaaaactttagtggcatgtatcatgtcatttgcgttgattatctaaattttgttttcattttggtcatcttgtatatatttattcgtaagattattatacatgaaactagattttaaccggcgggatgatttattttttcaaagtaatatatattaaaacttgaaaattttatttttataaaatatttatattttacagtttataattgttattaagtaaaactataccacgaattcatgagacaattgttaaaaaactgaagtttttaattcctattaaaacagcatattaataatattttaaaattttataaatattgattcaaatacatccaccatataacccaattccaaaataaaacacgttctgtaatttctttacccgtcccgtgatttttttttaaagtagtaatttttaaaatttaagaattatttttcatatataaaagttttgcaaattgtatcattctctagtacatttatattttatagtttaattttatatatagtaacattatacatactacataacatttttggttttatataattttttctaaattaggatgatttgatatgtttaatattagtggtcttaaaaaataataaattaaagatttaacccgtattgaaacggtggattaattatattttacttttttattaatgttgattcaaaaacccgtccctccaaatccgtcttgccaaaaacctatttattttattaatattaattttattaatgatatgactctgaattataatctaaatattttagctaataacataggagtgcaccatatttatttaataggggaatgtaccatatgacccgaatgcacttttatccaaatccaccaaaaaaatcttgcaaaaataatatagagataagaaacgatagtcggttttgatagatataagattagcaaatatattagttagcttaaattagttaaagaatacaaattgaaaaggtatattacactttatttgaatatagtatcaaaacttatataacacagagatttgataaatttttaattgttgaatacatttttttgtgctaatttttatgtgattaagatttaattgattttgtatataaaatattaaattgacttatttgtttataatttggtaacatatagatatttgaatatttagtatattttgcttcagtttaggaaatctttgatgacccgtctttagatccaataagctctataatctagatattaacctgcagtataccgcatgtaggcttatattttagttaaactaaaaacttttattgtaaagatgattaaaaaatatataatattattttatttgattttaaatgtatagtaaactgtgagttgtatacgttttgttgatattatctatattgtttagtgtttaagattatatacttgtagtttgattgttaatttaagagtttcacctgtagtatactatcttgtattaatatcgatctaaacccgtcaattctaggattttccagcttgtattaaaaattgaatcacatctaacatgttattaattattgtagtatatataaattataaattttcaatataatatgtatgaaattgaatataaatatttcaaattatgacccgttactcagtaaaaagttttcttaaatctattttttacccttataatattttttcatgtattgaacagtttatatttgtttttaaaaattcaaattatggcatatgcaaaaaaactctaattatttttttataatgatgatattatttttccgcaaaaatagaatcatataacgatgagaagtgaactataataattaataaaaaattaatatgataatttagatatcaaacataatttgttgattttaactggttactttttggaaattaataatgtattttgtttttctaattaaattaaattaattaaaatttagatatcaaatcttatatgttgattttgattggttattatttttggaaattaataatatatttcattttttaattaaatttaattaattaaattagtatttgactttttaatccttaaagagataaattaatttactctttaaaattttatttctaatggcatacctatgtaattacttacaaaaattaaggttacatttaaaatgtacttcccaaataatatagtaggatataaattataatctactgatcataacgcttagtttatagtacttatttgtattagactttcattgtacatgggaaataaaatcttaaaacaatctctaaaccgttaaactctagaccaacaacgaacccaaaaggccaaatgcatttatatgaacaagtttgattactagttccaccaaatttctacaataagtttccttgagatattccatagtaatttgaagttgatttttaattgacatttgttgcattataaatgagtaagatacgccatataattgttgaaagacctaaagcgagtttgagatcattaagataaagaggtagtcataaatcgtttatcgtcaaggtcgacgaaaaaaagaagtaaagtggtcatattcgatttctgataggtatgtaagagagagattaaatgctttctaaaattttatacatgatttggacctcttatctaatatcattcactcaatttatggacgagaacataacaaaaatttaaatacttatcgaagaaggaagaaaaaatatttagcaacttggctttaaaggttattccacttgtcactattcaaagattcgagttttgagcctttgagtaataccttggtcacccttatattgcaaccacgtggtataaagattgtaacgctttaattccaatgaccccttattttgtggacttttgtcatcaattgtaccaagtttataaagatatagaaactgagggcgtatgaattgtttcaagctagacatcaacaaaaaaaatgttatccactttctcaaatctatatatactaaaggatgtgtatttaatctagtagtttaaattatttgtgtaaaatttacaaactttatgttatttaattatagattttaaaaactttaatgaaatccaatgttattaaactaataatttaaaaattaactttaaaatcaattgttattgaaaacagtttgtggagttgattcttattcatcttgaaagatttgagaaaacttctttagttacaaatacacaaattcaaatctcatggttttagatagaatttgaaaagatttctataattttaagaaagttgatgtgattaattgtacaatcttttcaaattccatctacaatcatgagatttgttttcaataacagttgatttaaaagtaaattttaaaatcgttagttcaataacacttgattttaatagagtttttaaaatccatgattgataaattttacacaaatcacttaaaatactagattgaatacacttctacaaaatcatcaaaatcatataactacttaccctccccctcccacccccctctaaattaaccgtcattttaacaaaaactgcatgtaacaaaactttcaaattttaccgaatgtgacaaaactttcaaaactgcatgtaacaaaactttcaaattttaccgaatgtgacaaaactttcaaatgggacaacactttcaaaaacagcaacatttaccacatgtcacaaaactttcaaattttacttttatactttcacgtaatctaattctattaccactttgttagcaaccactccttccccatgatctcaaaatgtatcctctcctctaaactttcttccacttttttttttataagtaattgtaacagtcaaacagatgcattaacttcttctttattgctcttctttctcacaaactcagaagatcttccattttttttttcaaaatccaactaaaggcaattatgttttattttgccaaaatattttgatatatgatgtaatttggcatttattttgtatcagcatagcaggggcggccataatcttagtatatgcatataattgaggctgctcttaaattttagcgtatttatattgtagtgaattctttgtcttgtataatattttggatgtaggacctgaatgttggtacatgaagacaatctaatatttttaaagcagttatcattaagcatttaagcaagtaatgaaacacaacaacacggtagaaatttaagcaagcactttgatgatctctctccttaactcaaaacatctttatagtattgttgtgtttcattatttgttctatgttaattgctttacaaatattacactgtgtccttgtacaaatatttaggtctaatgctaaaactaatttttcttttgattcgcaacactcaaaataaaaaactgatcgaaagctaaccttatgttatactctctgagttctgacacaaacaagagaagaaaagagaggaaagtgatttagatgctttgatcgatgatagaatgagaagacaaaagcttgactttatagctaaagatcaacgtctatgccataaagtcaagcataattcacacaatatataagttgaacatgctatcaaaataagcttactacattggtgaaattatgcatgtgtggatatctcaagaaatatgcatgagatgcattactcttcttttacgctttgtgatttaagatattgtatgccaaatctatgtgttgccaacattgatttctataccaattggttgatacaatgactggaatttatcctttgatttgccaacattgatttctataaaagttaaacaaactaaaaataaaaagggaaaaatatttaataaaaaatgtacaatattaaatttccataaaaattttatatggttaatgttttggattagcattagtccccaaatcccatattaagtaaatccattttgagttttgttctcgcaaaccggtttaacccaagaacccaaagatctctctctatttgtttgccttcttctttctttctgactcaaaccctcaaatcaattctcgcgattaagcaaaaccctagatttattctactcttcgaagtcgatttcaatggaaggttcctcgtcagccatcgcgaggaagacatgggagctagagaacaacattctcccagtggaaccaaccgattcagcctccgacagtatattccactacgacgacgcttcacaagccaaaatccagcaggagaagccatgggcctccgatcctaactacttcaagcgcgttcacatctcagcccttgctcttctcaagatggtggttcacgctcgctccggtggcacaatcgagatcatgggtcttatgcagggtaaaaccgagggtgatacaatcatcgttatggatgcttttgctttgcctgttgaaggtactgagactagggttaatgctcagtctgatgcctatgagtatatggttgaatactctcagaccagcaagctggtaagatatctcttattcatctctcgctgtagctccttgtttaattagctagttgctacttggatcctttatgcaagattttgcgagtgtttgattgattggttatgactgtaactttgaactataggctgggaggttggagaacgttgttggatggtatcactctcaccctgggtatggatgttggctctcgggtattgatgtttcgacacagatgcttaaccaacagtatcaggagccattcttagctgttgttattgatccaacaaggactgtttcggctggtaaggttgagattggggcattcagaacatatccagagggacataagatctcggatgatcatgtttctgagtatcagactatccctcttaacaagattgaggactttggtgtacattgcaaacaggtatgtataattcttatttatcgattttaaaacttgggagggttttaatcatcgatcttatgattcattttttttgtatgtggcagtactactcattggacatcacttatttcaagtcatctctcgatagtcaccttctggatctcctttggaacaagtactgggtgaacactctttcttcttccccactgttgggcaatggagactatgttgccgggcaaatatcagacttgggtaaattcttgtatatatgaaagagcaagttaatttacttttcatccaggtcgtagtttgatatatcctcttttcttaccatttaattgtttacatgatgaagctgagaagctcgagcaagcggagagtcagctcgctaactcccggtatggaggaattgcgccagccggtcaccaaaggaggaaagaggtttgtctaaatggttgctttagcaaaattatttgttatgttctcaatgtttattgactgtctgagatactggaccatgatcttgagctcatacacttgccacttttcaagcttgttcctgtgtagaaacttttcatttggctaattaactgctactatcaacatctagcaacttggattaaatttgaactttttattcttaggcattatgttgactggatattgactaatagaaactctacctgcaaaacactatgttttaccttttctgggtttgaaatttcacaattgagtgtatgtttagtcaaaaatatacagagctattaaagtttgaactagtaaaacagggagactttgatgtatcaatttgtcaacgagttgttgccaatagtctatgtctgcttcctagagttctgttatctctggctgtgtgactcattttgatattgttttaatcttctttacataaaaacatttgttttggagattacattacctaagtatatgtgttgtggaccactttcaggatgagcctcaactcgcgaagataactcgggatagtgcaaagataactgtcgagcaggtccatggactaatgtcacaggtgagtaaatacaatctgacaatgctgatcctatttccccttgcggttaatggatccatgaaattgacttaaaaagtctttcatccatcaatgtgcaggttatcaaagacatcttgttcaattccgctcgtcagtccaagaagtctgctgacgactcatcagatccagagcccatgattacatcgtgaagttggtctattcttttgttttttggctgcggaaattgactatcggtttgacccggtttatgaggcaatgcccattgttccctatatctctagtgtagtatctgcttcagacaaagatctttgggttattaaatgacattaacataaatcgatcattatgtttttgcgtttgactatcttgatttagtggtattaaaaaccaaattccagatacacacgtgatgtcacagtaatcatgtgcctgttacggaaccatgtgcaaaaaattgacacaagcatacaaatgttctccaacgattgaagcaacaatgattctaggccctcttttctttctgttcttcatcacatgaaattcatcaggatgttgtttttcacatttatgtttgaacagcatttcttttgttaaaagcgaacaaattctattctaaaaccgaaattgtcattacaacaagaccacgatttaagggtactaaaagcggattaagatttctgcattcgaacaaactgactactaaacgaacatcaggccgagaaaacagtcggtaggaagagataacgtgtgaagttacttgagtaggattaagagtaaggtagtagtaattgatagaagctgcgtggggcttaatcaataatgacatcctcacttaaccagcattactggaaaacaagaataagaaaccacatgatgatgtcaaagactttttgggccttcgcgtatccctaaatgggcctatttacggcctaatacttgtctaatgtatagttgggtagaacaagaaggtccgagagttcgaagcttaagccattctatcttttctggggatctagaagatccaaatgatcaaagaagatattatgaaaatttattctggagattagttttgatatattgtgatttgtttcactacttttgttcttttagcattttctcgaaatgcatttggattttagatattctctagtccatgtttcaagcttcttggttaacacaagcttaggttgttaatttgcacagacacaactgttactctgccctgaacaaggatcttatctctactcctctactccatctatatcatcatgcttgacaccaggaaatatatgatataagacatttttaaaatgatacaattgaggaaggcatgaagcagtgtttgggggtagtgtcttagactcgattttcatcaacctcaatggtttgatgggagcagcagattgtatgtaattaagctttcattaagggagtttctttccactagtgttttcttacaagataatgagaggacagacttgagaggtgacatggatgggctacaacatgttttctcgcaagatgttgactctagcacacaaccacgtcttaatgttttcagccctagaaggtgtcaaactggactgagaagcatacattgggaaacatgagaacatgaggagatgtgagtacagtgttcagtatgaatatttccagtatccttatgaacatactagattcaaaaactgaaaagcatgaagttgtatgtgttgcatagtatattctaggaggttatgagatgttactccccaaagtttttaaccactagtaacagtaaacagagacatttgagtaatgcatttttatttaagaaacataatctgagacttgaggacttaagtgactaagtctttaagaattaagatactaaacatgttgatgcaacaaaaaggcttgcagggttttgtgctgatcattttgcttaattatgcaatcgttttttcagtctttcaaacagaaaattgttttggtgcttgattttttttttacattatcctaacagacattttctttgtcttgttgattagccatccttaggctaaaacaacataaactaattaagctgatacatgcatcagcttgagattggcacatgagtgattgatgatgatgatgctccattagcaatatctctcaaagagaaacccattctctcgagaagatgcaattgcaagaaggtgagagatgacaaatacgacatgatcaccatctgaaacaggagatcccattgggatctgcttaaaaagccacctccaaattccataaaatggggtagcttttagagcagagggagagaaactaagtgctgagattagccaggagcatcctttaaaccatagaatggctcttgacctgagaagaagaagatgatgatatgaagcttgatagctaccaaagactctaagcttctttaacggtaaggaataagaggtggttgaagcggaaagcctgttacgcctgtggcacaacaaaacacactgccaacaatgttagtgtatgtgtatatctttgttgcctttggtgtacacatgtctattatcatatacgaaccttgttgcatagaaaaggtcggaggagagtaatggtgagggttataagaagacaagtgatgataaaatggttgtggttgagagaactggaccccaccatgtcctccaccacaaggataaaaaggagtagcggatgcggctgctgcggttagtccaccgcctccgctgtttctgtttccatagactccgtattgtcctccagaagtgcagccgtacatgccgtataagttctgtagcacatcgtattagtattagattaaggctatgctatatgaatatatgatcatgaacaagtaaagattcgttgagacagagaaagattcttaagttcgttatacaaacacttatgtcagagaaggaaaaagttacggaccgtagggaatgatgagtagtctggcgagtatggagagtacctgcgaatatcaaatcaatgttttttgcttttacaaaacaaattacactttaagagtgacaacaaatatgaatgcacgtggcacgtggtcatgagacaggaggaagcatgtgatgagagagtaaaatgattggtgaaagatggaatcagtataatttttagttttacaagctgtccgttgaccactttgtcagtcatttaaatctctctatagactgtgaaaattaatcgatctattactgataataataatagtgtcggtccacaaagaaaatggaaacattagaggacagccagctatgtaatgcaattgcattgttcagtttaatagacaaatatgagttggcattcttttggtctcaaatggtatcatgttatgtttgatgcatgcatgtactatcatcatcatcatcattacatgaaaaaagagggaaatagaagagtgtacccaaagagattgagagggagatggggatagtgagtgaaggtgggtggttgtggtggtggaggtggtccaaaaccagtctgcattgtgctcatcatcactctcatattgttaatcctgcctcctcctcctaacacattcaccatcatcatcactatcactttgatgatcgacataatggtccattaacatctatcaccaactattaatattaaggttattattaattccaatacttgaccacacaaatttctaaaaaaccaactttgtatatagaaaatatagctaaccatatatagtagtagtaactaagaattatcctttttcttgatctaactcatagcatcatgaacgtgtatatattatacacacacacacataagcatctagacttttgaaaagaagaaagatagagagatgataaccatggttaggagtggagggtttggatctttgaagaccgagagaggcgaggttgcaatttgctcttctcccgtcgatcaccggagtagcatccacacaagcactcctcgccgcctccgcttccctgaatgtcacctgatcgatcatcatcaccatttaactttagtttattagttgattcctcttttaactatataatatacacaaataacatccattctctttctacatataggaacaaggttttgtataaacgtacgaatccgtagcccttggatctaccggaggccttgtcggtgatgactacggcttccaaaatctctccaaactgctcaaagtgcttcttcatcgtctccttatgcgtctcccaagctaatcctcccacaaacaccttcgtgtatgtcgtgtctcccagccctattcctcccgccattttttcctctccgatctctttctctctctctctatattagagtgaaaacaaattagcttatcttgagctaagtctatctctatgtttcagtactagtgggattgtgagagacacaaggggttaatatgcaagaagtaggctacaacaaaaggagtctatataaatagtaggaaagagattagagatctacttaatagattcataagataagttttttttagggttgattgatatgtaatgagaacaagaagaagagggaagagaaaaaatgaaagcggaaaaaataataattaaagtgttatatggagaaagataacaatattgcccacattatctaacaccctcgacgcatttttttgctcgtgtctctcacgcagcctcagctccaaggatctgtggtcgtgacgcgagtgaatatgcgtgagaattgaggcatcgggtattttattttattgaattatcccctgccggtacgttcaattatttaaagggaaataaaggaggaaaattagaaattaaatgataaaaatgttttatttcctcatttttctcgagctaaatacgtagtacatatttaatttttgttattttggaacaactcacatcttgttggtcaaatttaagcaacggttgtagttgtaattgtacttgtgtcattcattggtatgcgaaccattgatcttattgatgtatagttgtggttgtatacaaaataatacaactgattttgagaaaattgcaggatttaaactttttcttttggggcaaataaggcagttttgagtttatttgtatacttgtggagatgacgtacgattgaggtatcagttgtatcatcacttgtaaatcaaatttgagtttctttttttgcatggggtctttatttctcgaacacatgtttcttttataatacaaattttaattatcatggaagtattattctagttaattagtcattcatggtctacaaaacgaagatcattagagaacactgaacactagaaccatttactgtaatcccatcaatatagacaacaatttcttgcaaatttcagcaaagtcatcgcaatacaaaatctaatatttttccttatttgttgtttgtccaattttttctttttgtttgtttgtttacaccttatcatttacatatatattcgtaggggtgggaatatctagttgtctacaaatctaacttcctagttttcctcgtcaacggatatgttattgtcaccaatctgaaaacaatatacatacacacacaaaaatgttatataaaccaacaaaaattcgtgctttcatgcaataagtcacatatgttacaaataacgaacatggctacaccttttctgcttcttctacttcctttgatattctcaactgttctccttcttaccatcaccgtaacacaatccaaaccttactccaaaacgactccgtttcaaggaaataagccggataaactcacacacctccacttctacttccatgacatcatctccggtgacaaacccaccaccatcagagtcgctgaagccccgggaacaaactcctccgccactgtattcggtgcggttcttattgttgacgccccggtgactgagggacctgagctgagctcgaaggaagtggggagagctcaggggttgtacgcatcgacggacatgaaaacgtttggttttacaatggtctttaactttgtgttcacggaaggagagtttaacggcagcaccgctgcgttgtatggacggaatccgatactgctggaggagagagagttgccgatcatcggaggtaccggcgatttcaggtttgctagaggatatgcactgccaaagacttataaggttgtaaatatagatgccgtggttgagtataatgtcttcatttggcattaacttttgggatttgtttatgtaattcgaaaataaattgtttcactttgctctcttttttcttttggttgtggatctccttaatagtttaaaaggtttagtttgaaataaatctcgacttgagatgtgtaaatgtatgtttggacgtgtgagtgtcttcggacgaaagggacggtgtagcaaaattttggttagtgaattgtatgtatgttttaattatggttgttgttaggtcatgaattcggttcgatcagaataaaccagaacggtttgaatttggtttagatatgaaaatttcgtcaaatttttttttttttttttctggccggtttcagttcgaataacaaaaaaatagttctgattaaaatactataatttgtggaaaagagagtacaataatcaatttatctaaaatgactttattatataagatatacaacatattcatatatattcacaatatatgatttaaaattccaacatgctctgaaaaggttcaacttgtataagacacaataagttgtataatttataatagtcaacttgtaaaagcttgacccaataaaagaaaaatcttgacccttcttcttacacaatactcttttctctatatggaatcttgatcacttctttttttggtatgaaattttgatcacttcttctcggttacttgtatgattttgtttatgggccttgtcctttgtgtgatgtagaaggcggtacaaaaattggaggggccatggaacgatgaggaggaggaggagagggatgggaaacgcaatccaaacgcaaattgttacctgcaccacattgtatgattagtttctccaaacaaaaaaaatctataaatataataacaaagaaggtgaatacaaatataagttatataacaatatgtatatagacgagacgagacctatattataagcatgaaaatgagtgtaaaaaatactaacgtaggttgcgtttggcctcgcctagtccaacttgtgaggagatagatagaagcagaagaaacaaagagagaagaagagcaactaaatttgatgtttttgcagccattttgctaatttagtgttctactctctctcaatttcataacaaagactagcttcaggatgatttatataataaaagcttccttgaaatgtaaaaggctaaaggataagcatcgctgaaatgtactagtcgccaactacatttctattcaacgcgcctttaattttccatacgaaagtctcttggctcacgtcctgttctgtttaaatttatttcttccacctacttaggttgaattttagacaactatacaaaccatataggatatatatttttgtcatatagccaaatatttatctgtgagtacaattttttcgtggttttgtcacaaattgttacgaaaacaatgacagtgattaagttcaatccgtagtcatctctgaccagtactaaaacacgacatagtcataacatttcttcgtgattatgacaactgatttagccacaattgtttaaggttaattggcaacagatttataactttcaactgcaatggtgatttagccactgaaagtagtggaaaattagctatgataaatacatggccaaaccactagaaccgacaacatatatatataaccaaataccgttaaaatatcttaaaaagtgatatgatcgaaaacgtaattatatgaaatcacaatacaacattaatctcgagtctcttgagtcttgacaattatagtttcttctccatcacttgtcaaaaagtactttggcttatggaccttttcctttgcgcgatttagacggcggcagatatataggggcggtgggagggcgagggtaatcataatccacacgctgttcttgtccttgacctgcttattaacaatatatatgtcattcaccataagcttttaactatctacatatgatttcttcttcacataaaacataacttttaacttttctttaacatatgattatataatgaaacatgatctaaaaacaatacatctacaaatccagacaaagatttttcatgaggaaaaaacagattaatcttcacagttttacataagaagaaaatgatgaagatataaagatgagagactgatagaaagtcattggatatgtaagcttcttctttcagaaaaaccaatatataggaaagaaaaagatcgaatatgtactaacgtttgttgcgtgtggcgtcggcgactccaacttgaaaggatatcaataagaacagaagaagcaaagagagaagaaaaacaactaaatttgatgcttttgtagccattgcttaaaataagttgtcgatcaaagtctcccacaaattcaatatataacgaagaccagctcctctgttatttaagaaaatgaagcctcgttgaaagttgtagtactcacgggtcccttgtacccactcacctactatatccactcaacgcacttactttcacttttacttacgtccgcaaaagaattatgcccatttttttcaatttttctatagactatataagaagacttcattgtatcgaatacaatctatgttacaaattaggcattagattattgagaaaattgctaagtatatgtatgtgtgccggttattgaaaaacaaggtatatttcatccattggtaacatgactctacagtgtaaaaataagaccaaaactctcatcaaagagacaaaacgaacataatgaatgttgagctaatcaataacaagagccaagccccactaccggtcttctctgctagaccagttcccataccaatcacaactgcaataaccgcaataatgccaaaccctagacatacggtgaaaaccgttaagcatttcttctccatccactcaagtcttttacttacttgctcaagactctgtcttatgttttccttctctttctctgctttctccatctctgcctccactctctttcgccactctttcatctcctctgcttcactcaccatcccctcttgcctttccttcataccttccaagtcaagtctcaaagccacaatcgccttttctctcacaccggcttcacggtccatctccttgaatatgttcccgtatctcaggttcagttcctctaagtatctctctagaatcgataggttcaagtccaatgaccttaacttctgcatcagtatcttcagtactgtgtcccctggcattctgctccctggctgatgatgcctcatctcttccacgggctctgacagcttattactactcttcgccattgatgcttcagtcttcgctaacatattctctggtggggcttccttctctttctctctgtgcgtgctcttatcagcaccatcatcgccttcaagtgactctatttgctgcattggcttctccttatgctcagaatctccttctcggggtttgtatgcatttttgttgtcctggacagatatcaaatcctccagcattcgttctacggcatccacaccgtagacttctattaaactcaaggtgcagtagaattctgaaccataatgactaataaagtttagctttaagtatctcacccactttggctcaagaagtgtgaagttctgctcatgcttcacgtttgaagccgtgaagtttcccatatgaacccaggtatcagtgggataaactagggtgccttgaagctcaaactctttcagattggaagagtaatgctcaaaattcgcgatcttgatggtatttaccaaagtttcttctgaaagttctacaacaacaaatttaccttcagtagaacaaggatttctgaggtacttgtcattgtccctgcttaggatgcttgcagccccctttgcttccttgttggaagacaagacctttgcgccttttgaagcagatgcataattgtactctttccctccaggctccatcctgtgaatcacaccactgacctgatctgataacgatttgtttcgagaattggacgctctgctcttgaactcatcaaggccaagcggaaccgcacgagatggttgatcaacctttgaaacgttgatctcggtaccattccctaaaactgttttgttcatctgattttgctccaagaactcattgtcactgctttctgtatcattccctgtgcctgtcttgttcaattgactttgcttcaaaaagttattatcgtctttgccttctgtatcattccacgtacctgtattgttaatctcacttttcttgggaaagtcatcatatttgcttcctgcatcaatccctgtatctttcttatttatctcactttgcttcaaaaggtaagtgtccttgctttcaatatcattccctgaaactgtgctactgatctctgcttcctgttctttgtcttcactttcttcagacaggtttacatcatcattccgactcaaatcagacgtaacatcaacagaagcagacgctaaggataatggtccatcaaagggcacaactttctcatctgactgaccatcatccggatcagccattcccatagagtcgttcaaaggctcatctacaagtacacaagagttggttcttaacatgctttaaggtaataaaacgacaatgatgtccaccaaagaaaagaacttgaaggttacctttggcaccatctccatgactaatcaacaaggtggaaaagaagagaagaacccaaaggagaaaaacaagagacaaagagactttgtaaaagctgttccttccattaaacttgttcacagaaactcttcttctagttctacacgacctttgcattgcacatccactaaacgattacacaggacacgccctgttaccagcaaatacacattagatgtcaaagttaatcaacttatagtataaacccagaaagacaaagacttttaataaactcaagctgcaaataaggaatttgagttccaagatctgattttttggtgcgtggattacacaatagaccggaaaagtgatcggagaaagaaagaatcacctgagagagaatcgaagaaagaagatatgtgtgatcagcaaacaacccagaagaggaggaggattgggtacgctaacgtagacgtctccgatgagtctctaatggattgaatctaggccaatgattttccggcgatatctttcgtctccgcatcactaacgacgaagcgtacacggttcaccagtttcgatgtttctgggaatctatatgaagaagaagaatcacacgaggtttttaactgcggcggtgaaagaagagtcaaagagacttcaaattgacaaaaattttgattagagagagaggcgaagaagaagaagaagaagatggattggtccagggtttacaaatttcggcaattttattgattgattgattttattttagtttaggtttattcctttttacggaaagttacaatttccgaaattttgtgctctgtgtttatcgttttccatacatgtatgttgaactcgtaactttaatggatttcataaaattaattagaagtgttgatgagttagttataacaacacaatttagaattggacaatgatgttaagcctagagttctcttttgagttttgggttactattttgaagcaagttttgaagactaataaaaaggtctatatataaatatttaaacaaaaaaggtctatagaatgtcaacttcttaataaaattgtgaactgattattgggactatatgcctcgacaaaataaaacactttaatttcggacagggaaaacgacaaaaaggtaagtggaaaaaagagaaagaaggaagatgatgagctgtgatttgtgcggcacgttaacgtgaaagccagctttcgattgtgttcccttcacagctggcgattttcaatccttcttcttatacgtcgttttatacttcaatatattgttttataatcttttcggtttagttaactcatctactggacaaaatcattcttcatcttattatatcatcgatgaaccaaatgaaaaagtcttcgtagtgatttatttagccaataatccgaaagttacatattcaggaaacaacattgtcactgtgatggtagttttattggaagcatggcgtaaaactcgctatataagttcgaccattgccaagttgatattgatggtgtcacttagtttcgaatcattagtcgtctcgaaaaagggttaattacaccacataagattaatccctctgttcagttccgtaaccacttaagagccaaagatgggcgtttctaattagttcattaatgatggacctaaaagcccattagagtttacatctgaaatagccttacccattacgcggtaagggttttagactaaccgatttatctaaccaacttttcaaatcaaagcaaccaactttaaagtgagtggcgatttacggcgatcggctggcggcgaaatacgccaatggtccgacgaatgcggcgttgatgtatgtagctggctctgatcgggtgtaatcgtctctctggtctggatactcatcgttttgattcggtcctccgacaattgctccggttaatatgttagggttagggttttgtgttctgaatgattggaatccgccgttacagcccagagaattggaacggacggctcggctcgggagagaggaacctctgtgatggattcttttggggaaattggagctgaatccaaccatgtacgacatcttcattggattcacaccgaggacgtaatcgacttgtcgcttcgatagatttatcagtgcgttggggacgattagtgagtttccgcagttgaaagtttgttttgtggatttcatatatttggcgtaggtggtgagcaagaatgttattgatgtcacgtattgtagattgctctgaggtagtttgtacatcagtccacctgaaagttatagcttttagtatttgagtaattgaaatgcttttggagagaactctgtgttgagtttacctttagtgtactttgttgacgaggatggagaatttggaaggatcttacacatgaaattctcagctgcttgcttgtagagttcaaagttgttgtctttgtttagtactgctcgctgcgaaagaaatgtgtttgtaaatcattgaaggaaatggttaagttatgtctaggaattttaaggattgagacatactcgtgagagaagaacataggcaccggcgtatttattgtcccaactgaagatgtcaggctgatctcctcctcctaaggattttatgaagtttgtgtaatacgggtcgttggttgctctatgtagccatgctgctccccatagtagctcgtcctgatatcataagagtagttaagttttcaacgattcattgatatgtctttctcagttttggaacaatgtaaacatatgaatctctaccttgtagccagagtaggagcagtagaacggacagacggaagaggaaagggaattactgtaagcgcctcggtattgaatggcaaactgcatgaccttctttgctgtcgccaagagcaagcgagagtacttgggatctactttcctgaaaaccatggagcttgcagctagagcagcagcggtttcagcggctacatcagagccagggtttgagggagatacagagtagactgtgcgaggagtgtccatatcttctggtcgttcccagcacttgtggtcaccattaggatctcctactccaacgtaaagcttccctggtgtagccctggcacatttcagtagataatccgtggcccaacggatggccacacgggagttctggagctcgggtcccatcttcttaccgtactccaaagagctccaggaaagcatggttgtggtgaacgccatcgggaaattgaacttcacattgtccccagcatcatagtagcctccggtcaagtccacctgcaactcataccgtgttattcagatggatttactatgcttttactacttgactatgggtatacagttttagggtcttacgtgagcagatgagccatcagagaggccagagctagacctccatgagagttgttggtcactagggaggcgaccagaccgctgaccttggaaaaagagtaatgactttgagagtgcttctctgtaattgggacttgcataggtattctccagtgaaagcgcagagagaaggaacacaaagaagaaaggagaagccattcttgttattgtgttggcttgagggtacgactttatcacacacgtatatatatagctagagaaggagaccggggctgatgagattcagagcgaagattatggctttttgaaattcagcttaactgctaaaaaaactgttcttagttacttcaatttgaatttcctttttaattaatattttatagaactgacaagtggaggattacatgtattattctgtaatcttcttaatatgttcaatttttttttaactaatagtttgattaccacataggtttgtctatatgagttcaccgacacaaattggtaatttcttggtagttttgatgtttgatacttatcttttttaccacagtaaactgtaatgaagtgtattttagatagtggcattgcgtaatacgtacgattaggggatagataaacaatgtcttaaatcttgataatagggtagttagttaggtagtatttagtttagttaggttagggattttggggattatgatttagaaaaaaggagggtacgtaaatggcgccaagataacggcgacgggtctataggaggacttcaatttaaaagagtttctcaagtcaagtgtgattaacacgtaaatgattccttaatctctttattattgtcttattgtataatcttttacattatatacatacaaatgaaaatatcgaactcactttcttatatatatacatattcttaaataataacaatggtaaaatgaagttatttgattggaaaacgtacaggaataccatctcgtagaagatgaaattgatcttaattaacacttaacaatatccataatcttcttactctatcacgattcacaagttaaggcatgaaaaactcaaggggttttgcataaaagacggctataaaaagtttataagaaaactgagatttaaagttaagcaaacaaaacacactttctctcgttccacaacgaatccctacataatatttcttgattcttgtagcaaaatctcgatctgggagattcacgtgtaatatgataacatcaggttgatcctttttttcaccccctgcgaagtctttggtaaatactaaagggaatagtaataacaaacatttcataccaaaagaaaatcgttcttagctttttcatcatcaaaggcccaaacatatcgtttagtaacatattttctaaaatgatatatgttctaaaagaaatatgctggctaatttggttaatcactagggactaagtaccttaagaactcgagggataaaaaaagggtacaagcattgaattgatacataagaagatttcaaatctcttgcaaaacatgttatacataactataaatcatcaatttagaaggagatattatgtacaacgagtaatcaatgattcttttctggaacatattccaaactggaagagatatatacactatgttgatgaaaacaattaagatctcctatccattgcactgcacagaggctctatgataaatcacagacgagattagaatgactaatgaagaaaacaatgagcacatgcgtctgttttctcacaggtactgtcttttacctcaatgtctcaccaaaagctagattcacaatagatctaacaaagatggctgttcggtttgttgctgctttgaaccatttggcttagagatagatgtcccacttctaccccttccccttcctcttcccacagctattgaaggcggtggtgcgagtttcatcgcagattgctctgttctgcttgaactgaatatggagctgatgtctgcttgcggcttctggttaccatatgaactgcttccaaaagacggcattccttggttctgattctgaatcccaaaagaggtcaaaggatctgcgttacttgccctgatacccgaagtctcttgctgtgatttcatagaagagagggaggcattaccaaaggcccagaagtcgttgttagttgtctgaaactgcctaccgtctgttaaattgtttctcaaaccagaaccgctgttgttgattggaggttgagtggtagtactgttatggaaaccgccagaggcagtggaagcactgttgggccgtggtggccagttagcaaaagggtctagttcatcaaaactcggagttgttggtgttcctgctgcgtttatccgagtctcatcattagctggctgagcagtggcattgaaagattgtcttggaggccactctaggtcaactgcagggcatgttgttggtactgatgtccggttcgatgactgtgactgaactgtagaattgttaaactgaggagagtttgcgggtccaggatctcttggagcagaaattttggtcgggagggcccaatcttcatcccatgctggactgttctttgctgcagaagcaaccttttcagtttttttggttggtgtttgaaactgaagcccatccgccacacagcctggttttacttctgggactccagaatcatttacggtaactcctcttttttcctctattttcctgttcagtgaccagaggatagacaaaccagatgttgaaaacaattacaacagtatgcagttataaggggaataagaacttggaaacaggacaggattggtcggaggtatacctgagaatatctttgacaaatagaatatatttggcaaactgttggacattcaattgttgggcagtgagaagtggtataatcaggggaagtacgtgttctgaagtgaattcaactccatactagaaagaaatgatggagaaggcactatgaaaaatattgaaaattaagattttcaaacatctaatattattgagaaagtaaactacttttacctacctgcttgagaattgcgtttgcgattgcaagagtacacataagggtcggtgcagaacgatcaacagcagtacagcgttgaattgtttgcagaatttcagtaacagcgagtttatcaagtgtttgaaccagctctgctaagcaaagcaaagcatttactctgacctgcaccacaagacgttctactcaaaactttatttagaggagctcttcattttatcaatgtatttctcaaaagacataaaaattgaacaaatcaaggctaacatacggcagcaactgtggttttgagagccaagccatgaacacgaggcaaaattgcttgccttacaacctgcaatggcaagttaaaataaataagaactgaactgactcacccatacgacaaatggaataactttgcagagccaaaattaaaaagcatgtgacagtaagcttgtgtaaggcacacatcaatcctgaagcttatatcatcaattcagataaaaatcatccaaaaaaaatataaaataaagtatcaagcattacctgaccatcgagttgtttagcaacagatgtagatcttttcagaacttcctcctgtatccggacatcattatcattgtaggctcggagaagcaaagggaggacatgtgatacaagatgctctgcattagtctacaaatttatacaaaaacacaatagtaaagatctgagggccgagggagtaagataataaatgaataagagaaaagtgataccattttaagcatatttagaattgtagcaaagaagcaattagcagttagcaatagaagtcaagagagaaatatgtgtcagctttaagaaaatgaaggttattggtgtaagaaagcataaggattcatgtgtgggactaccaattatttaaaattataagtaatggcaccagataagtcatagataagtaactatactttgcacttttattcatttaccctatcccattgtgtcaaatcggtagaatttagcagacactaaatacgcagggttcaaaaacatagttccagttatgcatacatcacatagttttagacttttagttatgcatacatattggttagagatttaccttgttaataattagctctgcacgctttataagcaacagtaatgtatcacccgtagcagtacttaagacaggaacaagggctgggagcgttgtcaactcaaagtcatttttatcctgcaaatcattatttaaggtctcaagcatcattaaagcatgagtaaagatctaaaagaaattcttgtccaagatcaatgcaacttccaagtaacacatgacaggttgataatgccggtatttatttgtgcaatcaccatatgtacaactgaaataatcaggtctaagtatatgtgcatgtgataggtcatataacacaagtaataagaaaaacaaattttatatagaatcactggtatctgtaaacctccaatagaatacgatctgattgacgaaatgtaagtacttaagattagaaaaagcacctgagactctgctatagttagaaccatgggaagaatcactggttgcataaccaaattcctaagttcagcacaaagaggaggaagcacctgcttgacaaaacctggtttgattagttgttactaggcaaatcacttgagtaactgatttgttttctgttaagtaacagaatacgcaaaagaatccagaaagtgactaccttataccgtaatacacgagaatcaaagtctttccacatatctgataatgcttttaagaactcagacttctgcatgttgtctctctcctgcaataaataaaaaaatgccccaaaggttttatatgtttccaactatcaaaatcacgtctgtctgaaacgatgattaaaatttaatatacatacaagcatatgatcaaggaaacggagggcacgcaacctagtgtcgcttcggaaaaaactagatcctgcaggtgaaagttcaagttcaagatataagtgtaacaagcaaggaggtaaagtttgtcacaagaaataatcaaaccacatgaagctcagtattcctacctgtgaaatctaaagctgttggtctatatgactcgttcattgatagcatccgttgtaaatcagataccaagtccgagggtatagatgagaaagtttcatttgttaaatagttcaatgtgttcatgtactgcaaaaaaattgcaaggtaaccatcatcagtgacggcaagaacagatattataccactttctacaggacaatatgtaaagacatctaaaacagatactaatgagcttgggttttagcaataccatcttgacattgttatgacaatcaaacaatggtttccgtgccactaaatgataagtgaggcatccgaaactaaaaatatctgaagaaactccagccgaagaagttttgctccgcaccaattcaggtgcagtataatttaaagatggttggagtggcaggattgagtcctcaacatcatattcctgcatagatccatgcataggatattcatctagataccagagttgaatcaaaaaagttgtatgccaatctagtaatcgatcataattcataagtttaagtacccacagagtagtggaatgattgcaagttatccaaattcccatcctgtgcttgtgaaatagcaaagccaaatccggcaagcttccaggaaccagccgaagtaataaaaacgttctgcaaatgaagttgtacataaaccaaaacagcttcaaggaagatgaacaagcattgactataaatttcgaaaagcaacctccggagatacagcacgatgaataagatgggcgttattatgaagaaagttcaatgtctctgcaatttggagaagaccatgcttcacctccaacaagctcatctcctacaacaattataagaaacagtaaactatcttccatttgctcactcaattgctcaaattctaacgcaccatggacttaagatctttgggaacgttatcaacattttccacattcccaagcgcattagccacggatgcgaagagcggctccgtaaccatagccatagcattcttattctcatcaagcgcctgaacaacatgaaccacaccgggatgtctcaaccgcacaagcttccccgaatcagcacgaatcaaatcgagaaacgcatcttcagcagctttagataatcccgccctagcacgagcctcagataaagcgcgcttatcaagcacccagacgcaaactgttggatactgctgaggccgcgtggagtcacgtgccttggcggagtaaagcttccaagcgagaccaggaccaccggaaccgatctgatcgagaagctcgtagtcttgtagaggtttgggacctgtaacctcctggactgtggtttgaaccgtcttctcaatcactgcagccgttttggctagtgcttgcgttagcgttctcatattaatcgacatttttttttgtcagaatttaactgtttctccaaccggtgagtgaagagaagcgattccgacgaagaaaggaaaagggaaactgtgtcccgaagaggaagatgatagcagaaacctgaatcgacgaatcgtcttcttcccaagaccttctcttagcgagacttgtgtgtatgtatgtttgatttttcttctctgctttttttactcgtttttctggtttttataatttattatttttaattattagcgaaacgagtccttcgtcttgagaagaaagtattacataaataagctaaagtgagactacaacaaggtattagaggaacccatagttacatttgtccatgtttaactgtctcaaaggcgaaaatgcctatagaactacacgatgccttccaccatttacagtaagatgaagaacttttgaaatgttgccgattcgaatctctctacacaagtctagagacgagcttgatgaagctatggcgatcgaacggagatccttatgttcttcattatttgtagcaagggaaactgcgtgagctgctgtatgtactgtaccaactctgtgtttgtgagggttagaggtcaagtgaaaaaaagccaattgatgcggaacaagatgggcttcttctgctaccggttaactaaccaaccgggttttatcagaacatctcgtttgaagtcgcggcctgttactgactttgattcacccaggcgtcggtaacactgagaagaaggaagaggaacaacaaaaataccctcagagaaaagaaaccgtgcaagaaagatatacttaatccctaatgaatttggatatagcatgcaacagaattatattgtaagcgggggactaaccttgtaacagacaatggtatcgtcggggtacatagcaaataatttagttcccagacgggcatagcaggaatcacagaggctctcatcatttatctgcatgtgacgtgatctttcttctaatcttgctaacctcgagtctacatccaatgcacgagagatattgtgtacgatctgtaacaattgaattcagagcattcagacactaaagctatacccacaccacatacagattgaaggcacttttaacagagtaacaactttttgataagtttatctatgctactttcaataattatctcttcttagcatttaaatgtacatattactgttacacatggcaaatttgacaactaaaaacacacaattggtaggggttgtgaatttttacctggccttgacgatgatgatgaacccgagccctcagcattctcaaaattgtatctgatgccagttttaagggcatatcaggagacaatttctgcatataaaaaaagatatcagctctatcatcaaacaactaccaaatgaaaaagctgtaggataagaggcaatatcagtgtctttttcacatatggaggaggactgggtttcttacgtccaatacttgcaaaggatcaagggattccccgtggttgtggagcagacgaacagcagccttgaacataggttctttaccattttgaggatccaggtacatatcaagcaacctaagataaactttttgtttaaagggatttcacaaggaaaaaagatcatacaatggcattcacaataagtaacgaaatgaaggaaaagaacctactgcataaatgcatctggtcttccaatctctacacaatattgctctgcagctgcacaatcctcaagcttcctggcgcccaaccagagaagatcttatcagtaaccacattcaaattcacaataaaataaactatatttgctcacacaatcagatagacaattcagttttgttctttatcacttcttggtatttaaatcaacttacagagcaagaatttggaggaccaatgtctccttcccaatccttcggtataggattgcctatcaaataaaaaaaaattacacatgacaaatgggcaaacacacataattttgacagtaaaaaatccattgaataaaaaatcggtgcaccaacataatcatgaagcatcctatgtgcgcatacacatctaaatgacactttttaagaaccattcaaaatcgaaggaaacaaatttgacagacaaaccttttccaaccacagttctgatccttctaccaattccaagatttcttcaggatcatatagatctgaagactgcaaaaaggcctgcaatctttctcgtacgtcaacttcaaacaaagaaatacttccaacattgctatcatgtgcctcactaccatttggaacatcagcttcttggataccattttgaacttcaacacactcaagtgctgatctggcaagtgagagagcatacgatgtatgcagctgcgggtcagtgtagtctctttcctcaatcaaccattggaagtacctggccagtatataaggtcagcaagaaaaaagttttagaattttcccaacttcgctacaacaaactctggtggactttcctcttactagtaaggttttactaaaattcaactgggtgaaatttatttatacggttagtaactatacctctgtatgatttcaacctttttgggatcaatagcttggatcacttgctctgcaataagattaagaaacacagacccttacatcaatcaagactttaagtatttaatcgaccattatacacataatatcatatgccattcaataacccaaaggcgaagaaaaaaaattgaactatgtaagtttttttacagcaattctggaacagatgcctatattaatcttaatcttaactatattgatgaacagcacactagagacatgagaatatatgcacggataagattatgtttcctaaacctaaagcagccttagacttcttgcattaaattagtcacctcagacttcagctaagccatatttcatcaatacgagtccagaataaatcacaattcaaaacctacgaagcagttggcaaaatgtttctaaacagaacgaatagagatcaacatctgactcacaatcaaactcaaatgccctgttaaccctgattcccacctggcgaaagctcttctgtccttttatctgacgtcaagacttggatagcaaacaatgggtttacatctgcaatctaaaaatgatacatccaaaatcatcaattaaactcacaagatgcaaatctttattgtacaaagttacaacaacttgggagttatatcatatatatgtcatacccaactaagatgctgcaatgccagttctggatcacagggttcctcaagaattctggctgcttctgcggcagcagcctctttaccagataacctaatgagctcgttatcgtgtaaatagggtaccaagtcatctgagtcttgccatagaccagatgaataattcttcgtaaagagacgccaaatagcaagagccttcgcacccatccccttagttgcatagaggaatgcaagtgtccgtaagtgtccagattcagttagaagagtctccaactcctcctgcatcgtccacacaagttgtaaagtcctccctcaggcaaccatctgacaacaagctctttgtttttctatgtattaaatttctaaggatccaaaaaaacgtaatttccacgtcgtacatccagatgaatcctaaagtactacagctaatattttccagttaacagtgctacgatgtaactttagggactttgttcgggggaaagtcagcatcctaaatgaatgtcattgatatactgctttcaaatacagtgctttactacactgagactcagctaaataactgcaaaactggtactttggtacaaagtacatgcatacaaaaacgcacctagactgaaaatttgttttcttctcctttttaaccaatctctagctatcttgcttaaatagttctgtcaaagaatagatttactagtccgaattacaggtttctaacatctttcagttattagtttgtggtgccacctatcgatttgatgttatgaaattatgaatgcgtaaattatattaactaaaaacacataccacaacacagttattaccggaagatgcaagattctccatatcttcaacacggtttaatgctctgtaaagaagcattagaagcgtgtctattccctccctcactgggagagttaagcccttctcacgtgatatctcgaggtacctgtcgtaacatgtaacgttatctcattatatgccaactcagaccacagagaacagggatatctacaaaagctgtagaggaaaacaatatacataaaaagtgtaattgtatcacctggttatgtttttaattgctgaatccagtaaatcagctctactagggggatctgagaaaaactcttcgtcaaccggagtgtccattcctgcttttctaagaaaattggctctctggatggccatcagcccattatctacaacatcttcgaaaggagctgggggaggatgcagtccccagtatctgtttcttggaacctgaaaccaagcaaaaattttagttaagcagagtgcagctggacaaggcttaagacatcataaagttcgggttcgctacaagtcaggcaatgccttgagtaaggaaaataatgaactgtggttgataatcagtcaatttttagaaacaaattagagtatataattaaaaaccagctgacaggaaaaaaaattataccaccaaagaccagcgattaggatcccgcatgataaaaggaaaaacttcagaaggttccattttttctgacttcaaaaattgattcacagcttcctcaaagcgcaaatcaaaaagcagtagataccctatttgagcatgaagaaacgaaagcatgtctttcgaaatttccccctgtgagtcaagttcctccaccaaggagatggtttctctatatctctttttcctcaagaggtctttaatctgttcttcataaggcactctccgataaaaaataagctgaaacatcacaatgaaagagtcaacaaaaaattcttgactattttattaacaagatatactccaaagaaatgaagatagccattatcaggataaacacctttgacaaggtagtgacaaccaaaaggtttccgtctcctgcctcatctgcggccaaaagtgaaggcccacatccttgaggaccaaaactaactgattgaacacaagcaccagacttcttctgatgtatttccatttttccatctccaacagtcaccaagtagaaagacaattctccaacagaatcaggcctcctccgaaacacaaggctccctccaataggctgaccatttgtgtccacaacaactccaacattgtccaccaacaacaacactttccactctttacagagcaatttaagcagcggcggtccagaaacatcaggcaatgtgaaaataaccccacttagaccagtgacacacgagatcaaactataacctttaacagttcccgcaataacataatcatcaagccaaaccaaagttttgatcccaccaattcccagaatctctttcaaaacaacaaaggaaccacttaatccttctttttcagcacattgaagttcaatcagcaacattctctcaccaatagcaacagcgaaaacatagtgaccttgttggactctctcatgtctagaatcattacctctaacatcactcacaagattcccagcaccaagcaactgaagaaacttcttactcgagctagaatccgttgaaatctcagaaggcaacaagtcagtactcgacgaatcacgtcctcttactctcttagcaatcacattgatccctttcaataaaccacccaatctcttagctggttgagaaagaagcgaatccaataagaacaagtaaccattgcagagagctagaactctccctctttcctcgccgagtacaaagatagactcaacaggagaagggctcagcgatacacttgcgagacgcgagacggtattagttaaagtgtcgagagataggagaatcagagatccggagtaggttccgaggtatactagggtttgagaatcggagataggtgagagagataaagctcggatcttatcgtcgccgccgagatcgaaacgagcggtgagctccacaactgcccgagatttggacatgacctaaaccagatatacgatgtacaatggtagtgatcggatttaagtagaagaaagaccgcgattgaaaaactccggtgatcagtgtcgccgcttaccggtaaagtaaagagtcagacacgttcgagttattttgacttaccattacagcttaacaaacactaaacgctgtcgtttaaagcatcgttcaattataatatttgtttttgttttttgaagccaaaaacttaattttcaagttaagccctaaacaaatcaagttccttaaaatgttattttctaaaaaaattttgtttttttgtctgaattaattggttgcaaaaaaatttgatgcgaatatgcgatataaattcaattttcttgaatttttgatttgtagttttttctggaagaaaactaattttaatttcgtgatcctaagaacagatagacacgtggcgctctagatcgccagaagcccatccgaaaatacgatacttggcaagaacaaagccgcgccaatccaaaagcccaaactgagatggcactgcttcaatccaatcttcgtcttcatcatcatcatctccattaaagctgcttaagaatgcgcagcctcactctaggtctgactctcagatcctcctcctcctcttctcttccattcacctgcaactcccgcttctgctctcctcctcctccttcttcgtcctttagactctacaaacgattccatttccttaaaccatgctcttccctaaagcaaaccaagaagaagaagcaacagtctctcccatctaccgctccgcctcctcagagtctccggtggttcttcaattctaaatccactaatgatgaaaacgacgaagatgatgttaagtctgagagcgatgatgatggcggatcggaaggtgatgctgctattaagggtactatcttagccggagttttgttgattggtactgttggtggattcgccggcgttggatatgtctacagggatcagatcaatactttccttactcaattctccacttacatcgaaggtaacgattcgatacatagaagctaatagaacttagtgagaatagacctttagatattgatgatgcatttagatagaagtaagttgatggagttttgtgttcttgatgaatcaaacaacaggttatggtacggctgggtatgcgttattcattgccgtctatgctgggcttgaggcaagcttttttatacttcttcatctgcttttgatgttttttatactcttcattgaccccagtttcaaggttttgttttttgaatcatttgtgttagatactagccattccagctctcccattgacgatgtcggctggtcttctcttcggtccactcattggcactatcatagtttctatcagtggaactgtaagtttattcttcccaagaacacaatccttaatctcatcaagtgaccttcccatgttgatatatgttattttggttttcctgtgttagatggctgctagtgttgctttcttaattgctagatattttgcccgagagcgcatccttaagttagttgaagacaacaagaagttcctcgccattgataaagcgattggtgaaaatgggtttagagttgttactctccttcggctaagccctctacttcctttctctcttggcaattacctgtacgggttgacgtctgtgaagtttgtgccttatgtattaggaaggtctgtgttcttgcaactttgttatacttatttccctatgatatccgctgtagaagcttgatacttgagttgtagtagtcaattagttcccagcacttaatgtccacttggtgtttactctcaagcaatcttgaccaggagttgattcaatttgttttgcatttgagaacaagatttcaacttgataagctatagtctgagtttacatactcattcatggatcatactgtttttgcagctggttgggtatgcttccaggctcttgggcttatgtcagcgccggggcttttggacgagcaatcattgtgagttctgttgtctttttatctaatctctatatcactttgacacaaaaaaatgaactgtacaaaaacatgcctatcttctctcatttcaagcctatggtgtacaataagttcatgttgatcagcacttgtgtagggtagaaagctagctaaaatcatcagctaaaagttttgtttttgacttaatgaaaaggagatcgatatcgaatggtaaacatgtactcaatacgagggaggctagtcaacttatggaagttaacttgaattgtagaaactgtgtctgatatcctgttgaattgtgaatacatggtgactctggcaagcatcataaaatcatcaaatgacaatcttctgtctatgtcgcttcagcaagaagaatctaatgttggcttgcctggaggaaacggccagcttttaactctcggggtgggtctgttggttactgcattggctggaacatatgtgacaagccttgcaaaggtaaactcatacttgtttacttcttttctttctctgttctgcgttatatttgcctcccacttctgatatcaaaccaactggttcaaagcttcgtagcatataagctcagaaaagtcccacatttggttgaaacttaaaagatgtaaagtgaaatgaatctgtctcatgtatatcttttacttgccgtgtgttgcaggatgctataaaggatattgatgatgatgagaagagagatgcaaagtaggaaacaagccagcgattggataatggttttgactctctaggatttgtaaaacgccaacagagtatcatgtatcaacgttaaatgtattgctccattattgttaatagttgatatataattcgaatcttttttgtccttcaaatttaagcaccaataataagtgagaaaatgctttctagacaaaaaaaaggaaaatgagcctcagaaaatcaaatgtactcgataaagtgagcctcagcacacattacagccaaattcccaccaagaacgtaattgatgataaacaaaaaaagtttgagattttatttggcaaaagaatatagcaaagtaaaaaagcctcatctgagagagacttaacaactcagaatcaatccaccatcagattcacttaggcgcagtagattccttcaagtaggcgatgagatcagcacggtcttgcggcttctttagcccagggaacaccatcttggtacctggtatgtactgcatcatataaaaaggccatcaatctcaatgttaacaacaacaactcatgaaacaatcatgacatgattatacaaaccttcttggggttgagcaagtaatcgtacaaggccttctcttcccattccacagctttgttcttgttagcagcagagtaagagtaaccagcagttgtaccagattgtcttccaaatagaccgtttagattgggtcctatattaaaacaacaaggtcaagtgttgagcaacaatgtgacgcaaatcacattctacaaaagctacgaaaacaatagaaaccattgagcaacagtgttttctaatttcacgcaatttcaagaaaaaatgagaatctgtgacgcaactagctcaaatcattgttgtatcattacttagaattcgagaatcaagttccacaaaaatgcgaaaagttgtatataaaaacctcagaaattcgtcacatgcattgagctgaagatttaaggataaacacgagtaagacatcgaggttattggatcagatctatgatctaatcgaagaatccgttaaccagatcacatcagagatttttgattaacatgaacaaatcgattataaagcgatgtaaaacaaaggcccgataaaaattcagataaattgcgaaaatcaaccatagaaatagaattcaagagtgagagagatcgatgagtgaaaaccttgtttgtgaccggcgcctgcttcgacggtgtgacactgagcacacttggtcctgaagatcttctcaccggccttggcgtttcctggtggtgcttcatcaaacgacgccatttttttcgcttgagctacgcgatcaggaacaacaagagaaaatgattacggaactctcgtttctctggagcttgccgaagtttccttagggtttcactgtggaaaaagtgacctctcttaaaaaagcagtatctccaatcttaatgggcccttaatgggtttaggtgggctcatatttatttcatatataatgctgtttatgcttgttactcatacttgcgaaggaccatcccctagttcatgtaaacttatgtttacaggaaatcatgcaattaaaacttgttgtatataagatttatgtacaaattgattctccagtttgataaaatatttctatcagaatttgattctttatcctacttctacaagacgttcttcatctgaactttgctcctgattgatgacagaatcatcgttcatcggcttattattctctccatctaactccgaatctgtttccatcaaagcaaactcatgagccttttgcacgcccaagtcactcagtaaagtcttcaccgttacaagcttgctccaagaaccagttactgcatacatatctgcaagcaacatatagtgacctaagtgttctggctttgtttctagtagtaacttatctgcagcccactccccaatgtttgtgttcccgtggatgaggcacgctttcagtagagtagcacacatagcacttgatggctcgtaaggtattgtatggaatatatctctggctttatccaggtaacctgctctgcaataaagatcaaccatacaagaatagtgttcaaggcgaaggcgtataccaaacacatgctccatcttcgtaaacaaccagtgtccttcacgcactaaattggaatggctgcaagctgataaaactgcaaccatagttacatgatcaggtttgataccggatctgtccatatccttgaaccatgccaatgcgacttctcctttacccagcctgccatatccatcgatcaaagaagtgtatgtcactttgtccctcttcctcatcgaatcaaatactcgctttgcagctatgatttcaccggattttgcatacatatcgacaagggagttccacaggattaaacagtccttgtagctttggcgtctcaggatgtagcagtgaaactctttcccatgttgcaggtttcccacccgagcaaaaagagggagaatgctagcaagcgtaatgtgatttgggtgaaatccagagagcaacatctccttgagcaggaaagaggtttcttctgatctctcgttgtatgcaaaaccggaaatgatagaattc

SEQ ID NO: 51 - DNA, 85855 bp, Arabidopsis thaliana
aagcttgaatcaacagacacgacagttgctgacatgtataaccgcttctagagacaaagctcgctgtgttgataccaggaatcagacaagtggaccggctagcgctcatggagtctgtgctccctccagagggagacgttggcagtaccgacccttgtcccaccccgttggcagcgccgtggaacccgtttccagattgaatcagagtcgattgtatgttgacaattatctggacaagcgaagagacaatctgagcagcagagacaggaagcgagaggatctcgatcacggctgtctcaagaaccagttgcgtgtaagttcctgggtcctggatctgatagaatgctttctggccctcagaggcgtttgctggtccaggctgagatgttcctggagtttttccatgaggaggtcttgctgagctgtttaagatgtctgccattgagccagacctcgagctgcagttgctgctgctgctaagtggaggtataacattgtttacgagattaagcagaagagaggcaaagtaatctagaggtgggcatacaggtgcaccggtagggctaatgtactgcgggaatgattcagagaatggaatctgcggaaatgtcaaaagatttgttacgttccattttaatcgaatgtggaaacgattacggacaaaggtatctagataaattggtgagaaacaaaatctctaaactaaaatccaaaagcggcatcaacttgaggtcaatttcagaatcaatgtaagatcgggaattgttttcaattaccttgctgagatcaagtactttgagcatgcgcagaacaagtttcccaggaagatggccatagaaataggctagtatatcacggacaaacgtgaatctgagaggatgatacgctagaaaatgcgagtgtgcaagcaaaagattatcagcttgctccatcgcattgttctcgatgagcctgtaaagcactagagggataactggaagcaaacgcgctgcaatatcatcaaagaacgttggatacctgcgtttaacacaataaaaaaataggtaaaacatttacccaactttagcagaatccaacaccaaaattaaaacagatcaaaccaaaattcaactatttcctagtcatacacaagttttcatggaaggttccatcacacatttatggttggatgccaacaaaaccaatcaaacaatcaaagccatgtacttaagtgaaattgttgttagaaatcagttacactgatgttgaattggatatattacctgtccttccaagaaagatggttacccagggccttctggagttcattgcgtttgaacacctgtgtgacaagccagtgctcaggagacccacggttttggcagtagttttttatcctcagcagaaggtctggcgttttaagtaggctcatctgtaaataaattgaaaacaacactgtaaaatttctatgatgttaagcttcttttacgtaaaagcatgaacatactgcaattatcaaggcgtgaggatcatcatcacggtcaatgagcgccaaaagaaaaatgtcgagaggaagcatttcatgtgtccagaagaaaaatgcaagatttgcgcctgccttgtctagaactgcctaaaaaatattacgatgcaatgtaagaagatggatcaagcaacgaaaagtgaggttaatctcttctggcagacagaaacctctagagattgtccttgctgaaggtctacatgaacgtggtgaagcaaaacatcgaccaaagtgtatatgttagcagtgacttcttcaggagaaacttctctcagaactcgtgcctgataatcatttggaagagaaaatcataccactatcaacaaacaatcatttcacaattatgaatagactaagcaaagcaaaccagatttgtgctgttgatgttttcagcgtggccttgcatcagcagacaagcaccagcacatagatactgacggtgttgaggaaaactgtgactgaggtatgttgaaacgtaagcgggttcagcagatggtgagagaagttgagtgcactggtttatcacagttgtttcagcctgttgccatgcctgaattgataggcccctcttgtctacccgtcctttcaaagtttcacggagaagggatgggaaatgccgcatcgtcttctctgaccatgtatgctgactcgtcgcgagtatttgttccaacatggtttgcagataaaccatgtgatcagggtctgcgataccacgtgttttgatagtgatagcaagagtcatgatggttatgcgatttaacgtctcagtgaattcagttggcccctagtgatgataacataagaacaattatttacacctgagatccaggcacaaaataagaagggggacagtgagtaattcgaaaacaccacttacttttccctcccgtttcacagagaaaaagtctctgagtgataaaatgagattcatgcataagttttcagctagtctgaatatacggtggtcaccacgttttcctttcaatgcagatattattttagtaacatcatacattaaagttttactctttccttggtatctgcaataagatcagtaattttgtttagtcgggtctaacagccaatatggcgaaagcccgaaacaattgtcatctaactaaaagaatgacccagttaaaacataaagaaggatctactccaacttgagaacttttcgctcgttttacctgtagagtggcagcaaccgatagttcagaatctcaagaacaagtaacgtcactccaggcttgcttagcagagaagcatttcgctgggccaattgctacagaaagttagctaatcttatgaatcgcttatgatcaataaaacataagataatgaaagtcaaaaggtaacagaaggaaccaaatagcttacactgaaatgtgaacggaacatcgaatgaggggaaatcagaagcaatcttgtgtatgtctcaaccattgcaatgctaggaacaacctgcactcagatgttttactacgacactaaattcatttttctcaggttttttaaaatctactattaacatttttaaacaagtaaaacgctaaagttgttttactaaaccgtggagaaaataggtcactaagtaaaaatgaccaaagaagatgttcttcatagatcagtgtatcaattaacatatataatatctttgtgagacaaaggaaacaaacctggctaacaaacaaagcttcttccatctgaagggccaatttcaagcacaaattcattgaaaagccagatagcaatgacataggtaacggggtaacttcctgcgtcatcattactcggtcgtttggctgtaatcccggtaactcagccatgccagctgaagatagccaatttataactgtttcacatgctggttgtgccatggtgtaggaaacaacccaaaacatgccaatcgacctatcatccatattcatataatccatcatccgctctcctgacaaccccaaacaagaaacagaatgagaggatgctttttataatcgggattctctgcttcctagtctaagccctgccattgaaaccttatgtacctttgcttctccaccactcatcgatctgttttcccttcaacagctgttcattgtttaggtatgccctagttgttgtgcttagtgaccaaatccgtagattctgacaactgcttacgaagtcaagcaacacactctgaggattgttgggatcagaatttctgtcttccctgtgaaatgataagatcttcctagtagtctccacctgagagaaaacccaaatagagcacaaattgggatgttaaattcgccgaaaaagaagtacaagtaattgcattgcagctgcaaacatatcattgtaattgagtaacgacctttttagcatctgagttcaaagcagtcatcacaagctccacgcgtattatttgtgcaagcagccaagtcacatgattcgtccgaagaatatggttatcaacaccgttaaggcgtaaaaccaacttgtcaatgaaatcaacaaaatcagtacacccacttttgattagaaagaagaatatatccgagaaaaccagccactcttgccagcaatttgcatctgcatagagagggggaaaagtaacagataccaaatcaataccaaagcaatcctagtataatggtatctcaactcttacttttatcttttctatctaagcctaacgaatcaacgattatagaactagaataaaacgtaaaggatgtaggttctttacagattgtgacgactagcaaaaccacttgctatttcaaaataatttccacagatttaaatggaagtgacagatcaaagacatgagaaatagggaaagacaaacattgcctgagttggtcagcttaagaagctcaacaattctgtcaatgattgcctcacaaatcatgtcagaagtgaatacagcaccagggataggccctgcttgtgtagatggtctataacaaggggccacaacaagaacacgcttccaccagtccggtgacggtgtagtgcgaatagcatgtctaatgcaacgcactgctctctcccaatccaggcttccttttggaatagacatcgccagatcctgccggtgtcgaaaaagaagaagagaggattgaaattcacaaattgtctgcctaatgaaaagcgtatacattacacaatatcaacaagagccaactaagctatgaaaccaatctccacaatttcataggaatcacctctccatataaaggttccccaagcacacttggatatgtaattggtgaatgtcgtaagtgtggcacagcttcgggtggaacattggcagttatttgggagactatacgatgggtaccaaatgatggacagtgaagatgttggtccaacatgagcatatgcatggccatcgcatctcgcctccggtgtatctccatgataagagtgaacaaggcttcatcatcaggtatgttctctataaactgtagaccactgcgcaataactcataaaacggaattcgagattcaccctcttctaccaacagccagatcacatccaaacaactccgcaaccattcagctaaagtcttctcagatctccacgactttcctacagagtcctcagttcccagatctctcctgtcccagttaacaagccaattcatcatgtactggaaaatctcggcatgagtaacgggtttgagactagattcaacgccaatcaagataatcttgcaactgagctgacgcagactgtttacagcagcagctctaatccgttgactatttctcatagcattctctcttacaatctggccagctcttgcaatctgctgcccattctccacagatttcacctctgaagctgatggagaaccaataccatgagctgaaggcagcaatgacgttggattcacagacacaggaactacagactgcgaagaagtagcagaagaaccagccgttgccgctgctgcttgaacaccttggcttaacgacgcctcagcagcggaaacggaagagagaagggatggtaaaaaagtatcccaattgatataactaatcctacacaatgtacgcaaagcaaagagtagaaactcagcacgaggcgcatgattgctacattgcaccaccagagatatcaaaactgactcagtaatcgtcctcaattgctctggatcctaacaaagagttggaaaaaaaaaaaaaactttatcttacgaaatcacaaagagaaagataaagatagttaaaaaacgagactttacattgaattggctctgaagcagctcaaaatccaaaaggaattgctcgtttcttggtggtaagtctctattaggagcatgaacacgcttctgtgatttgttcctgatcaaaacaatcaacatggataaaatcaaacacagaaggaagagaaaacaagagttgattcagaatcaatagaaacaacatacgggggatctcggagggactcatcaggcttttgacggcttcctctctgtgatagagaaagcaaaatcagcagagaaacaaaattcgatgaaaaaaattgggagattggagaagagattaaccaacccctaagtagagattgaaaagatcgataattgcagcacgagctgggtggaattggtacgatcgagaagacgatggcgttgcagcgactgttcgctgcgattgatccatttttttttcttcttcactgattctttttttctttgatgcttataaaacggaggagcaaaattggtattagaggttttgggtttaaagctcttttgaagagaagaaaatgtcaacaacaacaacaacacaacaacgaaaaaaacaaaattagaatttgagaaagagaagaacaatattttgcattgtgaagttgaaacgattcacagtagagaagatgacttctaattacacaataggagccacaaagattttgtcttaggcagaattacattgtgggatacaagacagagaattctaaaagaaaaggattaaattgaagatgctctgatcatcaacgttttatctcatttttgatctaacggctccacggcagtcttgaagagaagaacgtaaactttgtcgatctgaaaatataggaatcctcctgtggaatgagtcacgtatgaaccaaagcttgttccaacaatgcagtgccatgccgggccgtaggctgaatcgaagtcctgaaatggaagacagatggaaaactgtttcgtgaatatatagttttaaatcagctgcaacatgtcattagacagatgggagtctaagattcacttcagtggataacatagaagctggatttaggagaaaacatagagacaagaaacatatgaagatctatttcgagataagagatctatattaccagaacaagaagataaaacaagacaacagcagaaattgactcgtatgtcaatcctaaaagccaaagggaggtagccattattaagagattgatgaacactgagacaaacaagtaagctgcacacagataagtgaacactaaattgttttactcaaccacttcataaaatcaatgtatggatcaatcaatgcctctacctagtcgcataaattgagggaactgctccatttcgctccataagttaaaatcaaaagctaattatcaaagccgctttaagaaggaacaatatcctcacgagaaacaactgcataaatggacaactctatatatggggtgtcgaaccaagtcctttgtaaaaggttgtattcaggcaaggctcacttcctaaagcaagcatgcttcagagttatcattaggtagcaactaatttctaacagcaaagatacagaagcttagcagatggtgcatgctatgcctcattagttatggcctaagacagctccaaaatcatctcaataaacaacaagaacatccagtttcaagacatttcacaacgagactcctactacagttatcctcgcaatacaaaaacaacctagtcaagtagactaaccgaagctacaaatagaaaagacaacaacaatggaacaaagtcaaatgcaacctaacaaatatgggaccatccatgaagttcaacaatatgcaagtacacaaacgaaaatccaaattcaagattcatcacatcttcaaaccaatcaagaaagagaagaccataaccacattctacaaaaagcatgcgactttgagacgtagccctagaacccaaaagcagctcaatacttttagattctgtgtcaaaattcaaaactcaatccaagtactagacttcaatgactccaattcaacccaaatacagaaaaatcatgagagagatacaaaagatctaaccttttttagggcatgagcgagtcttttgttatcagccttccctggagtagcattcaaaatctcacgcgacaaactaaaggctctgttctgttgaggcaaaggcatatctgaagccctaacacgaacattgaactcatctttctgatcttgctgttctttagccttcttcttctgtatcaaactgttcaagaacttgcttcttctttctaattctagctcaactccttccatctctatcacatcactcgtctaagcccctcgttttcactttttcctccgtctaatcggagagaaaaaccaagcttagtgtctgtctccttgttagttcttaagctgattcagaaacgagcaccatctgtttgacaaaatgtctgagagtgagaagaggtaattgcgtggaggagacaaaatagcgttcttttgtgttaagcgtaaagcagccgaccaaagtccaaaagacaaattcctgatttttgattagtttggtcatcaaaatattaattactcttgtctccccctttctctcattattactctttgtttttcctaactcccatatgattaaaaattgattattgtgtactcgattaatttatacaattatttgttcgtagatttagagaatctagtgaatctactaatcggtaacaatcaactaaaaatgtttcacaacaaaaatagactttcatgcttcgttcgagttcgaggtgtgaaatcaataatgggccgagaaataaccaagtaggcccaaaagaggtgcgttgatataagtagtgggctcagtcagctgaaagtaaggtctcgaatcaggaaaatcgtcggtgatattaggcccaccaacgacggcgccaattagcaaattaggattaggattattgctgaagaaataacgagatccgtctttgcaccctatacgatcaggatggtccacaactgaaggaaccgagctgccacgatgatgaatcttctgtggaaacctcgaaccatacccaaccatgtacgacattttcattggattatctcctagtatgtagtccacctatgttaacgtacgccaccaaacacttacgttaatgaatctctctattatgctaaaacagaggaatgttggttagtttagttacctgacgcttggcgacttgacggagaagagcaggagaagctgtaaattcgccacatggcaccaccttatttgcgtggcttaggtaattagagtatgttagtaacaaaaaagacaaagatgttacatgttgcatattacttcctccactcttcactaataatcctccttgtgagtattggacttgagggtgagaaattccaggcaataaagaacagataaactcatcagcgttttgcttaaaactctgaaaatactctgcttttcccatcaataccattttggagactaagacattaatcccggcatgtttattatcccaaccaaattcgtggatcgtatctccagctcttagaataacttggttcttcacaatgaactctctatacactcgtttcttcgacgctttatgtagccaagccgctccccatagcaactcatcctacacgcaacattttcatcaacaaatgtttatgaaagatatatcaaactgtggtaaaatttgtataattacctcgtaaccgttgaaatcgcagtaaaaaggacacactgcttgataaagactatcactgtacgctcctcggtacttttgggcgaacgcaaacacctatgtccattcacattttccataaacttagtttattttcgtagatgtcgaaaatatacacaagtcaaaagttctttacattaagtaatgtgaaatggttcatacgtttctaacaaaaacaaagtagttccatacttcatattaggtctaaactaatgcatgtgggtcacgaaagtacggaaacaaacattattagaaactaatgaagagaatatttatcacacaagcaaagtatataaccaattgttaacacttttttgacaaaatcacgattttttttccctatcatttcaaaaagacgaaattaaagaaactttaaagaaaagtacccttgttgctcggtccaggagcattttggagtatactggatcgcgtttttcaaacacgattgatgcggctgctagtgcggcggcggtttctccggcgacttcagaaccagaatggtctttatcgattttataaacggttcgtagtgtgtccatgtcctcggggcgttcccaacaattatgatcggagtaagcgtctccgacttggacaaagacgacgtcgggaatctgagtcgctttcatgagataatccgttccccatttgatagctttcacggcgttttcaagctccggtcccattgttttaccgaaatctatgacgctccatgacatcattgtcgtcgtgaacgccatcgggaatccgaattttacgttgtctccagcgtcgtagtaccctcccgttaaatccacgccggcggaagaaccgtcgcgtaaggcggagtcacggcgccacttaaggcgttgatctggtggaagtttgccggagcgttgaccttcgaagaagaggatgctcttgcggagagcgtcgcggtagtcgtgaccggcgtaagtctccggtgaaataaggagaagcatggcgagcataatcgccggagtcataaaggattttcccgccattttctgtttcggttctgtttttggtttgtactttgaattgaggaacgtatttttatactcggaaacgagtcctttgggattctagagacaagaaccaatgaacggtcgccacctgaatttaatagattggattaagttccatgtgggggtaaatacgtttgatttacgtgtgatttaagattttcagatttttgtctatccaataatttaggctttttaggactgacggaaagatttatttccctacgaccgtatccatgaaaatatttaattcatggattgacaagtcctattttcactagtgttatacgtttgttattacccattatagactcttttagttaacttttaaattattgtcatttaaaacatgaaaaattatttctaatgccttttttatgatgccccttttcaactatactcttttattttatccatttttatttctaccctctttaaatttttaacgaccattttactcttatttggaaattgttttaggtttacaaaatgaaatattaatattttttgcctaaaatattccaaaataaatttcccgccaaaaaatttcgaaaaaaaatttcccgccaaattttgttttcaaaaatatttttcccgccaatttttttttttgcgggaaatagatttacaagggattttaaaagagttttaaaagatttacaagggattttaaaggggttttataagatttacaaggaattttaaaagggtgatgtacaagggattttaaaagggtgatttacaagggattttaaaaggtttttaaaagatttacaagggattttaaaagggttttaaaagatttacaagatattttaaagggattgaaaagatttacaaatgtcttataaagatttttaaagggtttaaaattgttttaaaaggattttaaaatatttacaatggattttaaaaggggtttacaatatttacaaggaactttaaagggctttaaaagatttacaaatgatttgtaaagatttttaaagggtttaaaagtgttttgaaagatttacaagagattttaaaaccttttaaaattacttgtaaattttttaaaacccttttaaaatcccttgtaaatcttttaaaactcttttaaaatctcttgtaaatcttttaaaacatttttaaatctcttgtaaatcttttaaaacccttttaaaattccttgtaaatctatttgccgccagaaaatatttataaggatttttaaaatcaattttttggctgaggaaaaatttgttacgaaaaaaaaatttgacggaaaatttttcttttggcagaatttttttttttgcgggaaaaaagtttggcggaaactttttttttggcgggaaaaaaaaattttggcgccaaaaaattggtgggaaaagttcagtttccaattacatgtttctattagatgagggtaatttggtcattttgttcaagggaaagggtatttttaaaaatggacaacataaaaaagtattgttgcaaaaaggtagtaaaaaaatggtagttttgcaaatctcccaatttttttaacaactttttgttatatgtgttattggtgaattaaacttagcatatgttatatattttaacaaacattcagtatggataataactaatttaacaggccactaaaatttataacaatataatttatttaattaatactaatataattggataaaattgtataatagttttgatcgtctaaagatttgatttaattcgagatgtgaagttgttcgaacatgggagagatgctagctatataaggtatgcatgaagttttgatatgggcattgattaagacgtgagattgatacgacgtaaatatcgatggttatggtatatattatgtgtataaacatcatttatgagatatttagtaggagtttatgatcaattagggaatttgacaagtaccaagtaagattttatgactaatgtgtatgagtagagatatgggatattatttccttagggatgtagagttataaatgtatggatattttcttttagactcataaatgaacgtatacacatatctcttccaattgaattgggtccgtcttcttctccagtttaaccattttctttctgttattttagagcttttttttcaacgatgagaaaagccggcacgaagatagtttcagtggccgaaaaattgaagccaacgaaagaaactatagagaaagtattagagggattaaaagaacttacaaaagaagttgtgttcgatcttttacagagcattcacatgaatccagaggagtcgtcacttgtcgccaccgccgaaaaagatcaatataaacaccaccataaaggaatttttccaagaaacgataaagagacccgactcaattccttctataaccaaactcgaattgaaatagaagaacaagaggacattaacggtgacaaagaagactttgttaatatttttagttttgaaaatattttaaattcttcaagttattttttaaccaatctccctttcaagattttattaattttaaaagtttgtaaactctttttcttttcgtttatttttttttctttctaaagtctcataaacgagactttcactttaagagagaataataaaagaaaataaaatacttttttctttttccatataatttcaaaactatttaaaaaaatatttatattttattatcaaataattttgattgattaaatgtagttttacttttctgttcttttgaaatcatatttgaagattttaaatagtgaatttgtaaaatgagttttttatttattcatttatttatgaattatttaattttcaaaaaaataattattaataaatcaattgtagtcactatttttcaaataaattcatacttatcataaataatatttataaactatatttaataataataaaaataattattagaatttatttttaccaataagattgaaatatctaaagtctttgcatcctaattttctacagtcaaaatcgttatagccaaaagtagcaatcgttaccaatcgaccaatcgtcgtacgataatttattagatttttttgatttatgtaaaaattattattgctattagattatttttttaacgtaaagattgtttttcatttccaatatttaattgttgttctattgtataacaactaggtgagtacccacgctacgcgtggattgttgttttgaaaattatttaataataattatgtttaactatttttattgctaatttattaactatttttattggtaatttatgttattttcgtgtctgctattatgtagttgattaaattatattcattttatgtaattatatttgtatagttagattcacttttaatttaaatatcgattatatttttttcatgtataaatcttcttatctatataccctagattctaatctttttaactatcatgaaatacttacatcaataatatatgataaaatggtatgcaattatgttacttatttggtttaaaagttgcctaacttgattctaagcaaacaatttattgttccatgtattctctactaatctaatattccaatcacatcatgataggttcttgtggaataacataatgtataactataatttcttagctaaatattgaattgacatcatttgaataacataatgtataattaactactcatctgttttaaatattttcacataaaagaaaaaaagaaggcaaaaataaaagagtattttaagtcaacatttttaggtttctctttttgcatttgcatatagccatattggagagagtgtcgtttatttaaatttttgatagatctaacgtctcaaaagaccattacttacaaaaacatgtatgtcattattaatgttaccaatttatcataaagcacaaaaaacatatcatgtagacaaaaaatgtaataaaaaaaagactaagttaaaattactaaactaaaagaggttaagtagcaaacagctaagttgcaatacacgaaaatttctagtcgttataaagtaatgactattaaaaaaatagcaaaataagaaaaataaaatgaaaatagtgtttgatacattaaaataatttttgtattttttcttttaaatgaagatatttagttaagagtgggattattaatggatgattcaatgcaatgtgaaaattttaatttattatcactaagttttattttattttaataatattaatttagaatgatatgtagcattcactggtgtgatgatgtgtcattcataaggaaaaaattggtcaacttttatatatatgatttcttttcctttctagcatctcgattttatagcaaatttcatcaactttttgttgataactaacattaaatgaagtcaatgcttgttcatgtatgaggaccaatcttcctaatttgactacgggcgttaaccaaaacagaaaattaattttaactcaaaagcggattctttagttttatttgatatgcatgacgtggaaatcattcaaattagttttgaatgtactctataatattattgtcaaacaatgatttaatatgaagatatcaatttgtactttaaaatgcattaatctaaacgattatctggttctttaattattgtttttctatcgtacgtgtatatatctcaaactaatatcttttgagttaggcattttgtacactactaaaataacacttttcagctcaagttattcgatttaaaatggatcaatcgaaatttgaggagttttttcattaaaatctttatttaaaaatagaagatatctttttttttgtttcgtttcgaatctagcgaagttggagaccactttataaatcatgtaatgtgcctaattttactacgttaactaaacagaaaattaattcggactgaccaagtaaccagaaaaaagtcgtgaatttctaagtgtgatgatgttaatgctaaacatgaaaacaaaattgatttaaaaagttaatacagacagaaaaatatacgagatggcatttggcaaagataacataagcgaccatttagtatgggtatcaatcggctatactaaaaaaaaaaaaacgtctgatacaatttttttatgccatgatattaacgagatctcttaaatttgatttcgccatacgtataaagcattattatttatacacaatattcaggcccagatcggcccattaaaattgttggctgcttggattaatcctagctaatgatcaacagtataaatataaacttgaggtcacaaaaaccaaaatcatccataacccaaaaagagtcacttccgtgtcacaagaaaccatgaaactttctcttcatcaaccacttctcttcttcttcttagccagcgtcctcccattaatcctgaccgtccattctcaatcagacgactcagatttcatccgtactagctgcaacaccacattataccctgacctatgcttctcttctctttcctccttctctagctctgttcacaacgatccagccctcttggctcgagccgccatctccgtcactctcaccaagactctcgacttagcctcatacctcgccaatatcaccactctccagccagagagcaacgaagatggtgctcaccacccaaccgcagccgctgtttttcacgactgcttcgacaatcttaaagacgcggtcgaagaaatgaaaggctcgatgaaacagatgagggagctggtctcgactggctcgctcgagtccttcaggttccaaatgagtaacgtgcagacgtggctcagtgcggctttaactgatgaggagacttgtacggacggatttaaagacattcacgatgagccgaggaaggatgacatatgcgcacgggtcgatgacgttaaaaagatgactagtaatgcgttggctctagttaatcgatgtgttgataaggccatacattgatcattttatcattattcactaaatattcttcttcttttttttcttacttgaaaaagaagttattgtttaaatgtttttggttatcacgcgtgcatgatagagatataataagataagcctgtttgtgattggctgtaatgaaatagtgatattatgtagttgttaacgctttttgtttgtcgaaattacgaaaagaatcaagtgtgtgtaaaaagaattagtagtcaattatttcttatatctatttgtccttttacttctgtttttttttgtcaagcgattttgtccttttactataaatcgttttagaaggtttcaaacaaattagaacatcattatgaggtacaaaattgtatgagctgcttttagctttctgatcgaaaaaaacaagaaataagttgactttatttgaatttaaaatttagtggtggacaatataaatttattgtcgttgtgtagttaattcaagtggtgataaaaagtatagaaaaaaaaatcagaagaataaaattataaaagtctaaaaactgcaatagataggtttaaaacgcaaattaccaattataacctaaatgacacacattatataattaagcagttttctctttcagtaataaggtttgatatacaggctacaaataagtactactatctctatattctgactttcaaagtgatgaataaagcacactattgatatctaatggcggctaatggtgctccatatattaaaaagaagtatatagtggctaatgtatgcatgcgctggaaatccaccactattagtctattatacactgacgttatatgttaatgctggacaagctatagaggtaattctaatattcaatatgttgcaaattaagctcatacaaatgataatctaatgttttgtaacatgcatacacttatatttttgtacccattttcgaatatatatgtgatatgtgcgtatgtcggtatgtgtataaacgtgtgtgtgtctgtgtgtcaccactgttttccaagtccgggaatataaactatagtgtttggtccaccaaacgtagattcgtatacatgtgatttattcatatacgatacaccaaccgtaaatgttaatgattaattataagaaaatcttcgttaacatgatgatcagagattcaaattcaaaaccaattattaatttaagtttctgtatatcaatttaagttttagtcttattaaaatcttactttataggttaatatatgagaattctaagatttccgagtctagttactaataagaaaactttaataatcttatatatgtatatatatatatatataatttggtttgtaatatcaaatattttactactaattaaaagcaaattaaatttgaacataaattgatgtttagataaattcgatgctagccaattcccgaacgactaattaatgtttaagaccactgaaaatctttggcaacatgagaactaaaagaacaaacactattttggacttgaatgtatacaatatttttggttgatgtattgtacatttgatacatcttaaaagaatggatggagtatataacaatttgtcatcttcttttgtaataacaatttgtcattcgatgccttgtaaatttgataccatccacaaaactgattttactaattacataattatagtagttgattaaatcatactaaaatttaaaattgcaagaattgttaggatgcgtgaagaaaattgatgtttattttacaaaaaaatgaatatttataaatggtttggaagtatatgttggagaaataagatccgtgacccctgtgaaattgaccacaaacccatttgtttatcataacacacaaacgacataatagaaactctgtctcacatgccttcttacgcctcatgtttttccagtttataagataaatgattaatctacgcattgtacaatcacttaagttgtgacttcaaaagtattcatatctaagtaagtaactgaaaaatgtttcgtttggtagaatatgccatcaaattgctttaaaacatcactaatacaattttcaaagcttctaaataataaccataaaacatatataaattatttataagatttcattaccaaaaaaaaggaaatggtaatacaaacgtttgtgcccttttgtgcataacttttcgtagtacgagatttctctagatttacgagatatgataagttttgaatggttttaaaatgtcaaagtgacgtcgaagtatttacaaggtgtggaaataaaagagaacctcataaagcaaataggtatcagaatttggggaagagaggaggattcacgagacgcaatgaaacaagagtcctttttgttttctagtcacaatcccaaagggtccatctctgttgcatctacctgtaacttattgcttatagtttgacacctgtttttcccttactaagttgaggaactcttacaaatttaattcattcaccagccataatgtcttatccgtattaattcatgatgtttattgtttattgtttaatgtcaaaataatgttttaaatttcagtgtgtacaaatcattatagacaaatctctgtcaaagattactcattatgaacaaatcttttcgaatgagtactttttgacagagatttgttcactttttttgttcttttcttatttccaaattgtttactatgtttctaatgtttcgtgaattttgttagagaaaatgattcgtgaacgggctcagacttatgtttctggattggcgacatcgtcggatcatttaagggctttcagagcccaaactgtaaaccgagtccaagtagccattgataatctattttactccaattttttttgttttctatagattctgtagaccttattttcattattcaaatccttcgtaaagagtatgcatccaaaccatatcatgtttcaaacttaaattcacgacttaaaaaatatgaacaagttagcattaccatccaaaaattctgctgatgttacatgaattcacaactgaaatatattacaagctaaatcatgtgcaaatgacattaccaatttcattaaaggacatatttatctataatatacaaatgatatgatgagttaaaaacgttagatacacaatgtagttgtcgaacatcacaattcacaagcaccataaaccttcaataaaggacatatgtatctatccttgtggttgaggtctgtaatagagccacatcaaatatgtagaaaggaggaacaaacggatttcgtgtcgttttttaaatgatatgttgtttatgttgctttgccaccacaaaagataataataataaagactaagactgaaacattcaacaaagtaatgcatggccttttagaatcatattaaaaaggaagaagaatattcattcagaacgaaacgtaaacaaaaaaaaataaagcattaaaatatgacgtagattaaatcctttttctaatcatcccttagcatcagcttcagtttgctctctcatattcaaggcgtcgatctcctttttatgatgttcttcaccagctttgaataccgtgagaagcggatgatagtaatcagagtgagccttcacacacttgagcatggtgtccatggcaggattatgacgacaacttttattgttcttcctagattctttgcagaagtcaatccaagccataaatgcttctttgcaagcacctcttgtcatgaacttggtaaacatctcgtctctgtcctttggtttcgcatggaggaaggcatcgatttctctctgcatcacttcagccctagcgttctgcaacgcgagaaatcgctcaaagtaatcagagcgagccttcatacacttttccaccatcgaataggcttccctacacgtatctttctgcacatcacgacctacaaaagcggtatatgattcttcgcaaccaccttctttcatgaacacatgatatcgacctctcactggcttcggcttcgacgagacttggttattttcaggtttggattccggtttcagatccgtggatgacatgatcccaatgccgtaagagagataatcactcttcatataaaaaaacaaacataaaaagatatattaacaaaagatgcagtcggtataaaatatataaagattttgttgttgtttactgttacttattaaaataattaatacatatgagtattttccttgccgttttttccacatttagtcctttatattttgtttttcccttcagatctaatatagttggttgacaaagcaataattatattcattaattttattgaaacatttattagtatattaagcatctcatccttataaacataataatataaacagtataactacgtatcagaacattatgattcacaatagaaacatttgaaggaaaaagaatatgtatggcttttatttttatttttttcttttgaacaaaaagttgttattattctgttctttaaattataatccaaatacgaagataagaggatgctgagatcccaaaatataaagaacaataaaaagaggcttaccccaaagctacaataagaaaggtagaaagatacataaacttaaacaataaaggatctttgagaagtttgagccaaaaacaaaaaagttttgtaatacatgtgaggtcaaaatttgtcgataaatcttccaagagcgagtcaatcggtttgctattatagatactatatagattcaagacaatccatctgttacatgggatttgggaaataaagctatatataacaattatacgccaacaaacaaaaaaaacataaaatcaacaaagaccacactaacaaaattaattcttttaagaaaaaaatcaaagtccatcgttgaccggtactcccgtagccgtaatccaatagtttccgtccaagaaattctccaccgtgaatttttccgcctctgtcaccgtctttataacatgataacctggccacttaactctaccggagacacttgctccggcgccggtattaccatactcaccgtaataaagagtgctaagagcaaaactaccactccaaggcaaccatcccgccggactcaccaacgctccaagattacatttcatgaaaaccgtcctcgaatgcgatctccacggccgtcctaaataagtttccgacgcagtagccaccgtcgagctctggatgacgaagccagtagtctcgtcgggttctttgcgtgattgagcggtgatcgtgtttttctggccgctcatcggcttacgagcgtagatgttacagttttggaggatggcggttgcgtctccgaagatgaaatcgacggttccgtaaatattgcagtttctcaagaactgacgactagaatgaaggtagagagtgtcttgatagcctttgaaagagcaggcgtagaagacggagaagtctgaacttgatcggagagccaccgcctgatgtttctccggtcctgccgtgttctcgaatgttatgccttgtgcgataaaaccgttgccggaaacagctgttggcggataaaacaaaaattagtccaaaagttatatttcaagaggaaatcatgtgtgttttgtcaatactcaacagatcataataagtgtttaaagttctgacgttaaaaaaagagtaaagtatatatgttgaaacaccaaaaaaacgagtaaattattattttttaccgtcaaataatattagcaaaactgaaaataatagtttttagcaaaaagtttataataactaacatccagatatatattaattaatttagcaaacttatatcaaagtaatttttgttttaaaaatatttttttgtagaaactaaaattttattacgtataatcggataaactgtggctagataattttaatgtcttttttttttgtctatccgattatacgtaatgtctatatgtaaatgtatgtgcgaaaattgatatagttctaataaatatcacttttagaaagtaattttgataaatctctatctatatagcacggacgacttaccaaaagttgcggacctaaacgtcgtcgtgccatcttgaacgttcctattaccggtgacgatggtagaatcgatgccatctccgataaccatcacgttcttgatcgatttcttgattaccacgttttctctgtaaacgccggctttaacgtatatcacaagtctctggtttctccgaggaagtttggcagctgcgtttaccgcttgttgaatgcttgtgtagtgacccgaaccgtccttagccaccacaagatcggcttttgccgtagttttggaatcttccagtagtttacggtcggaaagagggaaccacgatggaaatttctcgtcggaaaacaacaataatctccggtggctaccacctccggcactacttctttgtttgctgaatttagtgaaccccgtcgatggatatttctcggcaaccgcctcagcctcagcagcagccttagtaactgccaaagagttgctaatagacttagtgagattcctgtgaaattgtaccgggaaatactttgaatacgaagaggttaacttaaaatctctaaatccgtttctgcaagtgtcttgattagctatggccgcgcttaacgaggtttgtctatcatgtggcgaagaatattgaccgtacgatctccgagagtggttgagttggtctatagtgtcttcgtagagctccaagcagtcaaacaaagctgatgttgcgtgtttgtggagagaatgatgctgtttcaaggaagagacaaggcggtgtagttgcacggcctggtccatggtggagctgaccacaaggtcgtggaaagtgaacccatccgtttggtcgtctaaagttttgagaggtgaattagacatgtggtggtcgcagacgctagggtatggggtttgtttgcatgaagttatgaaatgggcatttagatgagatattgatacgacgtaaatgatggttatgatacatttggtgtataaagatttgggaggtgttagtaggattttgtgatccatttgagaagtaccaatagagatctttgactaatgtggatgagtagagatgtgggatattgttttcttagggaagtagagagttatatataaatgcatgtataagtaacaaatgtatggatactctctttcaatctcataaatgaaaatgtatacacgtatgcagccacgtcaaagcgtctgatttatgtttgatataaacatatgaaaacgaaaattaagaacaaaaaaataaaaattaagaacaaattatatgttatagaatccaagttagcaatggccattggttcgaacttattgcataaacattgaacacaacataatttagagctttatgtaaattaaaacaactacgtaggaaaggaactcaagctaataatcaaattagtatagatactcaaatgagatttggctaatggcctgccacatgtgtaagaagtttgagagacacacacctttcccgtaatgccacatgtcagaaagtctgagactccaaatgaaagataacatatcataaggaaaagaacaatccacgtacagaaaatgtgatttgaaatagtataacaattagcaaaaatttaactatttcagttaatataattcatgtaaaaattttagcatataaaactctttcaattttttttgttaatttttatatgtttgttccaaggtaaattagtgtattaattttcagtttttgttttctttttctaaaagaacgcctatacgtataatggtaacaatacaaaattttgtgaataatgattaaataaagttattacaactatatctgcagctccaaccacaaaattacatatcgatcaccattgaaaatataaattttgaatgatgtgaaatctaccaaccaagcgttagggagtttcccagaaagagttttaagtaaatatcaaaatcaaaggtcaaaaggctagctttcacatgagtttcgtgtgagcttgaccaaattaaagtttttgatgaaaagtttgattaagtccgtcttttgtgggaattgtaatatgttttctcacttaacaagttttgttattactctatcgtttaattaatggtttaggtttacaaaagcgacattttctgcaatttctgtcacgtagttagatcataacaattaagcatgagtttaaccaaaaagtatgtaaatcttacgactaactttcaaattccttgttgacaatagaaaaaaaaaatttccaacatatatattttggtaactgaatgctagagatatctacgtaacatacagttgagaagatctatttacacatgtagttaagcattttcacattcaaatttctatttcatttgcatggaaagaacatttactgccaataaacaacaagtataattctgatcatgtcatattatttcactacagcaggaaaaaaatcccacactaacaatggtgatagacggcggtataactaatatctcattaatatttttgtcgacatcgatgaggaaatatacatcttttaattcgtcattaacttgttactatattttggtactaattgtttggtattccatcattatttaatttgtaccaaaagaaatatacgttacttgtgaaagattgggtgatttattaaaaaaaatcaaaatcaattcaattgtaaatacgaatgtgagtgttggaaatgtaagtgaatgagctacattttcatagatgttaatgttacgaaagacttgtcttgaattcatatcgacaatgaaatcttgaagttttaagaaaaattgtataacttatctcaaaaaaaaatatttgccaacaatatggatatatgcataatcgtgaaagtgataacaaattaagagtacaagctaagaccactagttgaaatctagagatgatagatgggggtgggtacgtactattgggagtgggagtttgtcttccatcgattcgaggttttttgttacttaaaagtcgacttaattacttcatctatgattcactagaatcagttttgagtcactatataggttttgttttgcttattgtgtgttatgaatgtgatagaccgaagtagtgcgggtagtggtagtggtagttcgttaagatgagtttggtgtttttggacatatcaacagaacatgctaactctctcactagctagctttttcatatgcatagctttttcgagaaaacaaaatatattgcacgattatataatcaaattcttttttttctcacgttcatatattatgtatatgaatatgatttatacgaccactcaattagtcacatgttattgatacttgacagaactcattatgtctgaatttggatttgaaatatactgataggtcaatgatacaaatatttgatactaaaactcaaaagagaaagaaatcgagtataagaaagatatacttacacgaaataaaggatagtgtggtttaagtggagtagaaagttgaatgaagcttcgttctagatatggaaggtccggtgggagaattagggttgtgtacgactctaaccaaatctttgggtttccttgttccaattctctatattcgtttcgaaagcaacacatacatatattgaatcttccatttattctctttcgttttcaagttcgacgtctctcccacttttcaaaagagaagtaataaaaaatggctttcgtccatatattatggtatcatgcattgaaaaccatgcaacatcaaaccaaaacacgagagggtgcattttcatgagtacccatttgaagtaattagacaactctgagatttgtcaatggatggtcgtagcatgctttgaggtatcaatgaacttagatgttaagagagtatactcgccaaaatacggaaacaagagagaacaaaactgagaaagccaaatccgtacaagtataagcctcacaacaactcaagaaatcagtcttggttgttcagaattctgatgagaaatacaaattctccctgagactaattattcttataatgtaacttggatagtataagaagaaaacatcatatagacgaaaaggtgaatggtttgagtcgttgagcttgacccttcttatgttatgacggtgggggctgatcggcctgtgaactcttccatcttcgacagctttagagctaagtcaacctgtgaatcacacatcaacaattacgtatttgattagagaaaacccctttggtattagctaaatggtaatgagtcggaaaacagtttatggatttgaggttttatagtaagcaactgaccagaggagacaaagcttcctgggattctcggccggtttttgaagcatccttttcgtactgttcgatgtaaagccggatggttgctccttctgagccagttccagagagacggaaaaccttcatatggtttcagatataacaagagaggattagttagttttgatttctatcactttgttcttagctggaatgtatccaagctcaaataccgaagaaaaagatgacttacaagtcgtgatccgtcttcaaacaagtaacggattccctggtgcttcgaaatggatccatcaactggatctttgtactcgaattcatcagcactggcgacgcttgccacgtccgaacgaattcctttcacaatcctgaataaaatcaagagagaagaagaggttagaaaaacagagtaccaaactgatgagtacgtgttcaagtataaaaggaagggatttcagagaagtggaagtgtgtgtacttgttaacttcaggaattgaagattgcaatttgaccaaatgctccatcagttccttagctttacctgcgtctacattctttagagacaaattttgagatgtcagtaagggtactgtttcttccatataatatggtataattacaatcaccaaacttagcaacttttacctcatagtcgtaacgagtgtaatagtgacgaccgtaggtagcccaatgctggcggacaatgtcttcaactgacaccagtttagcgttaccgtcaatatttcccttgttcttgtgagcaagtatagacatccatgcaagaactgcccatattccgtctttctcacggatatgatccgagcctgtgaaagatctttctttcagaactgtataggttgttttaaagttatgaacagatgtgtgagtgtggaaatagaaactgaccagttccaaaactttcttctccacaaacagaacacatcccagcatccatcagattaccaaaaaacttccagcctgttggaacctgatatgtgatttaatagagatatgaaattaaattatgtagttaggagaaaagaagctggatagaagttgcacggtgacatgtacctcaaagaacttcaaattcaagctttttgcaacgacatcaagagcagctgaggttggcatgctcctaaaacaagaagtggaagttacaaaataatccacaaaaaagatatattaaaagagttgtatacacagaattctactagaagtaaaaaaagagcccaggtgtataataccttgcaacacctttcaaaccagagctgaagtacgggatggcaccaatagcatttgcagcaattatggcaactgaatccgaaggagttacaaagaacctacaaatgaagagatactttaagtttaaaagtacttggtatactagttccatggatgtatctctcttgaaaacgtcagtaagctaccttttaccaaggatcatgttacggtctgcatcaccatcagcagcggcgccaaactctggaggttcacctccagtgtcggatttacctaatcccattcgtgccacaagctccttagcataggtcaaattgggatccggatgccctcctccaaagtcctcctgcaaatcgttgtattgtggtaaatattgagcctggaggtgtatttgtaatcatttatggaatagcgtttcttggttagacaaaaataagaccttgggagtgcagttcaataatgcgctttcttgcgcaccgagttcttcgacaaagatgcgatgtgcataggctccagcaactccatgcaatgcatcatagcttcataaaacaaagtaaaatataacattacagtgatggaacatatattacaaaacttaactcaaatggaaaaggtttgggaaccaatgttagttacataccagaatgtaaactttggagatgatagcaatttccggatggcttcaaaatcgaagattgaccttgaaggagcgagaatttttctttagaaagatcataaaaattgcacatagaccatagagggagcagattccagaatcatgcttttaaattgagggaccactcacttcattaatttaacgtagtcatctgcgggatcaaaaacttcaacatcaaattttccttcaggtccttcaaaactggttacaccaacagcagaaatatcaacctgtcgcattcatcagatagaccagatcaactatgattcaacaaaagacagatgatggaaatctataagaggattcttaagaatacattgggtagatcttgtgctattgggtactccttgattgtcttagtgttctcgtaaattttatcagtgattgattcaggagcaggtcctccattttccatattgtatttgattccaaaatcctgtacaaggggtatggaatcacctcttagtcttattatccatctagatatcttattattaaaaaaagaacaaataaagagatacaaaacgaatagttcaaatgaaaggatagcacagtagagatggaacaagaacagaacggacctcagtagggccaccaggattgtggcttgctgttaagataaatgctccagttgctttcgatccctgtaatcggagactggggttaagtaactcaaaaccatcattacattttgcgtcatgcacaaacatagcaaataaccaaaaaaaacaaaaaacaaaatgtcactacaaccatgagcatagagaaagaaatctcacatcagcccctgatctttcacgaatcacagctgatacagcaggagttgataacagagtgtttttaccaacccacacacgtcgtacaccattagctgctgccatcttaattatgatctgttaagatacaaaataaaattgtatgaaaagcagtaaaacatcttcatctgtaacagtatgaaccggatttgtaataggagtagatcaaacaaacttaagtttcagagatttcaaagtcaaacaaaactttaacttctataaacctctaatctctctatagaggtttcgatgcaaattttagagatgaacacaaagaaaaataagcaaggcattgatgataatagcaggccttcctaacacaggagttccctccaaaacattgtaaatacatgagcactaattcataattctatggatacgccaattacattcacacagatccagaagacagggaatatcatcggccttacctgaacagcatcctttgagtaataacgaccatcaccagagaccacaagtgtggcacctgcacatatgaacaataaacactcatgaatttttcgaatgagcagatatctctgagaagctaagatgagtatgaaaaaaatctcacctttaactttctccgccgtaagagcattgaatgttgcttggacaaaattctctagataattgggttgcttgaacactttcacctacacagttagaaaaaaaaaaaaaaatactaatcagagatacaaaaagatgctagtttgatatctgcagagagtagaacaaacaatcgacactcgattgattggataaaatgatcaacccaaatttcttttatcaaaatatctgaaacagatctgatcagtgagtctcaataaacgtcattgcagatcgtatatacgttaaacgaagatctgacaataacaactaggctcttccctagtttcaattatacacaaattcaatccatatagtctccatttcgctacaccaactcaaaaaacgtaatttcaagctctatcaaatcaacattcaccacatagaagcgtcccaaacatatactcaaatcaaatataataaacgtgatctcgaacttgatccaaataaaataacgaaaacgaaatttaaaatttgtcatcattcactaatcaatatagattaatgcatagatcaaatctaatcagatggtcaatctcacttcaaaatcacactcaagaaaatctaaacagatctgatccagatgcaacaattcgatttcgtttgattcagaagacaaggatcgatcaacgaaccttcttacgaagaccagaagttcctggtttctggccatcaataggagatgtggatacggtagaaaccttgaaaaccatattcgctttgagaagaacaaagatcaaaatttggacgcagagagagtgatgatgataaaagcaagcagctcttaaataaattacgcaaaagagaagcttgcttaaaagctaaacgatcccaagacacgtgtaaccaagtgagtgaactagaacgtttctctcgttttcactgacacagtaagaaaatctcagccgttggattgtattttcagattttaaattcatttttgcttgcgtaacatttcaaagattaaatatttgattgatcatgtgtaatctctagaatatggtaatagtaatatacgtgctacgtaatccgattatcttaatgtaattaacttttcgtatattcgtctcacatgacaaatcatacattatattattctaattgattccaaaattttacatgacaataatctgtaaaaatgtcttaaacgggtaaatttctgagtaaccgaagagctttctcccattgtggtcgttgagacataacgatacgtctcaatactggtacagctcctgctcttatgatggctgtgtggttctcactgtccatggttaagttgtacaatactgacaaactcgcttcaacgcaccgctcgttcctttcttcaagaagcttaaccagcggttcgatacctccttgtgaagcaagtgtttggatagattctggaactccctcggagactatcttgttcagttctaaaaccgctgcttctttcgtttctggtgatgaggaaaagctcatttgttccacgaggctcgggatcgttttgtacagagttacctcaagattgatcggattgttgagggattgagagggagaggagagagcggtgagtttgacaagacaagcggcaacccagtctttgtagtgtagagggaggcttgatcttaggatcttccttactaattctatgaagaccgcggtatctattgtttggcgaaaggactcggagtcaagaagttttgtcagtagccttgaagcagcggaaatcgtcaaaccagcttcttctagcttaagcagatgtttctctaactcctcagcttcattctcaggttctgcatttccataaaaagtattgtatgctgttataaaattcaaacagagttatatcaaaagataagttttgtaccttccaggactttctgccggagagcaagatcaagaacagttgtgatatccttggagatgatcgtgtccatgtttggattactgattataccaaactcgatgacagagattgcgtttcttagcaggttcggagaggctgttttcgcaatctggacgagccgagaaaaaacagcagcgtccagaacttcctttctgttcattcccatccgatgttttgagtaattaatacttctaaaaaaacaaaaagaatgaatgagctgaagataggaagatcgagaagaagactgacctggagtctgcttttgatccgttcaccggtccttcataaaactgtagcatgtagagaaatagcataagccaaatgaaagcagatttaatgtataataatcaaccttggaaaataaacacaccttggattccatttccttgctaggatctaagatatgagcaattatatccagaacctgcataacatagttcacaaaataccatttcacgtccagttattccataatagcctagacaaagatatcaaagaacaaaggaagaagaaaatgaagtcatacgtgttctgtaacgtttagtgagatctctggctgcttcagaagattaataagaaaccatactgcaccttcagcttcaatcctctggcaaacagtgcggctgcattacaagtataaataatctcaacctctgaggagaaactgcttagtaaaaatgtaaagaatgctcaaagataaacacctaagtgataaatttttcaaggcacggatgacgggtaatttaacagtctctttgttgttgttggctaaaagctgaaccaaaggctttacagctccggcttccatgaaagaaacccgcatatcctcgttgatagatgcatcagcaattgactctgcagctcttgtagctgccaattcatctgccaatccaagaatcaagactaatcgagccacaccatctacacaaggaagaagggtaagctgctgagatttccctggcccttcggacttaatttccttctcaaattcaattgctccaatacgggcaaggaactgctgatttgtcctcccaactattgctttcattttggcttcatctacgtcgtcaacattcttgtcaacatttaaaccaaggagcagctcagaggcaccaaatcttgaaggagcttttgctgtctgctcaatatttataccatctggtaaactaggccaagaatacaaatccggtctgaaggacttataagcgtctgcaccaattatgggaatgggtacaactccctcctcaatgacgagaattctgtagtattcgtctttggctagctccaaaagcacatttcttgcttcttttctaataactttagaccctttgttttctgtattatcggctttcaacaattttgcctggattccaattgggaaggtaataagcaagctgaagcatgaccaacaattctacggttttccatatataatatcattgtcctaaagcctaagtgattctcagccaatttcacatcctttcagtaatttcaattctcacccttgactattagcaatcatttcaatctaacatatctaatatattgttaaattctataaggtgaaaagcaaggtcttaccagttttggtatgactcctacttcaaccagaatcttgtgagtcgagcggctaagggctagattggccaagacgccaccagctgcttcctttacgtttacatcatcatcttcaaggaaactaatgagtagcctaaggatatcaaagtcagcaaccttctccctaatttcttcatccacagtcagattccacagagcacatatgcattgttctttcacctgaaaaaaacaaaacatcgaataatcatacatcacaattcaaatccaacaagcaaaagtatactactttggaatcataatccttcataccactgtagctagcgaaggtcggctcagtagagcggttatctcttccaacgctccactctcagcaacggattctctgtacagattcacagaagctatagaccgtataagcccagcagcagcttcacaggcggagctggactcagacttgagaagattgacaattagattcaaacaaccatgaaactgcattatcgcatcaatacatttctttccacccaaagagtacttccatagcgtctctatcgcctgctctctatcaagaggatcgttgtccaaaccgagcattcccacaaacaagcccacatagctatcaccaacacctgaagagctttcactcctcacttcttcaccatctttaagctaagcttatacaccaacaaacaatatcatcatcgttcagtatagtaatcagaatacacaaagcattaacctttaacctataatcaatgttattttcctgatataacacaatctgagaaatccgagctcattagagagacttacagtggtatcggaaccagtttctccactgttggaacgatcaaaactcgaattgagctctgagaaaccatgacgaagacgacggttcgattgaataagtactggaaaagggctgaaggagcgctcgcgtcttattcttctagattgttttctagcttcaacagtgagaaactggatttgggtgcttgagattggtaacagacgcaaacaaggaagctcgagaacgccgataccagaagctattgtagagagtgacattaagaagcgaatcaattcgaacgttccttctgtgaagaagctatctgattcttcaaaagttctaaccttttctctgataaactgagacgaaggtactcgatgtttcggctaaagtttgtttttttctgcccaataaaaaaaaaaactattttttttcacaaaaagaagaattttgtggttaatgagaagctttaagcaggtatactttgagggcactgctctcaactggtgaaatttcttcagaagatacaatctcggaagagttgtgttatgtatatatggattgaacaaatggactacgagcttacataagagcaaatggaaatataacttaatttttcaaaagaaaaaaaaaacaaagaatatcttaaattagaaacagtctcaactctctcaactacaacaacttttgagctttgaaaaaaactcctcaaaagtacatgattacaagacggaaacctccttttctcactcattagcctcctaacctccccctaatgccggtcaggtttgtaatcagagagcataaaaaaggcggaggacttctctacaccgacgataaagagactttcttctcttgcttatcgtctccctcatatgtattcacttcagttcttcaatgctgtcataactgtctcggtgaatttgttgatgtccaatgactccaccaggttctttaggtaagctatagcctcagggttggcagacagagcagcagcaccagcaaaaccagtagcagctagaagtgcagcagtggtagctatacttttgatgcagccaccactggagagtttcccagcgatcaccttgcagtacttgtctgcgtctttgtatagggactggcttacaccattacctccctcagtaagagcttcctcgttctgtagtttagtaaaacatcgttgggtatttaacagttgatgagtaatgagtaatgaatcattggccgagagatataaaagaatattagttttgaaaccttttgcctcaagctcttcattgtttggttgagagtgagggtttcagcaggagtcagcttgacagaacgctccttccactcgccaatgagctttttaagaacagcaacactggctttcaaattgtcggtataaagattctcctgttgacccacaaaccggaaacgtcaataagtaaaaatccactcacgaataacctcctcctatgtgggaaaagaaagagtgaatcttacccaatgcttgcagcaatcaacattttgagtgagagcccagatagtgattgcagccgcttccttggctaataagggattttctgtaccaagacattacaaattttaattgcactgtcttctagaggatgtgtaggtagaaatttagagaaagttttgtcataccttccccggctgctttcagagcaaaagtgaatatttgctgtgtgacttgcttcattgccttactcccaggagcaccagcaagagacacctccttcagcaagggatatattgcctcaaacctctctgtagcctgcgtgtcaaaccattctagaggtcaaaaccaatccgcattcacttaaatattgtattcaaatctcaacgtttctttaccttcactcttgcggaagatgcagggaatgtaagtcgaaccaagatctcaaacgaaggaggtggaatcaatcgctctcccttcctaacagccccatttacaagtatggtccgggccttcgggttggacaagatcctgcaataaaaacacaataaccaagattagataatcatcacatagaaaacaggacatcaaaggaaaaacttaactcacctctcaaccaactgaagaatgagatcccttgactgaggattgcaactcttgctactgaccaccggtaacaagttgtgagcccacgagtacaagcctactgatatatcaccttgggaggcctgtgcatagttggcagttaagagaaagcaaatttcagaatcatctcaatcatcaaaacaatacattttggttcttcgtttatactattatgaatagaccttcacacacctgagccatcatccaaactgtaactggaagcttatcctgtccctgatacttgggattctccctcaaagttggcaatatattagttaaagcatcaggtttcttacgcaaaaccattgctaccgccacaaatatcgcaacctattcatcaaaagaatcaaaaaacggtaaagctagtaacacaatggtaattgataacaagttcaaccagactgacaataatagtctgataaaagaaaagtgagtagtagtatgaccaaaaatcgacatatgcatccacaaaacctaggcaatctaattggtgtagttcagcccaacaagactataacgttcagctaccataatacctgagatttcgaagaagcctgttgtgctcctttcttaccacccttgacacctccttgttgtacagccaagtcagcaagaatacaatccaagccccacaatacaaaggctccaagtgcctcaatgggacgttggttaatccaatcagctgatgtcttatacactgcttcaggaatatgagaaagtggaatctgttcaaatataagtcaaacaatcacattcccatagctacaccattacgaaagctaaacctttgactcaaattcagaatcacaaagatgaacagagagatagtgctcacatcgatcaacttagataaaggagactccttgaacgttttgacccaaggaaaatgagctgatgatacttgagagagtgatctcccaaagtaatcagcaaatttcattagctgaatctctggttgactcgcatatgattcctattcaaagtttcaatttttacttagcaaaaagatcacaatttcgactaaaactaaacagatcaaatcgacattaacaactatgcacataccgaagcttcaacgaggaaagctgcgagattagatacatcaatcttagcagcagcttcagctaaagtaaccttaggcttcttcaccttcttaaccttcggtttcttaacttcctccgctttcaaattctccttccccaccgcgatttcactgtcgctgtcatcaaaatcatacccttcgtcgccgtacccgttagatcgccatttagatcttcccccgtccgacacatccgccgtatcggaagctttcttcgcggcgaggatctgtagatgacgaccttcagcttgctcctcaagagaacggaagacgttgcctcctccattggataaagtaccattgggaattagattcccggtgacaccattcttcgtcgccgccgcttgatccgccggtttttgcttccggttacgttttgggtacactactttcttccaaccatggtcgtcgttgtgagagttaccattggtagtttcaaagccattgtactccactgattcaattggatccatagcttttcgaagttaaaaattcaaactttttctgttttttcgtttcccggcgagaaataaaaataacgacgacgacaatgagacgactttgatgactggacggagaagtataaataggttaaaatatcttttattcaaaaaaatatgacattttatattattttttatgacgtcgataatatgacaattattattttatattttgttttcgttgtcgataatgtgatgtattttattagcatttactgtttgaccaaaataagaaacaatatttactatagtcggaataacaaaattatatcataagaatgcttaaagtgtggtatatgaatttctcgatccgaatctggataaatatccatatttagtccaaatcttttcatatgtatcaatatgtaatttttataatcgatagacaattatttaaaattatatgtttattttttaaaaggtggaacattttattagaatttccctgacaagcaaattctaatttttttttaatgaaaaatcattttatattttgctataaatgtagaaaccttttagtaaaactgtaaaagtcaaatcttgaaaacctgtttctttggatacctccaccactcttattcgcattttgctattttgctctgcaatatactctcattaatatttacctacatttgtttccgtagcaagatctagaaaattacagccttcaattatacaaattaacgaataaaaatttttgtcttctttaataatttgatttttttgattttttgtcaagatgacttttagtgataaagagaaaaatggaaagtggtggtgccggtggcggtggtggtgaacggtgttgaagttcgtgacttcgtgcaagcgccaaacaattactctctcataatgtcaacaaaattaaagggctaaataacaaaaccagcatgcatgtggttttgactctctaattcatcactacttacgttttgtgacaaactaattaaatttaataagtacgtgaacacaacgtgataataacatgcgaactggtttttgtgacaaaaaaaaatatgggaactggtatcctacttacgtgtttgcatgtagtgaattggaattttgtctatcatattagccatacgccaatcaaaaagaaattaatggatcatgtgaggtcttttatggcttatacttttttgttaaaattaggctcaaacttgttgattgaggctttaagctcataaatattcatacgaaattctatcgaaaacgacattgtttttgtatggactaaaaacactttaacattgatttttccaataaagagaaaaagaaaaagaaactccaacaatttagaaaactaatacgcagctagcatatgcacatgcatatttattgataacttagcaacattattatctatcaggtactgaagaatgtggctaccacattttcctctaatacctctaaggcttttccagatttaatgcaccttggagtcttgtattgaccaatagaagcaccttgtgagatgaagtaatccatgagagaatcaaatgtcccttgacgcaccacttttatctccaatggtcctacagattcctccttaaaccgacaaatcttgtaaacactgtctaatgaatcctccattagtaaacaacactccgagaatgtctcttctttgagctctatgtgctttttgctcttcttgtcttcgtttttgttctttacttcccaataaactacgtagtgtcccgggatagtggagatatcagcatagctagtgaagtctattagcatgagatgtgatgagtcaagagtgagttttgcgttattcaccgccttaaacagatcatcttcgttagttttgtccaagtcaatgcttaaaaccacgttgtctcttcttataaacctaaactgaggtgctttgttatggaaaccagtcaccactagaatgtctccaactcttattctatacaagcctgaagcaagaaagagcatgaaaaaacattcacatccacaacaacaaagaaaaggattaattaatttcatggtttttaatattcataatgttttattatttagctcacctgaaaaatttgtgacgacagcctcataacaacatccaagtttgacatcagcaaggtcaacaacatcgttcttgtctccatccactggtatgaactcgaagtaggacacgttgggcatgaatgtgtacgatacatcttcaggcttgcacataggattgagatttaacccgaattgagtctccgaagaagcgtagattgttgaaatgagaggtaacatattattagagtaatagttcaatgtgggaacatactgcaccatcgaaccagtaacaatagtttcaatatatttagcttttggccaaagtcttgtgattatacctttccaacatttttggttgcatatttgttcaatggtgtctgccgcttcaggatgaggcccaccaagaactagagacaccgaatctcgacaaccaatgtccgtgatccactcgctgagctgccctgatcggatgtttgaacacaactcttcccatgaatcttcaagaaacttgattgctcggaccataacggaggcgaagatagaacccattcttgtaacctcgtttctttgaaccagaccacaaagcaaatggcagtagagattttgtttgttgtctggacatagagtgacttcatcagggcttgtgtaagagtaataccagtttgatggacggttcttgaaatagttgctctttaaatagctactgctggcgactcgagcaggcaagccagagggagtgatggattcgagtttagtgaagtaaaacatcatcgcctttcctttctccacatctttcacattactagaaattaacgaatagaatcaatgatttatttctttattttatcaataatttttatcattcgtaagttttcgtttaaatatatatatggacctacttgcttataatatgcatacgaagatcatacatgaaggtcaagttgtctaaatatttttcattccatggcatcatcttttgtgctccccctgaagttcccgtactacaatcaacattttaggaattaggtcatgaattttttcacatttgatttacaaacaaaaatataacatgcaaacgtaaaaaatgacaatattaggtcttatacttgcaatacatgtaagaaataccatgacattaacctcttctttttaccttagtacaaaaccggttataggccgggccgaaatgacattcgagggctctccattcacgacacgttcgatatatggcttaacatcttcataagttaccactggtacgttcttcttgaaactttctttatcaaagcttccaaggaagaacttttggagataattcgtgtttgcatttagtgtgagtatctcctccaatacattgtcttgtatctgcgttacatttgatgttaaatcctctagaaccttcattttatcactggatttttcggagagatcagaggttaaactcatatttggttacctttaattcacatgaaactaagaactgcacacttgcttctataaatagagcaaggacaaaagattaataaatcacgaagcacctgaaaatttgattaaaaatcagaaatattgggaaacgtgtgaaacgattttggaaagatcttaagctaccaaaagattcttcatgtttgtaccttaagaacttgggatatactaacatatgcttgacaatctgagatctctgaaaacaagaaattctatattatggactcaaattcctcggatcctccgaatcacatgcatatgagagaaatgaatggaagcttaaactttacattgatttactaatattatcttaacttaccaatcacatgcatatcagtaaattatgaatgaaaattaccttgagtgtatcacacatacatgtttcattaatatttttctgtcttttctaaaccctattttgagtatattagtcgcaaacattattgaggtacatttggtttattaagcttagttggatagaactaacagatcatcacattgtatagtaccttttcatccatttggatttcttcttgaaatcttctagtttttgtttttttgaaatcttctagtatatctcgatattcatctttatccatttccattaattcattacgatatctgcgtccaaaaatgaaaaggtcaatgttttttttttgttacaacttaaaagggtaatatgaaagggtcaatattcgtttatgaactcgtcattaatttgctacaacactacaacaacttgtcttattagttggtcttttgtttttttggagtggcttcttgttgaggcaaataaacttctcgtagaaaacccaaatgatcatttgaagtagatgcctcatgagattttcaagagttataagaagatggatcgagttcacacgccataaaccgaccaaatctacttgtataatgtatttattcacttgtaaggtcacatccgagttcaatataattgtcacagttttacctctatattctaatataggagaattctactctcaaaatattactagttgtgaattttgtattagaggaagaccaaccagatatatatatttttaaatagggccttaggagatatcagatatgtcatgtttatgtaatatagactttatttataaaatgaaagtagttgattagttactccaagggatatattttaactaactgtctacagataataaagaaaagaaacattgaaagaattcaaaattcgaatcccttaatatctgctattttagtatctcatctcaaatctcaataaccaataaagtctactcttggagaagaaaatgatcaaatttccccaacaaccattccacaatttgcgcctaaagcaaagttgtgattctcttgttaaaattctgcctttttctcattttttctgaaccacttgcaaagtcgaatatactaaagaataaccatgcaattttcacatttttcgtaaatctaaatttattaactaatttaagcaatgctattttcacatttctggtgatcaaagttctaaactaattttgtaaacaaaaaggacaaatactaaaaatctatagcgaaagaaacttctttttttttgttcaaatgaacttgaaacttttatttcctgaaaccatcataagaaacaaaaaaaacaaatcaaaagttcataaaataagaagatcaaaagaacaaagacacaaaccaaacatgagcattcaaagaaacagagaagacaacatataagtagtctctctaatgggtagtcactttaagtcttaaagatttattaatccaagccttaaaacttccaccagctccttttctagctccattaatcggaaaattcgatcttcccttatcttcctcaaccttcttctcctctggtttcttcttacacaacataaagttcctcactcccaccgacccaattgcttcccatggactcaaagctacaccaagaaaactaaaaattaaaaaaaaaacaatctttatataatcacaaaacagaggagaaactttgcgtatttgacaagttacctccaggtccaaccattggacaataaaaaacaaaatcgttgaaatcagatccaagaataggaagacgaccttcacgagcataacatttcaaagcagtatcaatcacagatgcaacaagatcaccttcattagcaacgaaccggatcggaccagcactaccaagaaacgttacgctgatcaagattctgtttcctttaacaatctgattctttttcttgtaaagcaacatctttttttcaaaattctcaaaaaatcaaaacacagaaattattattgaaaatatgatcggagatgatgattgattggttcacgggtcaaggccaatgcaacggaagtaccagccttctttgcaagaaccgaatgagaaaacagagtcttgagagagagggatgatgagaaagctcgcccttttagttgaaagggtgagcctatgattatcaccaatcagattagtttccaccattcacaaaacgtcaccagagagaaagattatcaaagagattaagtattccgacgagggtttgccggaatgttttctcggtggcgaaaggtggaaactttaaggaagaatccgagaggaggaggaggaagaagaagagaagaggaaaatcgaatttgtgattttgtgattttgatgagaagagatgattagatgcgtgtagaaaggtctttaatcaactttagggcataaaagttttttttgggaatattttatttttgttaaacgcgttttgctttttttaccgtattttaagtaaatagagaaaaactcaaaacaaccttaaattgtgataagtttgttttgttgtatgcataagcgaaatacacgtaacagttcaattcagattttctgactattagactatcttaaaataaataattatgataaaccatataattattcgtttaatgattattgatttttggataactataatctttagttgttacatatatagttcgaaaaagcttatacatcacgctgacatcttgtaatttttaaacatcctcgtcggtacggatttgctggctgttttggtagacacgtttgaggatttttaggatcacatcctcctattagtggtggtgttatttcctcgtacggattcgttcggtcttcaccaaatctttgttttggatatccaatttctttacgagcttcagcattcatgatgcttaaaaacacaaatgatacgagtactgccacaagtataaacctatttgttcctctcaaattgctcatgattaaattatttgttttggtgaactgaacaatgaaaagtttcaatctgttgtatttatagtggatcaatcttatgaaggattatctatatataataagtacatttttatgtttagaagtgaatttacatgtcttaaatctctaatctttagttgtagatatgtcttacatatattgaaatggtctattaaaaaaatccatgtgtcaatctttattttctttaaaaagtacaaaagggttccaaattccaatccttttagtattcatagtattccaaatttactttaatttgtcgatacataatagtgtttatatctatatattttatattagtgttctttttggggtagtcttacaaaatggatttacgttgttcatatgtttttggaaaaacatgtattttatgtcatgaaatcattggttggtctattgaaaaagggcttattgtcaaaacagatcattttttattaaaatttttgattttgagatcttttaggttgggctttgaaaaagagtactttatgctagcgagaaagactattttacccctatcaactgtatcttcttcttttttctctttttccgaccaccaccacgtttcctccgccaaattttttagatttgtttctgttatattctccaccggattcttttgtttcgactacgttcacaaaaactaaaccctaaaggatagtgcacatagggaacccaaggagaaaatcaaacggattgagagtattaatcttcttcctctcttttttctgtcaaattgtgaagtagataaaccaaacttgtctatctaatcgaaaaaatgatatagtatatgctaatttacacaaacccaaacccaaaacaaatgcttgaaatccttttcgctaactttctaatggcttatcaatttccaattgagaagcttaaaatctcttcttcttttttcctgcaactttgaaaattggtgtattaaccatgaattgagtttgaagagaggaaggagaaactgaatctgacgacagggaggtgccaacaataacagagcaaacatgaaatttgtattgaccatatgataagatgtttcaatgtcgaatgaatgatttgatgaagcaagggtacaagcgtcatttcatataagaaaaagtacctcaatttgtaaatcattataaaagtacctaattttgtaagtttttaagtttttcaggcattatagataaatatctcattgaaaaaacaccatttttctttgtttacccacatattaatttaaaagaaaatatatttatttattttaggtctatatattttttcttgaaggcaaaattttatacagtcatttccttttcataccgatagcaacaggaataattgtttttacgaaagaaaaaaaaaacacaaactcacaaactatgacaactagaccaaattcacattgatctaaatgctgagaatgcattcgttaatagatgttgactcaaataccacatggaggtaaaacaacatcaatttatatggcgacgacaaccatttttcctggctatgcatttcttgatcatgacaatagatatatggagccaaattaaagtgaactaaagaaatataaaataatatatttattcattaatggtcgtctagttgcaatagtttcatatgattttgcatatctataattttaatcatatattgttcagtagagctgcttggcctttgccatcactgcgactacatctagtacttttcgaggattccgaagatgggcttgcttacggcgatcacgttcacatcttgtaattttctcacatcctcgcttgtacggcttctccggttgttgtggacatgaaggatctttaggactacatccacgtgcaccatcacgtcctattgctggatatccaattactttttgagcttccaccttcatgatattcataaacacaaatgataacaagagtattgtcacgagcatatgtcttgcttccattatgatcagatttatgtttttgattttactaaatatatgtatttgcatgtagaaaacaaaagtgatatatatatatatatatatatatatatagtgaatctattttactaagaattgtctatacatattactgtttaagtaaatgtgacttttttgttaatcaatatgaagtgaatttactttttcaatcaactatttagaatgttttttgttaagataacaaatcttgtgttattcttcattcctgatttattttcaaaaaattataaaatctagtgttattgaactatagatctatacaaatcaggttttcttgttgggtgatttactatagtaatccgctatatttttaaaatagccatatctagatgtatttatgtcataaaactattgggtggtctattaaattgatgtattgtatagtattcatatatttatcttcaaagggttcaaattccttggtatttaaattttatagtggctatatttaagaaggaatgtgtaagactaattcttagaatatctatgaaatgaatctaatttgtcataaacttactggtcggcctattgtaaaaaaaatcacaagtcctattcaccaaaagaaaacaattcaacgattactattttaatgcaaagcatataaagattctccagaagatgctctgtgtagacaaaagtcagagactttaaaagaggccagaaacatatcatctgcttcattcttcttctgcaactagtttctcttctaagaatccaagtacaagacaaaagacaagagtccgaggagacatggagaatctggtgggacttcttagaatcagagtgaaaagagggattaatcttgttagtcgtgattctaataccagcgaccctttcgtcgtcgtaaccatgggttctcaggtatctctcttatgttctctgttctctgtgttataaagatcgtgttttgatcatctgaggtaagatagattagcccattatactccgtagattccaattttgaaaaagaggaaactttagaagatttggaaattactctgtttttgatggaacttataatggacttttaagagacttgtgatgatatcaatcgatttgtctcagaaattgaagacacgtggtgtggaaaatagctgcaaccctgagtgggacgatgaattgacgcttggaatcaatgatcctaatcaacatgtgactctcgtgagttagttcttgatcttcttgaaatgattcttgatcttaaaggagtcttttggttttggtgaagagattatgtttctgagtttttgtttgttatgtttccttgtaggaagtgtatgataaagatacgttcacttcccatgacccgatgggagatgcggaaatagacatcaagccgtttttcgaggttcaaggaacggatattcaagaactcactaatggaaccgagatccgtagagtgaagccgagtggagataactgtttggctgaagagagtaggatcatcttcagtaatggaaagattcttcaagacatgattctccagctgagaaatgtagagagtggtgaggttgagatccaaatcgagtggatcaatgttactggttcaagcgatttttgaaggagaaatgtatatagaagttttttatatttgtttcttctgatttgtaataaggcagcgacgatgtcatatactcatatctaactcaaaatgttacaacttccatatgcacacacaaatagggattcgttgaactcattggatattgatttatttttcaggaagggtgttacacaccttctcatactcaatgtgccacttcatagtacatttccaagcccttcttgcttttgctttacatgtatagtgatcaagaagctctttagatctttcattacatctccttcgattatcatagattcgtaccaacaacaaaaaagttgagttaactcactcgatatcgactgtacacaagattgctaccttacttagcttataaagaaaacaatctcccttttgtttttttcatcatatagtatccattggctctctatggtacctcaagggattaaaaaatatgatgtttctaaatagctcaagccctcaaaacgtatacaagagttacggtgccctaaggtcgcgcatgtatacagcctctatatctcttatacacgcgaaaccaacgaaaggcatggctacgatgagtaagaccactaaattcgattgtatgcgagattagacgtacgagagtgatcgattataacagtggataacaaaacatatagaattggttaaaagttaaacaaataaaaacaaatttaggtcaattggtgaaataataaaaaagtgatacaaaattggttaagtaagatgattctaataataatatatcattaattacaagaaaataaaggtaattttgacggaatttcccatgaaattttaagacttgaccatcacatgaattgtttgggcttagcaactttaattattgtacttataagaagtatacaactttatttgggaagtctgtcagttgagctttgccccaattggtttatctggtagtcagaaatgcaggcgaccttattacctcctaccattagtcggaaagcattccaatctcgggacatacagtgtggtggtccttcggaagaagttgactctgaagtacttcagtgcgtttctaccgaggctggccggatcagccgatagggtttatcataaaaaaaaaaaaaaaaaaagtagacgaacgcttttacttttcttaaaacataacatgcataggcgaaacatatagcagcaacacaattgttataatttgcaactaattaaaaacttcaaacatacgtaacacaaactctgcaatacttgcagttcagatctcttcatagagagagcacattattgaaaatttgagatatcttacaaaacacccacaaacatagatagatagatagatagatggatatccaaggaatcctctagacttcggacaaaagcatttcgtccattgattcggttagcttggcaaacaactcgagcagcttctccggaggagccaccttctcgtcaatcctctcatattttaagtgacacttaaccacacttcccggtcctcttagctttggggttgcctggatagtgaccaagaagctcttgaactctttcgtcagatctccatctattaccctgagcactaacagattcttctcctgatccactgcctcgatcctctccctcgccaccttgggctgcccatctgcacccaaaacgaagggttaacctatcaaatcttgtatgttgttgcaaaattatattataaataaacgtttgtgtttaccaatagcatagttccagaatatgacactgccaactttgccaaactctccctcatgcaaagcacatccctggatgtcaggagtggctttcgcaacatcttgtggtcttccagagagcatgtgatggaacttctttgccgatgctttgatctcaatatctacctcaagttccccttgtagagaagactgacgcgtagcttgtgccatttttcttatacggatgttttgcttctctaggttttaatgagagtgagtgagagtctctttggaaattcatagccacttttatagaggaaagaataagcaatctgtggcaagagtcattattctaaaacaacagagtttcggaatgttggaatatatatggtcccttacggaagggaaggaatcagaccaactagctgataacaactacaatttcttttagtcagttgtggccttatgggaatcgattcagtgatgtgtccacaaaaaaaaaatatgtttcaagattgttataggctgctattatcgaccacatataccaacgacaaaagtaagcccgttcagaagaccaatatcgttattcgaaagcatgtacgttgtcttgaagccctgcttgtagaatctgcaaattaaataacttctcgtatagtactattcacatatcacaacacaacttccattaatcgatttttgggagcgtcatgtgtatttttatctaataactctaacaaatcattgtaaggaaggatgagtaattcctctaagctttttacgtagaaacttttgcatgtaaatacttatatgtaaaatttatagcgaaaatgaaaacatttgagaaatgtatattagtaaaagagaatcacttttttcatgtcaattttctcttttaggaaattcggtgcatggaattcatgcttagttagctttaggaatataaattcctcatcattgattaatcaataaaatagatagtataataccatactattagaaaataaatttatccaataaatagagtcatttaaaaaaaagacgattgtgtaaacatttaaaaatttaatggttggccatttgtaaaagtaagtgcacacaacaattgaaataggtactttgtgtcaaggatatgatatccttgacacttcagatctattctgtgagtaaaattaatactgtattttcatattagttaatatgcgatttgtttcatgtcatcatttatgaaaatttataaaaatattattttcatagcaagatctgatttatttgacaaggaactcggagacattgatgatatattcatgattcagacaacaatctagtctcgaggtcgcgtgtgtaatcttcaacgaacgcagtgtatctggtagggggaggaacgtcgtcatttaacttctcgtattcccatgtccactttgcaatacaaactttatgatccttaggaacaacgtcaagtgttatcttatagctcttatattgctttaacacatctccttcaagagctaagaaagacaccgacttgttctcttcatctacgtctatcttctctttgatctgctccatttttccatctataataaacccaaagtaaccgatggaattcaagaattagaaaaaaaaaaaaaaaaaaaagagagaaaaaaccctatttttcaagactccttaaaaaacatagacagctagttatagtacataccaacgatgaaattccagatctgaatagaggagttggatgtgggatcgtcacgatgaacataaactgcctctgtcttgtccgtgaaatttccttctttcttcttgaaagtcttgaagaatctctcggcggtcatattcacttggatctctaattcgagagtctggacaccagccatggctctaagataatccagtctctcacgctgacttttctgttgtttatctttaccataacaaaaagcatagagtagaaaaccaagagaagaaaacaaaaatagaggtaggcaaggtaggtgccttatgcgtagcagtttcttgataagcataacacgtgttgttaattcatattttaagtattgtctaagtgtattatacaatatgtattttcatttttgtgtttggtaagaacagtatttattttcatttaacaagtaacaggaagcgtaattttgttgttggtaaactaaggaagcgaaaattattttattaactaagaacaatatttaaatgttttcttttcaccataaccaaagaggacacatttcataagaatgaatatgcgacacacactacacgttggtcttagcccatatttggcccagacctataaagtataaaccatgcatgacgctgactctgagatacgttcttggttcggatcaaaatcaaaccggtatataaaccggataaaaccgggactggtaactgagtaagaatattgatgaagagaatatgccgtggaacagagagagttaaggaaaaagattcgtgagtcattcgcatctctctgactctgattctctctgcttagttctcctcgttccttctctctctctctttatagcatttcttctccaacaattcttttcgagtttttacggccattgcttcaggttctatctttctctataggtttgcatgttttctatgcaatcattttctgtaatatagctatgtgtgtttgcttcttcttagcttttccgttgaattttatcgaaacgctatatgctttgtggcccttattcacataaaattcatacgaaatggaaaagagaaaaagcagatacaattctggtcattgataattcagcatatcatgcagcaatcaaattttaggtgttgacttgtaaccaatatttctctctggaaaacacatgtatgaccaattattatggtttaatttatgaatacatttttatttttgtcatcagaacagaacaagggagacaacaaagtagtttgattattctggtggcgtatagataaatgttggttgtctgtggtttagcaagattaccatgagtctgcaaaatgtatcaaagtcgagcaatgcccttgagggtatccacggggttcatgtcacgtctcattctcctttctcatttgagaagacaactcaagttagtgactttcagaccaacaccaaatcctctgtcatggaatcaaatcaaagactttccatcgagtatgttacataacattaggttgtgacattctcagcttttgaaacggtttcagttactgatttagtttctctgttacagacgtttttggcagcaaagacctccatgcttaaggccaatctgttgcagcattcgcggtacgcttcttgttttcgatcttttatctttccaatctcaagatggttgatcggtctttttattatgcaatcgaaacatatgacaggtgaccagagtgtcttagaaacagctgctaatgtggctacttcacttcctttcatcttcctcggaatgcaggcaccaaggtaaaatgttctctttgcaaatatcatttcaagtagagtttctctgacaagatactatcccatgtaggaagaatctgaacacaaaggtgtacgcaaactccctaattggagttggaattgcgtcgagtctgtatcatgcctctaggggaaagttgaggaagtacctgagatgggtagattacacaatgatagccacaacaacaatagtaagttccactcttcttaacccatctccaaattcttctttaaccaaatataaccgattaaatctggttatgtggacagtgtctctcaagggctctaaggaatgagaacccaaaatttctgatggctgcatcagctttagttctaccttttcaacctctcatggtctctgccgttcacactggaatgatggaggtcgcatttgctaaaagaagcttaaaggatccagatctcaaaacagctcataacgtacacaagatgtcttccttgctaggaggtgctctgttcatagctgatgatttcttccccgagacacctttccttcacgcaggctggcacctcgctgcagccattggagttggaacatgcaataaacttcttgagtagatcatttccaaaattgctattcttagaacagtgaaacaaatggtttctctgtttctcctaatcagtcgacattactaagaagcatttctagacttatagtcagtaatctctatgtaagaagtagatcatcatcattcccaaacaaaagagattattgaattataagaacttgttgccaacagtgaagaacaatcataacaattgatccaaatgtcagacaattgcagacaacaaaacaaagaggaatcataaattctatctctttaacacatcactcgtgaagtgtagccatgatatcttcatccctatacaataggaacctgcaaagagaacgaaacacacagtgagaaatcgaaaatactgataaatttcactcttagaggaattacatcgaacaggttaagaacatactctttctctccaagcttaacttgagtaccgccaaattcaggcaaaagaacattgtctccttccttaaccgaaaccggaattagattccctgctctgtctctagctccaggaccaactgctataactctcccggaattcaactgtgtttaatcaaatccaacaaatttctagttcgtccaatcgaagaaatgggtaaagatgagaattttaaagaaattcgtttacctgagatgatttctccggtaggagaatgccggagacggtctttgacggtgggagaatcttctccaccaatacacggttgagagtcgggatcaaacgcttcgccatttttatctgattcgacgacgacgacggagatcggattacgaaaatgttgctctgcttaatttcgctaagatttagggtctagggtttaagcacaacaggtgttccgggtttttaggttattaaggttacttggactttacgtggcccaggcccattcagtatttctaaaattattgagtcaatccctttttatttgactcgtttcatgttaataaaaagtagggtatatgcattaattaattcaacatttttcattaattaggtcaatggtattgacatgcattaaagttttactcgtgatgtagacaaataacatttctcgttcagtaatttatgtacaatgtgtttgtgaaaccgttcgataaaacgttattttactaaacatcacgtcatatcataaaaccacttcatttttttataatcttccatttttgttctttttataagaaaaacggagacactacgaatagataacaaaaatcgaaatttacgaaaatgatcatattacaaaagaaagccacaaaacaaaatataatcaatggtaggaacatgccttggcggaagaagacataggtttgagctcccaaacgtgaaaatattaagtcggagatacaaaaagcttattttgtggaacttgcttgactagcaaaatataactgtttttgtatctccatactgaactacaaagagtcaagcttattcgattgccaattgaagctcccaaacgtgaaagtgtaaatcattgttgccattagtgacgcaatccgagatcagctctcaacatctaaaatttatttaaatatggataatagtttgctcagccggtaaaaatatttcatgagttttgcgtttgggtttacagttaaaaaaaaaatacttcgaatactcaatgttgtggttgcgggttcgtttcaaaaaatagacattgaatacaaatataaaactagatgtcgtcaacattcagcagaccattgatgtctaaatcgatggaaaagtttgtggaaaaataatgcacgtatgcaaaacattttagaccacataggtttgagctaacaattttgaatagaacaattactttattacatagtgatatctctaggtcagctctaaattaaatgaattgacaaccaattggaaaataatgattcaaaaatattgaaacgaaaaaatccaaaccgtgttaaacttatccaaaagtacattcaactttatatccatcttgaaatttcaaaactaaagagcttaaacgaaaaattgtattgaatgtccctacctctaactattctttctcttttggggtcaaaacctctaactattcttgtttttttgttttgataagaaacctctaactattcaaaagaaaaattctgacacttggaggtccctaaagtgggcaaagatgataacaaagcaacacgcgatcaaaagctcaatgtgtcttttaggaggtccctaaagtataataagtatgggttttagatctcgtgacaatgatgaagaaatggataggcactatagcataaatattcaccttaattatcatccaagcaagagtctaaaagaaaaaaggggatcttgacactaacatcgtatcgaatctcaccataaattcaaagagaacattacaagccttgcatcgtgcaccgacctttttactttggaagattaggaggagatcattcacgaagcctaataggacaagagccaagttttaatcattggtgggtttgaagttctttcttgaggtgccacgctagtatataagtctatgtcatgtttcacttaagaccatttgagttcgtgcttatttgttatgattgtgggtagattggtttgacgatttaggttgtatatgtacagtttatatgtagtagaagatatgaaaagaaaaatacagcatctaaattcttaagtataatgttctatagtagaagtcaacaacagaaaaaaagaaagaaaaaaagtgttaggacttgatcacattttggatgaaacccacgtacagctcttttcggtcacagttacgtatattttcatgaagataagaacgtgatgctaacaaacaaaaaccaaaattgcatcaacacatcacgataatgcaaaaaccaaaaaaacatatcaaagacaaatccgtataagtggtttgatgtactatcaagttggttccgaataggggttgaaagaaggttgaaataataaaatcggaggaccgttcttgtcagtcgtcactatctcaagtcgcattattatttttagggacctatatattttactattggacaattgggtcacaccggtcagattgtatggttgcaacttgcaaggaaatggatattgacctcttccttttttcacacttatttgaatatttgctaatcagcgttaattcagacttaagataacacattgtctcattcgacatttgccgcctttgtcccaccttctcattttccttcaaaatttaattcaacattttgattatcttcttacatgtgctaatatgccaagcaaattatcaaatatctatcacctttagctcaaaagttatcaaaaaaagcattggctatatgcctatacaaatatatataaacccagttgaatcattcaaaaatggccattccatcataattagccttctttcttcttcttatataattaagaagattgagtttgactggttgtgaaactctatccatttatttagtttattactaaacattaatttaccatcttgtctatatattattctaatttattttcattaataattgctattactaatttattatgttgaatgcataattttgtaaaatgatgtatatatatatatatatatatatatatattctgctaattagattctaagctacactttgttagtttgacaattaaaaacaaagaggttaaaaatttgtttttgtcattatatgttatatggtctacgactctacaagctagcaatgcagtacggttaatagggtggtttttacgtcgtcttttagtgtggtcattcaacaaatatttattgggtccagtcaaggtaaaacaacgtgaataagtttcattttctacttctcgttttctcaacgcaagaaatttcaggctctttatgtgcctaatttttgtgtgcattcctaaatcaccatgtgaaaccctaagtttagagttttgaatagatatacatccttttctaaattagtgttatttaaaaaaattaaggtaatttgtgaccactataaaatatctttattgattgcactatacaagatgatctccttatttctctatatattattaaattcgaatactatagattcctaaaaaagtcgatgacttgtctagtggaaagccaagagattcatgtgtcatgtcatgtctgaaacatgggttgttaaatgcaattttttttattcattacatacatgaacattttatgtatctttgagctaatatttatatcattaacactaatttaattatggtttaattcgcagcttataaaaatatgaaaaacctctaatttcttatacctaatttttagaatcaaacctataatatatcaagaaaatttaaactcaaaaatgtggatagatgggtcaacaaaatagagccacgcgaatacattaacaagtgcgcaatgtgcatacattccaaaagagttgggtatcagatcctttttctatgaataactccattcatgtcccgttacttttcccttttgtttctttcttatgatattctttttcaatattttaattcgatttggcctaccagtatccataccatttataatattcatttacttgtattatttgacttcgtgttcactgccctcccatgtgacgtggttcacgttttcatagatcattctcatttttcagttattctctctttcacacaatgatttgtttcgcacccaaccaagacaacgttataagaacttaagaagagcaaaccataagcatacttagttaaggtttttaacgaggacaaggaaacgaggaaattaacagtgcataaagaatatatagataccaaatggaatgaatgttttttttatatataattaaatcgaataaatgttattagtaatagtattactaaaacaaaactggtgaaacgaaacagaaatgtgatttaaatggatataataactagaaaatttgatcaaatgcttcgtatgatttacctataggcaaaacgttcgtgttcgatacaaaactaaaaacaaaaatctttgaaaaatacattgttatatcaagctaattttctaaagatgcgggagctagtggaaattgtgatttcaaactccttggttgatcattgtaaagaataagaaaaaaaaaacacgatcagaaatcataatgaaaccaatgctcactttttgttccaccattttttagatggacccggtaacaattagtggatctagaatcttcagtttggattataacttatcgaaaacagtttagtattttgactcaattctgtacattggaatcaattatgaacaaatttcattatatatagttagctcatcttattcttcttaatttgtgttccgacataaaaaaacatagaaaccgaaatagattcagttagcattcacttcttattgagaaaatatgtaggttaaaattgtaggtttttgccatgcatattaccgacgtagataggtttggtcggaattttttctacttctttaataagtttggttagatcattcatcttatatgaatatgtaaagaatgcttttaattatggtcgtttcgtttctttcaccagaaacaaggaatgtccgagattcacttattaaattaatatatacttgatctgattcacacgaaaagacaatcttggagtatcaaactataatatcacttattatactttgaattactaggaatttttatcctccgatttcataatgatcctactaacattggatcacaacaagttggctcggttatgaatttggtttgcaacatatacagtttttcaaccgctgttaattttagtgttaatcaattatcttggataattgttgatgcaagatcagacattatatccatatatataaatatgttatatagatatgtattaatatctttagccaaagacgataagtctaaaatcatcaacattttttgtccgggtcaatgtaacaactaacaactcctactgtagactagctagttggtcgtctgatcgtctctctgtttgttagcgatctcaacgggtacatgaacagatagttatgcattattgatactcaaattttcttagttgttatgtttttaatatgtaactagattttaatccgcggtacaccgcggagataatttatttttttaagttaatatatataaaaattttgcaaattatatctatttataaattatttttattttatagtttacaattgttattaagtaacgtccttccaaacccgttccgccaaacccgtcctgtaaaaaaagctcgcggtaccccgctaatttaaatttataattaaaataaatattttacgggattgcaattgtgttttagtttgtcaaacaaaattttgttttaaatagttgtcgaaatctagttcaaattttgaagaaataagatttagtgaattgataaaaaatgtatttagttgcgttttgctcattttaagggattgcaattgtcttttgggttgtcaaacattttttgttttaattagttgccgaaatttagtttaaattttggaaaaatctgcgtgatatatgggattggaatatatttagaatgtttttcgtttgttaatcaatttattgctaaaaaactaataattaaaagtcagtggcagcctttgtaaataagttccaactccaggatttatttcacaaaatggctgcaaaaatgtatatatagattcacccatttatttattattcatagtattatagtactatcttcgtgtctttttacttggtgtttaaagtttttgtacaccgattgaatcatttttaattttatttttttaaacatcaatttatctaattaaccaatagaaaaaattatctgtatattataaatcatcaaaaccaataaaaaaaaactaattaatattgcattaaaaattaaaaacatcatctaatttagaacattttttcctactataacattaacatcaactaaatacggagaaaacgttgtactgaggttcttgcattttaaaattttggaaactaagaatgttaaaaaaattatggttacaaatatatatatagtgttataattagtacttatcgtacttaataaaaaagatactaattagttgttgttatattattttctacaaaaataaaatcattcaactaaaatgttctatttgtcagtcgcttcacaaaactatgcatctaccataccagtgatcataattataaaactctgtttttgttttttgtctttacaaccacttaaatacgtcatagctatatatgcattattacaagttctcaaggtggcgcgcgaatgttttaattaaaatattatgtttttcttatgtatttcatctttaatcgaacatagaaaatgtgaaagatttggagcatagacacgaatcagttttttttttttacacgaatcaatattcatagggtaaataatagacaaacgccaacaaaaaaaaaaaagagaaattcacaacggattatcggctcaaattacaaaacaaaaaaaaaatacagagacaacagtatacgtgtaactttccgaatttttttttttttcatatcaaaaataaaagataggccaagataagaccattataaaatgtaaagaccgacccgaaataatactcatgtttaaattatcagcaaagagccaagagaggaaacatcacacattggtgacaaaaattcttaggaaaaccaattaatggaggtgcacaaggtggttgctccgccgcataagagcacggtggcaaagctaaagacaaaactgaaggagactttcttcccggacgatcccttaagacagttcagaggacaaccaaaccgtaccaagctcatacgcgccgctcaatacatttttccaatcctccaatggtgtcctgagtacagcttcagcctactcaaatccgacgtcgtttcaggtcttaccatcgctagtttagctattcctcaggtacgtacgtatcaaaaatccgacgacgacccattttcacgttccgatcaataacgaccaccattttatgcaattcttgattataatcttcgtcttcttggttttcataaaaacaggggattagttacgcgaagctagcaaatttgccaccaatcgttggtctatgtaagaatctgaaagtaaaattgaatagaatatacatgaaacattatagaccgttacataaacacgtgtgttgatgtatgtgtagactcgagcttcgtgccaccgttggtttatgcggtcttgggaagctcaagagatctagcagtgggaccagtctccatagcgtcgttaatcttaggatccatgctaaggcaacaagtatctcccgtagacgatcctgttctctttctacagctagccttctcttctaccttctttgctggtctctttcaagcctctcttggaatcctcaggttataaatttatatatttacctaaaaagttttttgtagctttgcatgaaccatgatttatatctgttgaaatatagtgtgttatgtgaggtcaatattgggcctgtgctaggctagtggcagtctgtagggttacatgtacacgctagtattactaaatgttaaatgtcgtcggtgcttatattaattgcttttcaagattagaaaacaaagttaagattgttttcaggtttaatgtttgggtagtacatatttactagacaattatcattattgaccctagtccaaaatataataagctttttagaaaaagtgataaataatcattaatcaatcatatattattattctatcactagtgaaaaataaatattttcataaaatgttctaagaaatattaatgtgtattctaacacaaatataaaataattcatgatcaaacaaaaaagagtaattgcaccaccaagtggcaatggagaagatgttgtttaagaaaaagagacattgtgttaactgtatttattttttaatatgtaggctgggatttataatagactttctatcaaaagcgacgctaatagggtttatgggtggagcagccataattgtatcactccaacagctaaagggtctgcttgggataactcatttcacaaagcatatgagtgtagtccctgttctctcctctgttttccaacacaccaacgaggtttaatttctcttcttcttctttttcctaattcctgtattttagtcaattttatttacaatgttactattatacagtggtcatggcaaacaattgtgatgggagtttgcttcttgctcttcttgctctcgacacgtcacctcgtatgttgcttacctctcactattcatttatcattttcattctccctcaatatgcatgtacaacatttgttacgatggaccgtcattgtttctctctatacgttcttcccgccataaataacgaactaattgttttggagtagaaaaacaaattgttatttcatcaaaaagttaaatatataattaatttaatgacttaaatagctattacatactttgatctggtttcctcttaagtaataataagaatggaaatttaacgcagagcatgaagaagccgaagctgttttgggtctcagccggagcaccacttctttccgttatcgtctctacacttcttgtctttgttttcagagccgagcgtcacggaatcagcgtcgtaagtttcctcttacctaaaccaattctctgtttttgtttctttgttttgcagaatttttgaaatctaggattaatttgttgatagatcgggaaattaccagaaggtttgaatccaccgtcttggaacatgcttcagtttcacggtagtcatctcgcactcgtcgccaaaaccggactcgtcaccggaatcgtctccctcacggtatagtttttttttattcttttcaaacgcaacttttacgtgagaaataaatttatcacattttcgtaatacaaatcagcttttatttttccataaaaaacctttttattgtctatgcaaaaaaagaaaaaaaagaaagtagagattgaaataatcctcacacctaactagctattacttgaacaggaaggaatcgcagtgggaagaacatttgcagcgctaaagaactaccacgtagatggaaacaaagagatgatcgccattggtctgatgaacgtagtaggctctgccacatcttgctacgtcacaaccggagcattctctagatcagcggtcaacaacaacgcgggagctaaaaccgcagtttcaaacattgttatgtcggtcactgttatggttacgcttctcttcctaatgccgcttttcgaatacactcccaatgtggtcctcggtgccatcattgtgaccgcggtcattggtctcatcgaccttcccgcggcctgtcacatatggaagatcgataaatttgatttcttggtgatgctttgcgcgttctttggtgtcattttcctatccgttcaaaacggtctagccattgcggtggggctatcgttgttcaagatattgatgcaagtaacaaggccgaaaatggttataatgggtaatattcctggaacggatatataccgagatcttcatcattacaaagaagcacaaaggatcccgggatttcttgttttaagcatcgaatctcctgtcaatttcgccaattctaactacctcactgaaaggttagctatgaaactacgatcctttctatatagattttggaagttcggatacattagactttgatctcttaaatgtttatgaaccctgatgtttattagattgtaaccacatttcttaatacattttttttgtcaacaccacatttcttaatagctatgtttcatttactaacattctctgcttttgtgttgcataaattttttgtagaacatctcgttggattgaagaatgcgaagaagaggaagctcaagagaagcattctagcctacagttcttgattcttgaaatgtcaggttagtcttgatagaatctattagaaacccgtataggaaatgtgattagacttaaaggcaaattcactcattgctaattagttttaattttctaatgcaaaaccataaaactcaagaaaaccaatatatttcaactagctaactttgcttttatatatgttaaagccgtgagcggtgtagacacaaacggagtgtccttttttaaggaacttaagaaaacaaccgccaagaaggacatcgaggtaaaaatagttgttttcacaatccgattttgtcacttatccaaggaaactaattagattttgatctaaactggatatttattttatgtgtgaagcttgtgtttgtgaaccctctaagcgaagtggtggagaagcttcaaagagctgacgaacaaaaagagttcatgaggcccgagtttctcttcttaaccgtcgctgaggccgttgcgtcgctctctcttaaagggccatctctcagtaacgtttaactataattttttgtatcggtccaatattgatatttaaccgatggttaaatttttctttttgtctctttttcatcttttaatttcagtacagatgtaatattacgttcttctctctctttcttcagtgatgattttggtcaagatatgtttgtatgatttcgccattttgtagtttactaggccatgtttagtctccgagaataaaattgatctagaatcgaattgatatcttagctagatcaaacggatgtatatccaaattatttatgaaataaactgattaaataaaaaaataaaaataatatttttatttaagataattatgttttataatattagaaaatatgaccaaaccatgagcagaattgtgttaagaactttgccaagttagagcttacattatatatcaaaagtcaatgtgtaattgtcaagagggataaaccgacgcggatgaatcgaagaagcaattgctttcaagaagacttcaaatcagctatgtgtctgcgattataattgtgtaaacgttataagcaagaaatttatctcaaaataaaactggtctataaatcaaatcgaattgaaaatttagctagattaaaagatgaaatgaactgataacataaactaatagatatttttaataagatgttactacttttgtgaaatgataaaatatttctgaagttaatcgaattcattcaaagctatgataacattgtgacttctaggaaaaaacaattcttgatacggtcgcggaaagatcttgataacattgtgacttccagtcttccatatggcataaggtattcttttacactaatactttcccgacaacaacaacgaaaaactccaacctttttttaaaaggccacatagaatgcatgatagaccatctgaaagaaaatggacagggtggcttaaaagtgagatttcttgggattgcataggatgttataattaaccctagcttgaaaaaaaaaagacgattagacaataagaaatagaatttaggtcaacttagttcggcgaatatgatcttgcattgcaccttctttaccaatttatagtgatcttttgctccttataagcacatgtttaaatcaccactacgacattgtttctgtttgggccaaatgcacacttgtattttatctcacaacgagcttatgagaaatcaatcctagtaatacgttaagtggcccaagaagttttggaccggcatttacgtgtatataaaaaaatattatgattacttttagatgaaaccacacttaatttcttcttttttcttggtaaaccacaatatctctttattgtttttatcaaggattcacaaaattcattgaatggaaattttcatttatgtgtgacatgtagacagtcagtccactctaaaaaatctcagtcaatttcgtaacaaattcataacctatttcaaacacaattcataaccataacttataaatactacataaatgatatttctttatatcatcttaaatggtacataaattaggggaaagctaagatatatatagtattaaaaagtacaaaaatagataaggtttataaatgtttaaagaagtaataaaatagaaataagaactaattaggtcgtcatgtgtttgctgtataaaaagctgtaaagggacatctctcgtaaatctaaaaatcatcaaatcttctccttctctctctctctctcacacactcactagcttctctgttaaaagcttccgtcatcacatagagaacagagactgacactaactcacttcctaacggtttccacactcaaaattacacttttgccactccggcgaacaacaatatgatcacatggcacgacctctacaccgtcctcacggcggtgataccactctacgtagccatgatcctcgcttacggctcagtccggtggtggaaaatcttctcaccagaccaatgttccggcataaaccgcttcgtcgctattttcgccgtccctcttctctctttccacttcatctcctcaaacaatccttacgcaatgaatctccgattcatcgcagccgatacactccaaaaactaatcatgctcactctcctaatcatctgggctaacttcactcgctccggtagtcttgaatggagcatcacaatcttctctctttcaacacttcccaacactctcgttatgggaatacctctcttgatcgccatgtacggagaatattccggctcactcatggttcagatcgttgttcttcagtgtataatctggtacacgcttcttctctttcttttcgaatacagaggagctaagatcttgatcatggaacagtttccagagactggtgcttcgattgtatcgttcaaagttgagtccgatgttgtttctttagatggacatgattttcttgaaactgatgctcaaatcggtgacgatggtaagcttcatgttacggtgagaaaatcaaacgcttctcggagatctttttacggtggtggtggtactaatatgactcctcgtccgtctaatctcaccggagctgagatttatagtcttaacactactccaagaggatctaacttcaatcattctgatttttactctatgatggggtttcccggtggccggctttcgaactttggtccggcggatatgtactctgttcagtcctcgagaggacctactcctagaccttcgaattttgaggagagttgtgctatggcttcttcgccaagattcgggtattacccgggaggagctcccgggtcgtacccagctcctaatccggagttttctaccggtaataaaaccggtagtaaagctccaaaagagaatcatcatcatgtaggaaaatcaaatagtaatgatgctaaggagcttcatatgtttgtttggggatccaacggatcacccgtttcggaccgagctggtcttcaagttgataatggagccaatgaacaagtcggaaaatccgatcaaggcggtgcaaaagagattcgaatgttgatctctgatcatactcaaaatggtgaaaacaaaggtttttaacttttaaattgtatttttttttgtaacatatggacacaaatctcaaactgtatttgcttaaatttgtagctggtccgatgaacggggactatggcggggaagaagagtcggagagggtaaaggaagtgcctaacggactacacaagcttcggtgtaactccacagcagagctaaaccctaaagaagctatagaaacgggtgaaactgtaccggtaaaacatatgccaccagcgagtgtgatgactcggctgatattgataatggtgtggaggaaactcataagaaacccaaacacttactctagtctcattggtctcatttgggctcttgttgctttcaggtaacttaatcaaaaatcaactactagtggaagtttattattattgtgagatttgattagagtgatgattatggtaatttggatatgaaggtgggatgtggcaatgcctaaaattattcaacaatcaatctcaattctttctgatgctggtcttggtatggcaatgttcagtttgggtgagtcatctttttactctgtttcttttttccgttaactcatttactttctttctatttttacgccaatcaaatgtcacaacatccacattcgtacggaaaaaattgtaacttttttttggtgaggattccaataattgaaaatggttggtattttttaagattttttgggatggcccgttacggcatggaccatccgacaggtagggtcattgatgcgacgtcgaattatataaacggtcgtggtgggatgacatagctcgtgttcttgattgttgtcgtggtccccatattaagtggaagttgattggacttacaatgtacatgaatgcatcatcatcatcatttattggatttagattacgtttacatgtattgcatcattcagcacttgttgttttgagtggaaatgaattaactgaaaatgtgaaaatggtgaagggttgttcatggcattgcaaccgaaattaattgcttgcggaaattcgacggcgacttttgcgatggcggtgagattctttactggaccagcggtaatggccgtggcagcaatggctattggattacgtggagacctattgcgtgtggccattgttcaagtaaattaaactattttcgtttgttgttaacaatctctttgtaagaagtagtttaaccaaatcttgtggtaacgttgtaggctgcattgcctcaagggatcgtgccgtttgtgtttgcaaaagagtataatgttcatcccgcaatcttgagtacagggtaagtatttcatattgaaccaatagtaaaacttttcttatgcataagagaagattactaatattgttgattcttatgtgtattattgcagggtaatatttggaatgcttatcgcactaccgattacacttgtttactacattttactcgggctataagctcttcaatggagaagttctgcttggctgaagaggataaagagaaacaagataattccaagattagtggaacgcaactagaaaatgtaatgtaacacgaaatgtagtaaatttaaagggaccaagatttgatttgaggatccaaaaacccttttcttgtctatatattttctagagattatttgagaaagaaggtgatggaatgagagagacaagaggaccaaaacaagggaaagcaaaaaaaacagaggactaagatttgatttgaggatccaaaaacgcttgtatattttctcttctttttttataagaagggtaaagctttgttcatatattttgacttgcaataatttctcttactttctactttcattttgtttaaaattaggtaggtacggtattcattttttgtttgttttgtgttttgtgtaggttacttctttcgacgaaagtgtgtttttgtggattttcctttctcatctagtatacattgctctcacaaaagtaaggactgttttattccaattaaataaagaaaatgacctcttagttagcgattaggcgtgaagatatattacaattggttttatttaatttttgttcttgtctcatgacgtatatgattatatttatattataattacatcaaaagatatgaaatgaagaaaatcatatgatagaattcgagtaaaaccaggaaaaagatgcaccattttcttacaattcggctcttcgttatacataataaggggaaaatgagtccagaacatctcaacccattgaacttttaaatgaagaaaactaaacgttttaccaattgagtcactttatattttactattttatgttagacatattactatactaatttggacgttgagaaaatttctctcttttttctcaaaaggaatttgtctagtataactttagatgctgtttagacaagtacgtcgacttgataaagctctagttaccattcagagcattggttaccattcagaagtgggttaggcgctttgcactcaaaacgcggtgtcgtcgttttagtaagctttgtgatgtaaacacaaattatatatagaaaaataaaaacataaaagtaataaattaacaagcagaaagttacttaaaagtcaaaagcaaaaaatatgaagaaaagtaatagctgcttttttggtttgtgtaaaagtactttactgctttttcattgttttcatactcttttatttctaggtatgtatgttctcaaatctccaatatagaaaacgattgaaaatgacccttttttaggtgacgtaaaaagatcataatttgttgtgttgctgttaatatcttaaatagagtctccgactattacgcctgattttgcgatgaacgaaggactaacccatcctatttaaaaattctgtcaatattttattgttcactttccttatctctttgaagctcgatttaatttgtaatctaaccagttatgtgtggtcaatctgtgtgaccttgtgtgtgttcaaccagttatggaccaacattaagtttttttttggtttttgaatttaattctactatgaaaattcatatttttggttgaagtagaaacaagtaattgtaggtactataatattacagataaattgtacatccctaagattaaatattggtgggtggaggatcgttgggttccgaaaatatgtgaccaatttaaagatccattgaattaaatgtcgaagtggaagggaacatacccaactcttatatagtccttctagaaaattgaaaaaagggtcttccaacaaataatcttaaatcacggatttgaccagccattgaaaaggtaactaatttgcttaatcatcgagattagtatatttcgttatcttaaaaccaacatgcgtcgcatgaaagctataatgaactccgtgcaccatgtatttcaatatatacgacgagagaagatattttatctcttggtattatcgaaaatgtcttacgtaatcagaaatctttatcggtatagtcgtcacataaacagatagaaggggattgtcttaataacatggggcggaaattctgaaagaaacaatattttatttattttagatatatagattttggtataagttcttactaatacgtttttattaagaactattttaccaattatttttatctattatcatttcttcattccataatttcataaaattattaacaaaaatttaagaatattttcatcccctaaatagttctttttataaatctaatattaaattatattcagaaaaaataaacgtttttacatatgaatgtaaacttttttgaaaaaattacattaagattctatcactgattttgtgtcgatgcaaacgaaagttgaaaaaattacattgagattctatcactgatcccgcgaataattttatcttaatgattttgaaattctgcttcatatattttgttttttaaacttttcctcgattatctggttccacattagaacaaattatagccatacatacatcatgatatatgttgaagtgtgagtgactagctagtgtacttattagccaatgtctaaaaatgtcggcttcttgcttgttagcttcttcttctttttctgtctattgcctctattattctctcggcccactccctcacctcatgtgctctctatagctatagacctttctctccttgtctctttgtgagttgtacgtgacactctctaaatcttcattggactttaccccaagtcatatacagatttgtatacattacatgttcttataacaaaattgacttaggcttccaaaacgttcactgtaaattgatgtaaccatcaaatcaatcgggccatagactccccctaagccttccctcctcgctgtgaaagccaacgggtttcttgaggtggaccgtggacagcatggatgatacatacctcctggataatcaaatggaagaattgagagttgtatgcatctactggtctacaatggatagtgtgcatgcatttgaaatcgagtagtaacaaagaaatggacccaaacgaagaaagcaatgttgtcgttgttttggagtactaatccatttcgtatataactttttctttaatgatctttttctcacttcatatccttaaacttacgtgcatatatatcatatatacatttgggaaaaatgatctacacatataatttctgtaaaatatgaaatattggcacaaagaaataaacaggactgattattatttggaatttagaatttggaattaatatttttccttttccaattacttttttgggattttgtaccttgaggttttgtttgaacagaaaatagggattcttgcacatatgaattccagcaagaacaagataatagtagaaaaagctggtagaactacagatctcaatgaatagcataagtggaggagttaagttaagttagataaattaatgaaataaaaatgattaggattgatagggaatggtggtttcctcgtgtgcgtggctgcattctctcgtggtacaccaccataaataattattgctattctaatataaataattttaagctttctattagtaaaaagagagaacataatattttaggtaaagaaataaagagataaattacaggtgatgggtgtcggcgaaaccgcggaccaccggttcaaagtgtccgacaagtgaacaactggttaatgggactttcacactcttttccatatgccaacgccattcttcttctctttgttaaaaaaaaaaggattaaagcttaaaagccttgcatctttcttttttgtttggtcaacaacaaacaaaaaaaaaacttattaaaaaaattaacaaaaacatgtagacttatgtctatgttttttcacatgggaatatgtccacacaaaaattcccaaaaatacctttattgatggctttaaatttcaaaaaagaacagattgatgtctttaaataaaacataacagtttatcactcaaaagtgtaaattttgttttgtcacaaaaaaatctgcttcgtatttaataaattatccaaggaaacttgaaaacaaaggaaaaacctcggttgaagtatcgatgagtcacaaagaaaaaaaaaaaaaaaaaactcacaacaaattttgtttatgaaaaatcgacgtgtcttggtatcatatctaaacaaggttgaattatactctattttatttcacctcaaatgcctcataaaaggaaaaagaaaactcagaaaagaataaagaaaaaaattagcttatatacttaaatctacgaaaaatctcatactcatcatttggttgcttctcttcttatttcttctcaagattatttagacgtagtataaataattcataagaagatatcacaacacggtccacaccagtgtttcaactttcaagacgtgacaatttgttacacattgggccgtcatcatgtttgggccttctccccaatccattaaggctccatgatagataacacgtaaaactaatctttaaagaatacatacatcatagacaacttagacacgtacgcatacataaacccaaataactaatgacacaacaacgacaacttattatggtatgattttggttctatttcttttttaagaccccaaatcttctgataaatttctctaatttgcctttcttggtcttctaatattcttgcattagagatagtcgacatgaccaattccgctttctctatacactgagtctacttttctttcggcccacatatttatttcaagttatttcattttaattcctctaccaattttgtctattttacagtcacctagtatcaatatcttagaggcggcgagaaacacgtgtcagagaacgcaactgtggcatctgtcagctttagccacgtggacattacaaccttaaaccaccattgagatagaaagcaaaaaaagaaaaaaacagaaacaaaatgataatgttgtctgatctatatcaaaaaatatgtctaaaattttggaagaatgggagtaacggagacaagtacgtacagagatctacatttaccgtctttgatcatcggaggatccttcgccaccgttgccatttgtctctccctttactctatcctccaacatctccgtttctacaccaatcctgctgtacgtaaaaaacgaatctccattctctttttttcttcaatttacattgtatgtatctacgtgttcgatgcttaatgagtttaagtataattttaggaacaaaaatggattgtttctgttttgtttatggtgccagtttatgcaactgaatcggtaagcctcttctatatcttccggagtttatgaatctgttcttatattttcaattataatctggttttgttttgtttagatcatttccttgtccaattcgaaattctcgctgccttgtgacattttgagaaactgctatgaagcttttgctttgtattcgtttggaagctacttggtggcatgtctaggtgagctatgtgtgccctctctctcttttgcttctcgttagtaattgttttgcatctttaagccaagattccaaatgaatggtcaggtggtgaaagaagagttgttgaataccttgaaaatgaatcaaagaaaccattgttagaagaaggagcaaatgagagtaaaaagaagaagaagaagaattcattttggaaattcttgtgtgatccatatgtcttgggacgagagctctttgtgatagaaaagtttggtctcgttcaatatgtaagtcaagtgattcggctcttcttgcaacctaattattgcatgtttttgagtttttgtgataattgtgtcagatgatcctcaaaaccttttgtgccttcttgacatttttgttggagcttcttggtgtctatggtgatggtgaattcaaatggtattacgggtatgtgaattaactattatatcatagtatttgttatttcatcagatggaaagacaggtgatgagtctttgattctgtagatatccatacatagtggtggtgctaaacttcagccaaatgtgggctctgttttgcttggttcagttctataatgtcactcatgaacggcttaaagaaataaaaccgttggctaagttcattagctttaaggctatcgtgtttgcgacttggtggcaaggcttcggtatcgcgttgctttgttattacggtatacttccaaaagaaggtcgattccaaaacgggctgcaagatttcctcatttgcattgaggtaacttaaaagctctttcccaagtgccactcgaactagcgatctctattctatatgagctctttccaaacataattatgtttctaaggattctactacttcttggggtgtacactggcagatggcgattgcagcggtggctcatctctttgtttttccagctgaaccttaccactacattccggtatcagagtgcggtaaaatcacagccgaaacgagcaagacggaagtgaaactagaagaaggtggtcttgttgagaccacggagactcaggttgaagcatctggcacaagcattaaggagagtgtacaggacatagtgattgacggtggccaacatgtcgtgaaagatgtagttcttacaataaaccaagcaataggaccggtagagaagggtgtaacgaagatccaggatacgattcatcaaaaacttttggattcggacggtaaagaagaaacagaagtgaccgaagaagtgaccgttgagacttcggtgcccccaaaagagtgatcgttgaaatttgccctttgttgtgtagttttgtttcacagttttcttttaacgatttgtatcttttataaaagatagtatattagtacttgcactgatttttatttatttttacaactctcatacttatcttatattgagaagtagaacaactactctttgacttctacaataaatctatcttccgtaagcctgaaaatcttcaataaatctatcttccttaatatgcataattcacagatcaatttcgaatttggtaatacaatttcactggacttctagaaaatagaagagcttcaaagtgagaatcatatgcaaatgagctaaatatggtatacgacttcgacttattcctgcaaccgcgggagaagtcacatgcaattgccatgctataagtctcttaccaaaaacgacatttcttattaatgttatcacatgcttggactgtgataaggtctcaattattatgtttccttgttcactctccatgatattattagtcctaaatggttttctatttttatcatatagcactaatattattttgaccaatagataaatgatcatgatgtatatataatttttatatatgaccgacgcaataatttggttcgtattgctaacgttatcgtgtcacctaaaattaaatcgacataattattaatgttgttagaataattaagtttataaatatacattaagcagatgtaatggtccgttagatttggaaacacttgaacatgtcgtttgtgctttgttgaaagtatccatacgatcaaagatccataaacgatcgaacggttgatcttgatgttaaaaaaaaaaagaaaacgatcgaacggttaagaataattgccatcacattggaaactctcgacgttgatcatgaccctccgaattaaacggccttgataatggagaacgtgagaaacgtccgttcgagaacaagacaaaacaaacaagaaacgaaagcacatgtgacatgacatgattcatgaacatgattatttgattagtcagctttctttgccaaatctgaattcgacgttttacttacagacttctcttgtccaagttcctcattcgtgctccaaagttacttcatcaaattcgtatactactctctgttttttaatgctctttgctccaacatacggactcttttaggtatggttttgattttgggttctttatttattttcttcgacaaaaagatattaaactctgcggacattaatctcaactcgtcgaacattttactagattatataatggcgggagaggtccaagatccgtttaacctaagccttttggtaatttttgcaactttattgtttatttcatttccagatgatatacgttcaattcaattattattaattatgaattgaacatatataatctagggcacccagaatacttctatagtagcttgatatacacgaaacttatttccagtttatatatgcatagacgtttttcagcaagaagagtgttcctcatctttttctaaatgatttcacaatcttaaacatcttgaaagaaaaaaattcacttttgattcgttcggagctttctttattcagattagctaggagcggctgataagcctaacggttctaaaactattttgcaaaaacagtttattcgagtttaaaaaggaatcattttatttgtatgtgtgtgtagatcttttagtaactctgttttatgaaaaacagagaatgttttctattccaatagtatgatttccttttcaagtttttttatacaaacgaaaacattgtgtttgaaacaatgatatttattttgaatgggctctgcaggagaattctatacactcgggatcagtatcatttggaagattcgagaaggaatctttatcatgggagaggagatcatccttctctcgcaatatatatcttgaagaggcagagagattctctaaaccaggctctgttactcagatgagagctcattttgaggcgcattttaagaagaaagggatccgttttccgagttctgttgaatctcaaacatggggagaagttgttcatcatcaaacttgtactgagaaagatgaaaatttgtgggagaacacaagtcaattcggtgattcttgtgtgagttttgacgagacgattcttgtgaattctgatgatgatgttcatacttctatttctgttgctttggagagaactgatattggtcgcattgaagatgaaaaagaaacaaaatcttcttcctccgcaactagatcgaagcctttgaaaaatgttcaaaaagctcgtccttattctgcgacgaataaagattctaccaagaagcatgttgtcataccaaagggatattctccaagttctaatgctaaaacaagtgttgacactaagaggtagctttataactctattttcatgtaactaactttatgtttatgtgttttaccactcttaacggttatttggttctgaatggcagacaaaaggaattgaagcctaagaggattgttgaaaccgttgcatgtcaagctccagctacatcaaagaaaactgagatcctaactcctttgttggctacaagagaaaagaaaacaagtactaatggttttagtttacgaagtaacgaacgggccgagaagaagaaagaggtatacatagataacttatctcacttttactctgttccgaatttcagagttaaatttttatctgatgagggtacattttatgatgctgtaggagaaggtggaagctgtggtacgtaaagctcttaacttaaaagcaagaccattgcctaaaagcacacaagctagacctcaacacacgtcaacaggtcaggcaaaggcaaaggcaaaggcaagagatgatcactcatctacagctagttgtgatcggtcattgacaaatagaatggccaaaagtaaggtcattattaacaaacagaaggcggatatgcagagaagtctaaatggaattcggccaaagacaagcgaccagaccgcgagaaacagcacgaacataaggagtttagcggttaggcgctctgcggttcaggttgctttgtgagcaatttcactgtctctgcttttgttctttagtactattggcctcaaatgtgtctttgtgtttgtgtttctaggctgtaatgagtagaatgttacatcatagaaacgcaaaatacaaataaacaatcagaacctatgtaaccttatgttagaatcaccattgcaccattaaatctttaaaagcttataactaatttactacccggtcattgactcattgtctatagtagcttctttatagatgtttgagtggtgtgtttattacacgtttcaaaatattaaaaaatacttataactgtataaatatactatatgtatatataaaaggtttattagctcttggtaagtggtaaattataaagctggtttgaagtttgaaaagttatattagaaacttgaaaggacaattattttgaaaataactcaagactgagattttttgtgcaaaacccaaaaataaaaaccctctgtttttccatacaacattaaatattaattctgattttcaactgtagtttgattcgaggcgacctcaatatccttttattttctgcttacatgagtttccacatgataatagagtctattattaattactagatgaacacccatgcgtagcatgggttttttgtttttaaaattgtcaaaaaataggattatggttttttgttgattttgatgttcattttgataaattcatctatttaatataattattattgtttatgattagattcatttataactcgaaatattaattctactacaatatgtatatttatatatttattattctaatatttcactatcatgatcacatactacaacaatatatgatatactgatacaatgtatgtagttatattatttatgtgttttgaaacttgcataacttaattgtaacaaacgattttttattccatatattctctcgatctagtacacaatcacatcatgatatgctagtaatttaagtcaacagtgtaattctcatccctaccatatagtcatatagagtctcatgttgttgtttttttggtatgtctaatgtcttggatgactattacgtgaaatgtacataaagaaggtcatatgataaatcaaattcacaaaacgtaataataaaaaaatatccaactaaaattattaaattaatatgaggttaggtagcgaacatctaaagtgcaacacaagtaaaattttagtcattatgggttaatgactatttataaaaacaattaataaaataagtagaaaataataaaagtagtgcttggtacattattatgattttttatttattgattatttttaaaaaattcatttaaaagtgagattaatggagaatttaacacaacaaaaaatttttgattttttttcaattatttttgctagatttttaatttaactaatgtaaaatgacacacattatttttttgtgtgatgatgtgtcactcatatgaagagtgttggccaactttcatatatataattattaatccttttgtccattcgttaacctccatactgttgtccactatctatgaactcacccacgaaaagtgacgttattgacgttgctcgtgcttatcctaattcatggatcgcgacaaataattatgtgatgtaacgtttcaaatgcatatatatgtcttaccgtgtcaatataatgagtaaatatctaaataatacaagaaatacttcgaataatgttcttaagtaaatcaacaattttttctgctacagttccgcttcagtatattctaaagtattacaatatctcttacatacataacacacaaaaaaactcccacaagagttacgtatttattaagttataaacagaatgttaccgagaactccaacaaccacaagatttgccacggctacgatcctcaccgtccatttccctggaaccgccacgtgtgaagacgaggacgtttgatccgtttggtgaggaggttttctaaagtagtaagggaagtacggcaaaatagcattcggcggtggagggccatagaagctgctgccactactgtctccgccaccatacggtggagaagggtagttaggtatattcccaaccggaggagggtaatttggtaaattcccagctggagtagggtagttaacgcctggaggaggatatggtggtggttgagtcatggaaggtgtggaggagccaccaccaataggcggcgttggataacacgggtagggacatggtgtgtcggatatgactaagtaggggaagtaaacaagagaaaagacgaagattaaggtcaagaagagaaggccatgatcgtttgtgttcatgttttcttttgttttgttttacaagaacttggtgaaagaatggttctttttttttaatggtaaacaaagaactttggataagagaaagtaaattaagataagttttttttggcaaaagcttagttggaaggtgtggactctagctagaagacacttgtcttgtgaattattggaacgaatggtttgctaactagtattcttccttaatcactttaattattggtgttaatttatcgctagtttattcgattttagtccgtcttagtcatagtttattaatggatttattttttgttagttgtggattaacatttaactagtgtagacttatttactcagaatgttctaactatgtaaaatgcctgattaagtttaaattactgatcttacactattttcttggatcttggtttggttataacctttaaaaataaatttaaatgggcttttcggcgctctgtgtacactgtacagacgttttggttaaataatcgtatattattgacccataattgtatcgaagaacatgcaggctttgctattaaaaagagagacgtaaactgcaatcattttataaaataaaataaaagccattttgttaaacgacagattttagatgaatattctacacatcagccactaaatgacctaattatgtcctctaaagaaacaaatgcgtcatagatgcttaaagtggttgatagatgtataatattttaatcctcacaaagaaagatggatttccacaagccttattgatgcttcaagtaaaaacaagtcattaataaaaagattgaatatatgttttttcctatctcaaagtataagaaaatggtttctaccaaaaacaaaaaatagaagaaaatggtacttgtgattataattttgaggacaatttgtgagcatatctgtaaagggctagacgttgagtgaaattgaaggttttaaaggtacatcataactatttcatttgttccgaggtatattagtatagatgcatggcactgataaacaatcttttgtaattgtaaatttattaaagtctaaagtcatttttttctttcacaaacctaaaagtcataaaatgacatttatttgaagaatattaatttaaaatgatttttgggaaagggaaagagtaacaaatagaagaaaattgaacccaactcgcgaatttaagatgagtttaagacatttagatgcatggcatcgataagcaatattaaattaagatgcatggatttttctcatgtaaaagacggtgcggttgttatgggtactacaactcgcgactttcattttaccaaaataagtcaaaaactgataatgacattgccaagtaaaattaaaaccattacaaaaaagaacagaatatacatatatatgttactaagtgagcttgcacaaaactaagtataaaggagtttgtggtgtgttgcctttttgaggcaataaaagcataatcacagctgtgtagtgcacaattatttcataccttataagttataaagtccacaacaattgcagcctctaaggaaaaagagcgaattactctttcgttgcctcattggttttctttttttagctagttactaatttgggcaaattaaataataataataataataataataatttgggcaaatttaatctttctttcattttggttttaagaataaaataaatgtataggagatcgttattgagttttaagtcgaatacgaagatctcatatcgcatagtagaatatttaaaatacacagaaaagtaaatgtaatagtatatttttctgaaacaaattatatgccaaagcttagctaagaaaaaaacaaatgtttaaaatatagattatccaaatacattattttgtcttaaaataaccaaaaatttaaattgtttttagttttataaagtctaaatttgaactacacttggtttagtaaatgatttatgtaattagtaagcgttgaaaaaagaaataaaaacgtaggtgtgagatgggaggtttggtagaaaataagcgttaggcgaaacagattcacatgtcatgtctgaggtcggctttgcaggacccatcttttgttgaaacccaagttgatctccatttctttcctctctctcttatagcatctacacgtgtctttttttacttttgatatcgtcaggtgtccttttccacctcaaaattgttattacaaatttaagttttagttagtatacatttcaattttcaaaataatttagagtttaggtcgtttttttgtttaatatgaagaagttccatcatcgatttaattcatagtttctacggataagcggtccttaggttatagtcatgaagggttattaatttcttggcagctcaatacatatagtctttatatattttcaaaataaaattcagttttgatatataaaagagatatactcttatacattagaaccatattaaaatatattttatattagttattttaaattagtttggatcgaattagattaatttatccagattaaacatctcttcactacttattatagtagtttctatatcaattcatcatctctctgtagtttattaacttcatctacaatattttttgtcagctcatgccatttaaaattaatttaacttagttaaaacatactgacttttcataatctacttatgcatataaataacaatttattaaaaatataaagaggaaagctaaataagacaaaatattttcgaaaactcgcctttctaactttacaatttcctttttgaaaaaaactatctttacttttattaagaacaatttgctttttcataaaattattccgcacaaagaaaactttccaattttgagaatcaattcatcaatggcaagttgaacacagaacaattttttttgttggtaaatgtgaacagagaacatatcacatcaagagaatacatttctagaatttacatatttctctgaacagaaattttagtattcgtaccttattaatttggttaaaaaccattagaaaatttggatataggaaaatatattgaaacatatataatcctagctagaaaaattattaaccaaccatcaataacgttcttcaacaactaattaaaaagtatctaaaacataccaacagatcttcaaatatattttttctccgatcatgttaatttcaaagaatcaggaacgccataattccaaacgcgattagaccggagagcttcaccaccataaaactttttccggcggccgctccgaattgctcatcaacggggtagagatttcccggcggacccgtgatgtacaagaaattagccggcggaggcggtgggcagtaggaactgactttcttaggcggaggcggtggaagagccgggggtggaggacatgcaggtggtggcggagacggtggtggaggagatggcggaggagggttttggatgcagcttggagagcactttatgggatcgacctcatcgagctttcttgcttctaaagaagcatctgatgatgatgaaccgttgatgagtgttggacacgtcagcaaggcgatcatcatcacggtgaatatgacgtcggatccccggcggtgagaatttcccggcatgttgtgaacttgtgatcggcgttttttgattttgatcaaagagaaaatcaaaaacagagttttgtatatatggtgagcttaaagagttgaaaattaagaggagacgtgaaaatgaattgagaggtgatgatgaatgcgttctcgttacgtaagtcaagtgcatgggagtcatagacttattaaatagtgtattgtgtatataacaatttttctgtaagctt

SEQ ID NO: 52 - DNA, 99053 bp, Arabidopsis thaliana
gaattcgttcggacgtggcaagcgtcgccagtgctgatgaattcgagtacaaagatccagttgatggatccatttcgaagcaccagggaatccgttacttgtttgaagacggatcacgacttgtaagtcatctttttcttcggtatttgagcttggatacattccagctaagaacaaagtgatagaaatcaaaactaactaatcctctcttgttatatctgaaaccatatgaaggttttccgtctctctggaactggctcagaaggagcaaccatccggctttacatcgaacagtacgaaaaggatgcttcaaaaaccggccgagaatcccaggaagctttgtctcctctggtcagttgcttactataaaacctcaaatccataaactgttttccgactcattaccatttagctaataccaaaggggttttctctaatcaaatacgtaattgttgatgtgtgattcacaggttgacttagctctaaagctgtcgaagatggaagagttcacaggccgatcagcccccaccgtcataacataagaagggtcaagctcaacgactcaaaccattcaccttttcgtctatatgatgttttcttcttatactatccaagttacattataagaataattagtctcagggagaatttgtatttctcatcagaattctgaacaaccaagactgatttcttgagttgttgtgaggcttatacttgtacggatttggctttctcagttttgttctctcttgtttccgtattttggcgagtatactctcttaacatctaagttcattgatacctcaaagcatgctacgaccatccattgacaaatctcagagttgtctaattacttcaaatgggtactcatgaaaatgcaccctctcgtgttttggtttgatgttgcatggttttcaatgcatgataccataatatatggacgaaagccattttttattacttctcttttgaaaagtgggagagacgtcgaacttgaaaacgaaagagaataaatggaagattcaatatatgtatgtgttgctttcgaaacgaatatagagaattggaacaaggaaacccaaagatttggttagagtcgtacacaaccctaattctcccaccggaccttccatatctagaacgaagcttcattcaactttctactccacttaaaccacactatcctttatttcgtgtaagtatatctttcttatactcgatttctttctcttttgagttttagtatcaaatatttgtatcattgacctatcagtatatttcaaatccaaattcagacataatgagttctgtcaagtatcaataacatgtgactaattgagtggtcgtataaatcatattcatatacataatatatgaacgtgagaaaaaaaagaatttgattatataatcgtgcaatatattttgttttctcgaaaaagctatgcatatgaaaaagctagctagtgagagagttagcatgttctgttgatatgtccaaaaacaccaaactcatcttaacgaactaccactaccactacccgcactacttcggtctatcacattcataacacacaataagcaaaacaaaacctatatagtgactcaaaactgattctagtgaatcatagatgaagtaattaagtcgacttttaagtaacaaaaaacctcgaatcgatggaagacaaactcccactcccaatagtacgtacccacccccatctatcatctctagatttcaactagtggtcttagcttgtactcttaatttgttatcactttcacgattatgcatatatccatattgttggcaaatatttttttttgagataagttatacaatttttcttaaaacttcaagatttcattgtcgatatgaattcaagacaagtctttcgtaacattaacatctatgaaaatgtagctcattcacttacatttccaacactcacattcgtatttacaattgaattgattttgattttttttaataaatcacccaatctttcacaagtaacgtatatttcttttggtacaaattaaataatgatggaataccaaacaattagtaccaaaatatagtaacaagttaatgacgaattaaaagatgtatatttcctcatcgatgtcgacaaaaatattaatgagatattagttataccgccgtctatcaccattgttagtgtgggatttttttcctgctgtagtgaaataatatgacatgatcagaattatacttgttgtttattggcagtaaatgttctttccatgcaaatgaaatagaaatttgaatgtgaaaatgcttaactacatgtgtaaatagatcttctcaactgtatgttacgtagatatctctagcattcagttaccaaaatatatatgttggaaattttttttttctattgtcaacaaggaatttgaaagttagtcgtaagatttacatactttttggttaaactcatgcttaattgttatgatctaactacgtgacagaaattgcagaaaatgtcgcttttgtaaacctaaaccattaattaaacgatagagtaataacaaaacttgttaagtgagaaaacatattacaattcccacaaaagacggacttaatcaaacttttcatcaaaaactttaatttggtcaagctcacacgaaactcatgtgaaagctagccttttgacctttgattttgatatttacttaaaactctttctgggaaactccctaacgcttggttggtagatttcacatcattcaaaatttatattttcaatggtgatcgatatgtaattttgtggttggagctgcagatatagttgtaataactttatttaatcattattcacaaaattttgtattgttaccattatacgtataggcgttcttttagaaaaagaaaacaaaaactgaaaattaatacactaatttaccttggaacaaacatataaaaattaacaaaaaaaattgaaagagttttatatgctaaaatttttacatgaattatattaactgaaatagttaaatttttgctaattgttatactatttcaaatcacattttctgtacgtggattgttcttttccttatgatatgttatctttcatttggagtctcagactttctgacatgtggcattacgggaaaggtgtgtgtctctcaaacttcttacacatgtggcaggccattagccaaatctcatttgagtatctatactaatttgattattagcttgagttcctttcctacgtagttgttttaatttacataaagctctaaattatgttgtgttcaatgtttatgcaataagttcgaaccaatggccattgctaacttggattctataacatataatttgttcttaatttttatttttttgttcttaattttcgttttcatatgtttatatcaaacataaatcagacgctttgacgtggctgcatacgtgtatacattttcatttatgagattgaaagagagtatccatacatttgttacttatacatgcatttatatataactctctacttccctaagaaaacaatatcccacatctctactcatccacattagtcaaagatctctattggtacttctcaaatggatcacaaaatcctactaacacctcccaaatctttatacaccaaatgtatcataaccatcatttacgtcgtatcaatatctcatctaaatgcccatttcataacttcatgcaaacaaaccccataccctagcgtctgcgaccaccacatgtctaattcacctctcaaaactttagacgaccaaacggatgggttcactttccacgaccttgtggtcagctccaccatggaccaggccgtgcaactacaccgccttgtctcttccttgaaacagcatcattctctccacaaacacgcaacatcagctttgtttgactgcttggagctctacgaagacactatagaccaactcaaccactctcggagatcgtacggtcaatattcttcgccacatgatagacaaacctcgttaagcgcggccatagctaatcaagacacttgcagaaacggatttagagattttaagttaacctcttcgtattcaaagtatttcccggtacaatttcacaggaatctcactaagtctattagcaactctttggcagttactaaggctgctgctgaggctgaggcggttgccgagaaatatccatcgacggggttcactaaattcagcaaacaaagaagtagtgccggaggtggtagccaccggagattattgttgttttccgacgagaaatttccatcgtggttccctctttccgaccgtaaactactggaagattccaaaactacggcaaaagccgatcttgtggtggctaaggacggttcgggtcactacacaagcattcaacaagcggtaaacgcagctgccaaacttcctcggagaaaccagagacttgtgatatacgttaaagccggcgtttacagagaaaacgtggtaatcaagaaatcgatcaagaacgtgatggttatcggagatggcatcgattctaccatcgtcaccggtaataggaacgttcaagatggcacgacgacgtttaggtccgcaacttttggtaagtcgtccgtgctatatagatagagatttatcaaaattactttctaaaagtgatatttattagaactatatcaattttcgcacatacatttacatatagacattacgtataatcggatagacaaaaaaaaaagacattaaaattatctagccacagtttatccgattatacgtaataaaattttagtttctacaaaaaaatatttttaaaacaaaaattactttgatataagtttgctaaattaattaatatatatctggatgttagttattataaactttttgctaaaaactattattttcagttttgctaatattatttgacggtaaaaaataataatttactcgtttttttggtgtttcaacatatatactttactctttttttaacgtcagaactttaaacacttattatgatctgttgagtattgacaaaacacacatgatttcctcttgaaatataacttttggactaatttttgttttatccgccaacagctgtttccggcaacggttttatcgcacaaggcataacattcgagaacacggcaggaccggagaaacatcaggcggtggctctccgatcaagttcagacttctccgtcttctacgcctgctctttcaaaggctatcaagacactctctaccttcattctagtcgtcagttcttgagaaactgcaatatttacggaaccgtcgatttcatcttcggagacgcaaccgccatcctccaaaactgtaacatctacgctcgtaagccgatgagcggccagaaaaacacgatcaccgctcaatcacgcaaagaacccgacgagactactggcttcgtcatccagagctcgacggtggctactgcgtcggaaacttatttaggacggccgtggagatcgcattcgaggacggttttcatgaaatgtaatcttggagcgttggtgagtccggcgggatggttgccttggagtggtagttttgctcttagcactctttattacggtgagtatggtaataccggcgccggagcaagtgtctccggtagagttaagtggccaggttatcatgttataaagacggtgacagaggcggaaaaattcacggtggagaatttcttggacggaaactattggattacggctacgggagtaccggtcaacgatggactttgatttttttcttaaaagaattaattttgttagtgtggtctttgttgattttatgttttttttgtttgttggcgtataattgttatatatagctttatttcccaaatcccatgtaacagatggattgtcttgaatctatatagtatctataatagcaaaccgattgactcgctcttggaagatttatcgacaaattttgacctcacatgtattacaaaacttttttgtttttggctcaaacttctcaaagatcctttattgtttaagtttatgtatctttctacctttcttattgtagctttggggtaagcctctttttattgttctttatattttgggatctcagcatcctcttatcttcgtatttggattataatttaaagaacagaataataacaactttttgttcaaaagaaaaaaataaaaataaaagccatacatattctttttccttcaaatgtttctattgtgaatcataatgttctgatacgtagttatactgtttatattattatgtttataaggatgagatgcttaatatactaataaatgtttcaataaaattaatgaatataattattgctttgtcaaccaactatattagatctgaagggaaaaacaaaatataaaggactaaatgtggaaaaaacggcaaggaaaatactcatatgtattaattattttaataagtaacagtaaacaacaacaaaatctttatatattttataccgactgcatcttttgttaatatatctttttatgtttgtttttttatatgaagagtgattatctctcttacggcattgggatcatgtcatccacggatctgaaaccggaatccaaacctgaaaataaccaagtctcgtcgaagccgaagccagtgagaggtcgatatcatgtgttcatgaaagaaggtggttgcgaagaatcatataccgcttttgtaggtcgtgatgtgcagaaagatacgtgtagggaagcctattcgatggtggaaaagtgtatgaaggctcgctctgattactttgagcgatttctcgcgttgcagaacgctagggctgaagtgatgcagagagaaatcgatgccttcctccatgcgaaaccaaaggacagagacgagatgtttaccaagttcatgacaagaggtgcttgcaaagaagcatttatggcttggattgacttctgcaaagaatctaggaagaacaataaaagttgtcgtcataatcctgccatggacaccatgctcaagtgtgtgaaggctcactctgattactatcatccgcttctcacggtattcaaagctggtgaagaacatcataaaaaggagatcgacgccttgaatatgagagagcaaactgaagctgatgctaagggatgattagaaaaaggatttaatctacgtcatattttaatgctttatttttttttgtttacgtttcgttctgaatgaatattcttcttcctttttaatatgattctaaaaggccatgcattactttgttgaatgtttcagtcttagtctttattattattatcttttgtggtggcaaagcaacataaacaacatatcatttaaaaaacgacacgaaatccgtttgttcctcctttctacatatttgatgtggctctattacagacctcaaccacaaggatagatacatatgtcctttattgaaggtttatggtgcttgtgaattgtgatgttcgacaactacattgtgtatctaacgtttttaactcatcatatcatttgtatattatagataaatatgtcctttaatgaaattggtaatgtcatttgcacatgatttagcttgtaatatatttcagttgtgaattcatgtaacatcagcagaatttttggatggtaatgctaacttgttcatattttttaagtcgtgaatttaagtttgaaacatgatatggtttggatgcatactctttacgaaggatttgaataatgaaaataaggtctacagaatctatagaaaacaaaaaaaattggagtaaaatagattatcaatggctacttggactcggtttacagtttgggctctgaaagcccttaaatgatccgacgatgtcgccaatccagaaacataagtctgagcccgttcacgaatcattttctctaacaaaattcacgaaacattagaaacatagtaaacaatttggaaataagaaaagaacaaaaaaagtgaacaaatctctgtcaaaaagtactcattcgaaaagatttgttcataatgagtaatctttgacagagatttgtctataatgatttgtacacactgaaatttaaaacattattttgacattaaacaataaacaataaacatcatgaattaatacggataagacattatggctggtgaatgaattaaatttgtaagagttcctcaacttagtaagggaaaaacaggtgtcaaactataagcaataagttacaggtagatgcaacagagatggaccctttgggattgtgactagaaaacaaaaaggactcttgtttcattgcgtctcgtgaatcctcctctcttccccaaattctgatacctatttgctttatgaggttctcttttatttccacaccttgtaaatacttcgacgtcactttgacattttaaaaccattcaaaacttatcatatctcgtaaatctagagaaatctcgtactacgaaaagttatgcacaaaagggcacaaacgtttgtattaccatttccttttttttggtaatgaaatcttataaataatttatatatgttttatggttattatttagaagctttgaaaattgtattagtgatgttttaaagcaatttgatggcatattctaccaaacgaaacatttttcagttacttacttagatatgaatacttttgaagtcacaacttaagtgattgtacaatgcgtagattaatcatttatcttataaactggaaaaacatgaggcgtaagaaggcatgtgagacagagtttctattatgtcgtttgtgtgttatgataaacaaatgggtttgtggtcaatttcacaggggtcacggatcttatttctccaacatatacttccaaaccatttataaatattcatttttttgtaaaataaacatcaattttcttcacgcatcctaacaattcttgcaattttaaattttagtatgatttaatcaactactataattatgtaattagtaaaatcagttttgtggatggtatcaaatttacaaggcatcgaatgacaaattgttattacaaaagaagatgacaaattgttatatactccatccattcttttaagatgtatcaaatgtacaatacatcaaccaaaaatattgtatacattcaagtccaaaatagtgtttgttcttttagttctcatgttgccaaagattttcagtggtcttaaacattaattagtcgttcgggaattggctagcatcgaatttatctaaacatcaatttatgttcaaatttaatttgcttttaattagtagtaaaatatttgatattacaaaccaaattatatatatatatatatacatatataagattattaaagttttcttattagtaactagactcggaaatcttagaattctcatatattaacctataaagtaagattttaataagactaaaacttaaattgatatacagaaacttaaattaataattggttttgaatttgaatctctgatcatcatgttaacgaagattttcttataattaatcattaacatttacggttggtgtatcgtatatgaataaatcacatgtatacgaatctacgtttggtggaccaaacactatagtttatattcccggacttggaaaacagtggtgacacacagacacacacacgtttatacacataccgacatacgcacatatcacatatatattcgaaaatgggtacaaaaatataagtgtatgcatgttacaaaacattagattatcatttgtatgagcttaatttgcaacatattgaatattagaattacctctatagcttgtccagcattaacatataacgtcagtgtataatagactaatagtggtggatttccagcgcatgcatacattagccactatatacttctttttaatatatggagcaccattagccgccattagatatcaatagtgtgctttattcatcactttgaaagtcagaatatagagatagtagtacttatttgtagcctgtatatcaaaccttattactgaaagagaaaactgcttaattatataatgtgtgtcatttaggttataattggtaatttgcgttttaaacctatctattgcagtttttagacttttataattttattcttctgatttttttttctatactttttatcaccacttgaattaactacacaacgacaataaatttatattgtccaccactaaattttaaattcaaataaagtcaacttatttcttgtttttttcgatcagaaagctaaaagcagctcatacaattttgtacctcataatgatgttctaatttgtttgaaaccttctaaaacgatttatagtaaaaggacaaaatcgcttgacaaaaaaaaacagaagtaaaaggacaaatagatataagaaataattgactactaattctttttacacacacttgattcttttcgtaatttcgacaaacaaaaagcgttaacaactacataatatcactatttcattacagccaatcacaaacaggcttatcttattatatctctatcatgcacgcgtgataaccaaaaacatttaaacaataacttctttttcaagtaagaaaaaaaagaagaagaatatttagtgaataatgataaaatgatcaatgtatggccttatcaacacatcgattaactagagccaacgcattactagtcatctttttaacgtcatcgacccgtgcgcatatgtcatccttcctcggctcatcgtgaatgtctttaaatccgtccgtacaagtctcctcatcagttaaagccgcactgagccacgtctgcacgttactcatttggaacctgaaggactcgagcgagccagtcgagaccagctccctcatctgtttcatcgagcctttcatttcttcgaccgcgtctttaagattgtcgaagcagtcgtgaaaaacagcggctgcggttgggtggtgagcaccatcttcgttgctctctggctggagagtggtgatattggcgaggtatgaggctaagtcgagagtcttggtgagagtgacggagatggcggctcgagccaagagggctggatcgttgtgaacagagctagagaaggaggaaagagaagagaagcataggtcagggtataatgtggtgttgcagctagtacggatgaaatctgagtcgtctgattgagaatggacggtcaggattaatgggaggacgctggctaagaagaagaagagaagtggttgatgaagagaaagtttcatggtttcttgtgacacggaagtgactctttttgggttatggatgattttggtttttgtgacctcaagtttatatttatactgttgatcattagctaggattaatccaagcagccaacaattttaatgggccgatctgggcctgaatattgtgtataaataataatgctttatacgtatggcgaaatcaaatttaagagatctcgttaatatcatggcataaaaaaattgtatcagacgtttttttttttttagtatagccgattgatacccatactaaatggtcgcttatgttatctttgccaaatgccatctcgtatatttttctgtctgtattaactttttaaatcaattttgttttcatgtttagcattaacatcatcacacttagaaattcacgacttttttctggttacttggtcagtccgaattaattttctgtttagttaacgtagtaaaattaggcacattacatgatttataaagtggtctccaacttcgctagattcgaaacgaaacaaaaaaaaagatatcttctatttttaaataaagattttaatgaaaaaactcctcaaatttcgattgatccattttaaatcgaataacttgagctgaaaagtgttattttagtagtgtacaaaatgcctaactcaaaagatattagtttgagatatatacacgtacgatagaaaaacaataattaaagaaccagataatcgtttagattaatgcattttaaagtacaaattgatatcttcatattaaatcattgtttgacaataatattatagagtacattcaaaactaatttgaatgatttccacgtcatgcatatcaaataaaactaaagaatccgcttttgagttaaaattaattttctgttttggttaacgcccgtagtcaaattaggaagattggtcctcatacatgaacaagcattgacttcatttaatgttagttatcaacaaaaagttgatgaaatttgctataaaatcgagatgctagaaaggaaaagaaatcatatatataaaagttgaccaattttttccttatgaatgacacatcatcacaccagtgaatgctacatatcattctaaattaatattattaaaataaaataaaacttagtgataataaattaaaattttcacattgcattgaatcatccattaataatcccactcttaactaaatatcttcatttaaaagaaaaaatacaaaaattattttaatgtatcaaacactattttcattttatttttcttattttgctatttttttaatagtcattactttataacgactagaaattttcgtgtattgcaacttagctgtttgctacttaacctcttttagtttagtaattttaacttagtcttttttttattacattttttgtctacatgatatgttttttgtgctttatgataaattggtaacattaataatgacatacatgtttttgtaagtaatggtcttttgagacgttagatctatcaaaaatttaaataaacgacactctctccaatatggctatatgcaaatgcaaaaagagaaacctaaaaatgttgacttaaaatactcttttatttttgccttctttttttcttttatgtgaaaatatttaaaacagatgagtagttaattatacattatgttattcaaatgatgtcaattcaatatttagctaagaaattatagttatacattatgttattccacaagaacctatcatgatgtgattggaatattagattagtagagaatacatggaacaataaattgtttgcttagaatcaagttaggcaacttttaaaccaaataagtaacataattgcataccattttatcatatattattgatgtaagtatttcatgatagttaaaaagattagaatctagggtatatagataagaagatttatacatgaaaaaaatataatcgatatttaaattaaaagtgaatctaactatacaaatataattacataaaatgaatataatttaatcaactacataatagcagacacgaaaataacataaattaccaataaaaatagttaataaattagcaataaaaatagttaaacataattattattaaataattttcaaaacaacaatccacgcgtagcgtgggtactcacctagttgttatacaatagaacaacaattaaatattggaaatgaaaaacaatctttacgttaaaaaaataatctaatagcaataataatttttacataaatcaaaaaaatctaataaattatcgtacgacgattggtcgattggtaacgattgctacttttggctataacgattttgactgtagaaaattaggatgcaaagactttagatatttcaatcttattggtaaaaataaattctaataattatttttattattattaaatatagtttataaatattatttatgataagtatgaatttatttgaaaaatagtgactacaattgatttattaataattatttttttgaaaattaaataattcataaataaatgaataaataaaaaactcattttacaaattcactatttaaaatcttcaaatatgatttcaaaagaacagaaaagtaaaactacatttaatcaatcaaaattatttgataataaaatataaatatttttttaaatagttttgaaattatatggaaaaagaaaaaagtattttattttcttttattattctctcttaaagtgaaagtctcgtttatgagactttagaaagaaaaaaaaataaacgaaaagaaaaagagtttacaaacttttaaaattaataaaatcttgaaagggagattggttaaaaaataacttgaagaatttaaaatattttcaaaactaaaaatattaacaaagtcttctttgtcaccgttaatgtcctcttgttcttctatttcaattcgagtttggttatagaaggaattgagtcgggtctctttatcgtttcttggaaaaattcctttatggtggtgtttatattgatctttttcggcggtggcgacaagtgacgactcctctggattcatgtgaatgctctgtaaaagatcgaacacaacttcttttgtaagttcttttaatccctctaatactttctctatagtttctttcgttggcttcaatttttcggccactgaaactatcttcgtgccggcttttctcatcgttgaaaaaaaagctctaaaataacagaaagaaaatggttaaactggagaagaagacggacccaattcaattggaagagatatgtgtatacgttcatttatgagtctaaaagaaaatatccatacatttataactctacatccctaaggaaataatatcccatatctctactcatacacattagtcataaaatcttacttggtacttgtcaaattccctaattgatcataaactcctactaaatatctcataaatgatgtttatacacataatatataccataaccatcgatatttacgtcgtatcaatctcacgtcttaatcaatgcccatatcaaaacttcatgcataccttatatagctagcatctctcccatgttcgaacaacttcacatctcgaattaaatcaaatctttagacgatcaaaactattatacaattttatccaattatattagtattaattaaataaattatattgttataaattttagtggcctgttaaattagttattatccatactgaatgtttgttaaaatatataacatatgctaagtttaattcaccaataacacatataacaaaaagttgttaaaaaaattgggagatttgcaaaactaccatttttttactacctttttgcaacaatacttttttatgttgtccatttttaaaaataccctttcccttgaacaaaatgaccaaattaccctcatctaatagaaacatgtaattggaaactgaacttttcccaccaattttttggcgccaaaatttttttttcccgccaaaaaaaaagtttccgccaaacttttttcccgcaaaaaaaaaaattctgccaaaagaaaaattttccgtcaaatttttttttcgtaacaaatttttcctcagccaaaaaattgattttaaaaatccttataaatattttctggcggcaaatagatttacaaggaattttaaaagggttttaaaagatttacaagagatttaaaaatgttttaaaagatttacaagagattttaaaagagttttaaaagatttacaagggattttaaaagggttttaaaaaatttacaagtaattttaaaaggttttaaaatctcttgtaaatctttcaaaacacttttaaaccctttaaaaatctttacaaatcatttgtaaatcttttaaagccctttaaagttccttgtaaatattgtaaaccccttttaaaatccattgtaaatattttaaaatccttttaaaacaattttaaaccctttaaaaatctttataagacatttgtaaatcttttcaatccctttaaaatatcttgtaaatcttttaaaacccttttaaaatcccttgtaaatcttttaaaaaccttttaaaatcccttgtaaatcacccttttaaaatcccttgtacatcacccttttaaaattccttgtaaatcttataaaacccctttaaaatcccttgtaaatcttttaaaactcttttaaaatcccttgtaaatctatttcccgcaaaaaaaaaaattggcgggaaaaatatttttgaaaacaaaatttggcgggaaattttttttcgaaattttttggcgggaaatttattttggaatattttaggcaaaaaatattaatatttcattttgtaaacctaaaacaatttccaaataagagtaaaatggtcgttaaaaatttaaagagggtagaaataaaaatggataaaataaaagagtatagttgaaaaggggcatcataaaaaaggcattagaaataatttttcatgttttaaatgacaataatttaaaagttaactaaaagagtctataatgggtaataacaaacgtataacactagtgaaaataggacttgtcaatccatgaattaaatattttcatggatacggtcgtagggaaataaatctttccgtcagtcctaaaaagcctaaattattggatagacaaaaatctgaaaatcttaaatcacacgtaaatcaaacgtatttacccccacatggaacttaatccaatctattaaattcaggtggcgaccgttcattggttcttgtctctagaatcccaaaggactcgtttccgagtataaaaatacgttcctcaattcaaagtacaaaccaaaaacagaaccgaaacagaaaatggcgggaaaatcctttatgactccggcgattatgctcgccatgcttctccttatttcaccggagacttacgccggtcacgactaccgcgacgctctccgcaagagcatcctcttcttcgaaggtcaacgctccggcaaacttccaccagatcaacgccttaagtggcgccgtgactccgccttacgcgacggttcttccgccggcgtggatttaacgggagggtactacgacgctggagacaacgtaaaattcggattcccgatggcgttcacgacgacaatgatgtcatggagcgtcatagatttcggtaaaacaatgggaccggagcttgaaaacgccgtgaaagctatcaaatggggaacggattatctcatgaaagcgactcagattcccgacgtcgtctttgtccaagtcggagacgcttactccgatcataattgttgggaacgccccgaggacatggacacactacgaaccgtttataaaatcgataaagaccattctggttctgaagtcgccggagaaaccgccgccgcactagcagccgcatcaatcgtgtttgaaaaacgcgatccagtatactccaaaatgctcctggaccgagcaacaagggtacttttctttaaagtttctttaatttcgtctttttgaaatgatagggaaaaaaaatcgtgattttgtcaaaaaagtgttaacaattggttatatactttgcttgtgtgataaatattctcttcattagtttctaataatgtttgtttccgtactttcgtgacccacatgcattagtttagacctaatatgaagtatggaactactttgtttttgttagaaacgtatgaaccatttcacattacttaatgtaaagaacttttgacttgtgtatattttcgacatctacgaaaataaactaagtttatggaaaatgtgaatggacataggtgtttgcgttcgcccaaaagtaccgaggagcgtacagtgatagtctttatcaagcagtgtgtcctttttactgcgatttcaacggttacgaggtaattatacaaattttaccacagtttgatatatctttcataaacatttgttgatgaaaatgttgcgtgtaggatgagttgctatggggagcggcttggctacataaagcgtcgaagaaacgagtgtatagagagttcattgtgaagaaccaagttattctaagagctggagatacgatccacgaatttggttgggataataaacatgccgggattaatgtcttagtctccaaaatggtattgatgggaaaagcagagtattttcagagttttaagcaaaacgctgatgagtttatctgttctttattgcctggaatttctcaccctcaagtccaatactcacaaggaggattattagtgaagagtggaggaagtaatatgcaacatgtaacatctttgtcttttttgttactaacatactctaattacctaagccacgcaaataaggtggtgccatgtggcgaatttacagcttctcctgctcttctccgtcaagtcgccaagcgtcaggtaactaaactaaccaacattcctctgttttagcataatagagagattcattaacgtaagtgtttggtggcgtacgttaacataggtggactacatactaggagataatccaatgaaaatgtcgtacatggttgggtatggttcgaggtttccacagaagattcatcatcgtggcagctcggttccttcagttgtggaccatcctgatcgtatagggtgcaaagacggatctcgttatttcttcagcaataatcctaatcctaatttgctaattggcgccgtcgttggtgggcctaatatcaccgacgattttcctgattcgagaccttactttcagctgactgagcccactacttatatcaacgcacctcttttgggcctacttggttatttctcggcccattattgatttcacacctcgaactcgaacgaagcatgaaagtctatttttgttgtgaaacatttttagttgattgttaccgattagtagattcactagattctctaaatctacgaacaaataattgtataaattaatcgagtacacaataatcaatttttaatcatatgggagttaggaaaaacaaagagtaataatgagagaaagggggagacaagagtaattaatattttgatgaccaaactaatcaaaaatcaggaatttgtcttttggactttggtcggctgctttacgcttaacacaaaagaacgctattttgtctcctccacgcaattacctcttctcactctcagacattttgtcaaacagatggtgctcgtttctgaatcagcttaagaactaacaaggagacagacactaagcttggtttttctctccgattagacggaggaaaaagtgaaaacgaggggcttagacgagtgatgtgatagagatggaaggagttgagctagaattagaaagaagaagcaagttcttgaacagtttgatacagaagaagaaggctaaagaacagcaagatcagaaagatgagttcaatgttcgtgttagggcttcagatatgcctttgcctcaacagaacagagcctttagtttgtcgcgtgagattttgaatgctactccagggaaggctgataacaaaagactcgctcatgccctaaaaaaggttagatcttttgtatctctctcatgatttttctgtatttgggttgaattggagtcattgaagtctagtacttggattgagttttgaattttgacacagaatctaaaagtattgagctgcttttgggttctagggctacgtctcaaagtcgcatgctttttgtagaatgtggttatggtcttctctttcttgattggtttgaagatgtgatgaatcttgaatttggattttcgtttgtgtacttgcatattgttgaacttcatggatggtcccatatttgttaggttgcatttgactttgttccattgttgttgtcttttctatttgtagcttcggttagtctacttgactaggttgtttttgtattgcgaggataactgtagtaggagtctcgttgtgaaatgtcttgaaactggatgttcttgttgtttattgagatgattttggagctgtcttaggccataactaatgaggcatagcatgcaccatctgctaagcttctgtatctttgctgttagaaattagttgctacctaatgataactctgaagcatgcttgctttaggaagtgagccttgcctgaatacaaccttttacaaaggacttggttcgacaccccatatatagagttgtccatttatgcagttgtttctcgtgaggatattgttccttcttaaagcggctttgataattagcttttgattttaacttatggagcgaaatggagcagttccctcaatttatgcgactaggtagaggcattgattgatccatacattgattttatgaagtggttgagtaaaacaatttagtgttcacttatctgtgtgcagcttacttgtttgtctcagtgttcatcaatctcttaataatggctacctccctttggcttttaggattgacatacgagtcaatttctgctgttgtcttgttttatcttcttgttctggtaatatagatctcttatctcgaaatagatcttcatatgtttcttgtctctatgttttctcctaaatccagcttctatgttatccactgaagtgaatcttagactcccatctgtctaatgacatgttgcagctgatttaaaactatatattcacgaaacagttttccatctgtcttccatttcaggacttcgattcagcctacggcccggcatggcactgcattgttggaacaagctttggttcatacgtgactcattccacaggaggattcctatattttcagatcgacaaagtttacgttcttctcttcaagactgccgtggagccgttagatcaaaaatgagataaaacgttgatgatcagagcatcttcaatttaatccttttcttttagaattctctgtcttgtatcccacaatgtaattctgcctaagacaaaatctttgtggctcctattgtgtaattagaagtcatcttctctactgtgaatcgtttcaacttcacaatgcaaaatattgttcttctctttctcaaattctaattttgtttttttcgttgttgtgttgttgttgttgttgacattttcttctcttcaaaagagctttaaacccaaaacctctaataccaattttgctcctccgttttataagcatcaaagaaaaaaagaatcagtgaagaagaaaaaaaaatggatcaatcgcagcgaacagtcgctgcaacgccatcgtcttctcgatcgtaccaattccacccagctcgtgctgcaattatcgatcttttcaatctctacttaggggttggttaatctcttctccaatctcccaatttttttcatcgaattttgtttctctgctgattttgctttctctatcacagagaggaagccgtcaaaagcctgatgagtccctccgagatcccccgtatgttgtttctattgattctgaatcaactcttgttttctcttccttctgtgtttgattttatccatgttgattgttttgatcaggaacaaatcacagaagcgtgttcatgctcctaatagagacttaccaccaagaaacgagcaattccttttggattttgagctgcttcagagccaattcaatgtaaagtctcgttttttaactatctttatctttctctttgtgatttcgtaagataaagttttttttttttttccaactctttgttaggatccagagcaattgaggacgattactgagtcagttttgatatctctggtggtgcaatgtagcaatcatgcgcctcgtgctgagtttctactctttgctttgcgtacattgtgtaggattagttatatcaattgggatacttttttaccatcccttctctcttccgtttccgctgctgaggcgtcgttaagccaaggtgttcaagcagcagcggcaacggctggttcttctgctacttcttcgcagtctgtagttcctgtgtctgtgaatccaacgtcattgctgccttcagctcatggtattggttctccatcagcttcagaggtgaaatctgtggagaatgggcagcagattgcaagagctggccagattgtaagagagaatgctatgagaaatagtcaacggattagagctgctgctgtaaacagtctgcgtcagctcagttgcaagattatcttgattggcgttgaatctagtctcaaacccgttactcatgccgagattttccagtacatgatgaattggcttgttaactgggacaggagagatctgggaactgaggactctgtaggaaagtcgtggagatctgagaagactttagctgaatggttgcggagttgtttggatgtgatctggctgttggtagaagagggtgaatctcgaattccgttttatgagttattgcgcagtggtctacagtttatagagaacatacctgatgatgaagccttgttcactcttatcatggagatacaccggaggcgagatgcgatggccatgcatatgctcatgttggaccaacatcttcactgtccatcatttggtacccatcgtatagtctcccaaataactgccaatgttccacccgaagctgtgccacacttacgacattcaccaattacatatccaagtgtgcttggggaacctttatatggagaggtgattcctatgaaattgtggagattggtttcatagcttagttggctcttgttgatattgtgtaatgtatacgcttttcattaggcagacaatttgtgaatttcaatcctctcttcttctttttcgacaccggcaggatctggcgatgtctattccaaaaggaagcctggattgggagagagcagtgcgttgcattagacatgctattcgcactacaccgtcaccggactggtggaagcgtgttcttgttgtggccccttgttatagaccatctacacaagcagggcctatccctggtgctgtattcacttctgacatgatttgtgaggcaatcattgacagaattgttgagcttcttaagctgaccaactcaggcaatgtttgtctttccctatttctcatgtctttgatctgtcacttccatttaaatctgtggaaattattttgaaatagcaagtggttttgctagtcgtcacaatctgtaaagaacctacatcctttacgttttattctagttctataatcgttgattcgttaggcttagatagaaaagataaaagtaagagttgagataccattatactaggattgctttggtattgatttggtatctgttacttttccccctctctatgcagatgcaaattgctggcaagagtggctggttttctcggatatattcttctttctaatcaaaagtgggtgtactgattttgttgatttcattgacaagttggttttacgccttaacggtgttgataaccatattcttcggacgaatcatgtgacttggctgcttgcacaaataatacgcgtggagcttgtgatgactgctttgaactcagatgctaaaaaggtcgttactcaattacaatgatatgtttgcagctgcaatgcaattacttgtacttctttttcggcgaatttaacatcccaatttgtgctctatttgggttttctctcaggtggagactactaggaagatcttatcatttcacagggaagacagaaattctgatcccaacaatcctcagagtgtgttgcttgacttcgtaagcagttgtcagaatctacggatttggtcactaagcacaacaactagggcatacctaaacaatgaacagctgttgaagggaaaacagatcgatgagtggtggagaagcaaaggtacataaggtttcaatggcagggcttagactaggaagcagagaatcccgattataaaaagcatcctctcattctgtttcttgtttggggttgtcaggagagcggatgatggattatatgaatatggatgataggtcgattggcatgttttgggttgtttcctacaccatggcacaaccagcatgtgaaacagttataaattggctatcttcagctggcatggctgagttaccgggattacagccaaacgaccgagtaatgatgacgcaggaagttaccccgttacctatgtcattgctatctggcttttcaatgaatttgtgcttgaaattggcccttcagatggaagaagctttgtttgttagccaggtttgtttcctttgtctcacaaagatattatatatgttaattgatacactgatctatgaagaacatcttctttggtcatttttacttagtgacctattttctccacggtttagtaaaacaactttagcgttttacttgtttaaaaatgttaatagtagattttaaaaaacctgagaaaaatgaatttagtgtcgtagtaaaacatctgagtgcaggttgttcctagcattgcaatggttgagacatacacaagattgcttctgatttcccctcattcgatgttccgttcacatttcagtgtaagctatttggttccttctgttaccttttgactttcattatcttatgttttattgatcataagcgattcataagattagctaactttctgtagcaattggcccagcgaaatgcttctctgctaagcaagcctggagtgacgttacttgttcttgagattctgaactatcggttgctgccactctacaggtaaaacgagcgaaaagttctcaagttggagtagatccttctttatgttttaactgggtcattcttttagttagatgacaattgtttcgggctttcgccatattggctgttagacccgactaaacaaaattactgatcttattgcagataccaaggaaagagtaaaactttaatgtatgatgttactaaaataatatctgcattgaaaggaaaacgtggtgaccaccgtatattcagactagctgaaaacttatgcatgaatctcattttatcactcagagactttttctctgtgaaacgggagggaaaagtaagtggtgttttcgaattactcactgtcccccttcttattttgtgcctggatctcaggtgtaaataattgttcttatgttatcatcactaggggccaactgaattcactgagacgttaaatcgcataaccatcatgactcttgctatcactatcaaaacacgtggtatcgcagaccctgatcacatggtttatctgcaaaccatgttggaacaaatactcgcgacgagtcagcatacatggtcagagaagacgatgcggcatttcccatcccttctccgtgaaactttgaaaggacgggtagacaagaggggcctatcaattcaggcatggcaacaggctgaaacaactgtgataaaccagtgcactcaacttctctcaccatctgctgaacccgcttacgtttcaacatacctcagtcacagttttcctcaacaccgtcagtatctatgtgctggtgcttgtctgctgatgcaaggccacgctgaaaacatcaacagcacaaatctggtttgctttgcttagtctattcataattgtgaaatgattgtttgttgatagtggtatgattttctcttccaaatgattatcaggcacgagttctgagagaagtttctcctgaagaagtcactgctaacatatacactttggtcgatgttttgcttcaccacgttcatgtagaccttcagcaaggacaatctctagaggtttctgtctgccagaagagattaacctcacttttcgttgcttgatccatcttcttacattgcatcgtaatattttttaggcagttctagacaaggcaggcgcaaatcttgcatttttcttctggacacatgaaatgcttcctctcgacatttttcttttggcgctcattgaccgtgatgatgatcctcacgccttgataattgcagtatgttcatgcttttacgtaaaagaagcttaacatcatagaaattttacagtgttgttttcaatttatttacagatgagcctacttaaaacgccagaccttctgctgaggataaaaaactactgccaaaaccgtgggtctcctgagcactggcttgtcacacaggtgttcaaacgcaatgaactccagaaggccctgggtaaccatctttcttggaaggacaggtaatatatccaattcaacatcagtgtaactgatttctaacaacaatttcacttaagtacatggctttgattgtttgattggttttgttggcatccaaccataaatgtgtgatggaaccttccatgaaaacttgtgtatgactaggaaatagttgaattttggtttgatctgttttaattttggtgttggattctgctaaagttgggtaaatgttttacctatttttttattgtgttaaacgcaggtatccaacgttctttgatgatattgcagcgcgtttgcttccagttatccctctagtgctttacaggctcatcgagaacaatgcgatggagcaagctgataatcttttgcttgcacactcgcattttctagcgtatcatcctctcagattcacgtttgtccgtgatatactagcctatttctatggccatcttcctgggaaacttgttctgcgcatgctcaaagtacttgatctcagcaaggtaattgaaaacaattcccgatcttacattgattctgaaattgacctcaagttgatgccgcttttggattttagtttagagattttgtttctcaccaatttatctagatacctttgtccgtaatcgtttccacattcgattaaaatggaacgtaacaaatcttttgacatttccgcagattccattctctgaatcattcccgcagtacattagccctaccggtgcacctgtatgcccacctctagattactttgcctctcttctgcttaatctcgtaaacaatgttatacctccacttagcagcagcagcaactgcagctcgaggtctggctcaatggcagacatcttaaacagctcagcaagacctcctcatggaaaaactccaggaacatctcagcctggaccagcaaacgcctctgagggccagaaagcattctatcagatccaggacccaggaacttacacgcaactggttcttgagacagccgtgatcgagatcctctcgcttcctgtctctgctgctcagattgtctcttcgcttgtccagataattgtcaacatacaatcgactctgattcaatctggaaacgggttccacggcgctgccaacggggtgggacaagggtcggtactgccaacgtctccctctggagggagcacagactccatgagcgctagccggtccacttgtctgattcctggtatcaacacagcgagctttgtctctagaagcggttatacatgtcagcaactgtcgtgtctgttgattcaagcttgtggacttctgttggctcagctccctccagattttcacgtacagctttacttggaggcagcacgtgtgacaagggaaacatggtggcttaaggacgggaagagatcacaaggtgaactagactcagctgttggatacgctttgatggatcctacatgggctgctcaggataacacctcgaccgccataggtacgctatagtttctggatctagaagtgaaatgtttgtttggattttgtttttacatgtgtcttcttccaggaaatattgtcgccttgcttcatgctttcttcagcaatctcccacaagaatggcttgatggcacgaatgctatcatcacgaacctccggcctgtgacatctgtggcaatgctcagagttgtattccgtatcatggggccactgcttccgaggcttgccagtacacatactctctttaacaaggtactcttatggcttgtatccatatgaagtggtcagtcttttcaagtatatgcttgtgagagttaccgtgtgacgttctgctcatgttaaatttaatatcaaaggctggatagaatttgaatattatgtagttgccatcgtctagcatgttaattcctagtctctcgagtacacaacataaatgaaatgatcttcaatggtttcttgtagttttactttggtgttcattttttgtttctcaacagacgctaatgcttctcttaagcgcactggtcgatgtttttggaaagaccgcacagacaacagcccctgttgaagcatcccagattgcagatcttattgatttcctgtaagcttctattatattaccatagcaaaacatggattcactattgtcgttgttgattaacaatcacataactgttgttgcagacaccatattattcactacgagggacaaggaggagctgttcaaactagcagcaagccgagaccggacatcttggcgttaatcggaagagcagcagagactctccgaccagatgtacaacaccttctcgctcacctcaaaaccaacccgaattcttccatatacgcagctgctcatcagcagaatactgcaaagactaacacctcttaataaacacccagatgataatgtgtgtccgtagagcaatagaagcacaaaagattcttccatctacaacatgttctggtaaattgggttcatggttacaacttgttttgtatatatgtcaatggtaacattatgtttctcttatttatgaaatttagaatttaaattatcattagatgatgaaacaggcttattcaaccaggtatttcagatgaagtatatttcgattagtgttttaaattttattgactttttttgtcgatctctttttttttttgtcgtaatatcaaccggtattaattgatattccgaaaaaaattaagaaattaaaagaaacaatatataaggaccatttgaacctatataaaaatcttatgcatattttataataaattgatccatttgcgcatgctaaaacgtgtcatgagacattacctttggacttaggagaaaccgagtaaggctaatgagtcgtgagaaagatatcagagatggagagaaacacagaacaatgaagttagcacaagctttcttattactttaggatcattcttttggggtttatataaacaaataaagtatcgaagaagccgttaattattttcttgtttacctttttttcttttgttaggtgttgtgttagttatacagacttatacataaacaaaagatttgatccaaaataaagtggatagatgtttgtgtgagtggatttatgtgtcttgggcatgtattgacatgcgtagacgcattcctcattatcacaacatgatcacaaagtgtgagactcttactgatttctttttcccttttaattcattatcatccctttcttgacttacacggtactatttacttaaatcctccattgaatctaggtctacgttaatgataacattttgttgctcttatttatgaaaattagtatttagatcatagttagatgataaaccggcttattcaaccgggtacttatatcttaaatgaagtatactttgataagtttttttttttcaatatacacaataattatttaaagagtgtttgatctatgtaattattcattacaaaagttatttgacaaaattatataattataaaccaagaatgttatgtgatctccacataataatataagaagattcatgtaaacatttatggtagtttttgtttcttgccacgagaagaagaagaagatctttttttctccagttggtggaaaaggctaccatcgtagatggccctgacgctcttttccgataacaaaccatttttgtcttgagctaacgtatgtaatattttccattctccataatctgaaagcctgtacagagataatacttaggtataaccgtataagcatcgtgccatatgtatattgttttttacgaaaatcggaatgatacgttacgttgtgactataatttaattcgtttgaaataattcagaaacaacgaaccatcctgtgatatcgaaaggatccctgttagtcttaagcattttttgaatttcctctgcagtgagagcatctttatgtgtgcgagcatgcttgttgaatatttcctcgaattttgattccacaaatctgtaaaatttaggcgataagtaactacacttttgtaaagttggattttgtaattacgtacaaaaacacacacatgtacattattacattaacaaaagaaaaagatgccaaggaagagatgaaaaaaaaccttccgtcatcgtcatagacgtcggtgtcactaccgtgcatgcaaaggtgactattcttcacgtctattggaaacaacggcgagaatccctttccctaatcaccaatcactatggcttcaaaaaacaatggtaaaatatatccgcatagtttaacatatatatatatatagattgtttgcataattaaacctagaaacaaaaactaatcaaccaactaattaaatactcattcacatttccttcttgctttcttaatatatcggtttagccgttaaattttttcacatatgcttaatcgcaatgcaaaaccaagagtggagaaggaaaaaaacgaaaaggaaagcgaagtgttataattggtaccggacgagttttcttgctgagtcccatgttgatgaatatagcaacaaaagccgccaaaagacgccctgtcccgagcgctctaaatccttttttccatatacatacatcaacgaattaaatatgtttgtaaagttaaccagaataatatatcaaaatctcgttaatatattattacttaacatttattttgtcaaaagtttttcaacacttagctaattgtgtatgtaacgtaccttggtaggtttcccatggataaacggtgccgtctttgttcctgtcgaagaaggaaacatgtttctccaatgcagtcattttttccttatctaactttcctcctacataaacaacataatcccacaaatatgtttccatgcatagaccctttttcgactcacaaaaacaaaaacaaaaaaacattccaaaaatgttaagaatttaaaagaaaaaatatataaggaccttttcaacctatacgtaaatcttatgcatactttgttattcttatatgtatatatatcaaccaagttatatgcatatttaaattttctaaattaatttgaaaaattggagccatgctcaaatgatacatgtgggcatgctaaatgggtcgtgaacactttacttttgggtttaggagacttagccttagaggctagcgctactgtctgatgagacatgagaaatatatcacagattggagatgagagtgagaacactgaaattatcacaagctttcttattagtttaggataaacatataaatgatcgaagaagccgttacttattttcttggttacttattttttatatctattgttaggtgttgtgttagttatacttatacataaaccaaagattcgatccaagataaagtcgatagaggtttttgtgtgtgtgtttgtatttatgtgtcttggacatgtattgacatgcgtagacgcattccttgttataacaacaagatcacaaagtgtgagactcttactgattttttcccctcttataaatttaattgacattataacccctttcttggcttacacggtactatctacttaaatcctctttatgtcatttattcttagctatatatatatatatatatatatatagctaaaaatgataacattttgtttctctagtttagaaattttagaatttaaattatcgttagatgataaaacgggcttatacaaccatgtattttaatctaaatgaagtgtactttttcataagtgtttgaatgattttttgttgttgttgttgatcgcatatttttgtcaatataatgatttaaatatgatttgatatccaaattatacaaatttattcattacaaaatttatttgatctccaaattatataaaccacaagtcatttgatctccacatagtaatataagaagattcacgcatttaaggtagtttttgtttcttgccacgagatgaagaagatgatctttttttctccagttgttggaaaaggctaccatcgtagacgcctcttactgcatcttccgtcaacaaaccattgtcttgagctaacgtatgtaatattttccattctataaaatctgaaagcctgtgatataattaggtataagcatatcgtgcaatatgtatatttttttacaatgaaaatctgaatgatacgttacgttgtgattataatttaatttgtttaatttataaacaacgaaccatccgatgaaatcgtaaggttctctgttagtcttaagcatttgtttaatttcctttgcagtgagagcatctttatgtgtgcgagcatgcttgttgaatatctcctcgaattttgattccacaaatctgtaaaatttaggagatagaagtaattacacttttgtaaagttagattttgtaattaggttttaacttttaacaaaagatgtcaaggaaattaagaaaccttccgtctttgtcgtagacgtcggttgtcactaccgtgcatacaaatggtttcaaaaacaatggtaagatatatccgaatagttgaacctatatagattgtttgcataatcaaccctagaaacaaaatcaaaatattcattcatatttccttcttcttttattagtatattccggtttagccgttgaatttcttaacttatggtatccttgatcgcatgcaaaaccaagagtggagaaacaaaaaaagagaagtagtattagttagtaccggacgagttttctggctgagtcccatgttgaagaagacagcaacaaaagccgacatgaaacgccctgtcccgagtgctctaaatccctttttgggtatacatcaacgatttaattatgtttgtttaagttaaagataagaataagcaacacatcaaaatcttgttcatattttatgacttaattatgtatgttaccttggtaggtttctcatggataaacaatgccgtcaccgtttcggtcaaagaaggacacatgtttctccaatgcagtctttccttcctcaactgtttatcttcctacagaacaatataaccccaaaaatatgtttccatgcatagaccctttcttaatttcaacttataaaaagaacaagaaaactacattattaactaacatttcaacctatttgttgttcttatcttactaaatgtatagttgatgtgttacagaatccttaaaagtaaataatatcagattggagccatgttcaaattgattcatgaataacctttggacttggaggaaacagaggaaggcgcttcaggctgttgagacatgagaaatttatcagagattggagtttaggagagattacacaacactaaaattaacacataagctttcttatcagcttaggtgatacataaacaaagattcgatcggaaaataaaatgtggatagaggcgtttgtgtgtgtgtctctctttatgtatgtgtcttggacatgtcttctcatgcgtagacgcattccacatttcataccaaaaggatcagaaaatgtgagtctcttttacagtttagatttcttgttactttccatttttatttcactattatccctttcttcaattacacggtaccaatctctactcaaattctccttgttcattcatcaatctgaccttaaatgttctgtcttcatcagtgaaataacagcagcaaaaactaaccctctttttcacagcaaactggggaatccaaagaacaacttaggactcatgtaaagaactaagaagagaaagtagagatgaggtttattaaaataatcatcaactgtttttggcggacatatatatattctcaaacaagactataacattaggaagttgtagggaatttcaaagcttcaaatgatgttttatatacactgttccttctattaatacaaatagctgattcccaccaacctctcttcacatcacacaacatttagctggtccttttggatctgccctagcttcctcgttacctggagaaacaatactttgattagagcacgatgttcttatgtcaacaatccaagtgttccaggaattgtccaagtttgtctatcaaagatgtttaaaccagaaagtgatatcttatcaagtcatccccactaatccatgacagtaattataaaccgaatttgggttttgcaaactagagaaattaccttccgggggttgagctaacttccggttatgcgaagtcatcatttcttttttcagcttaaccagtatgtcctccattgtatattctcgccgccagttagtgagcatagggaagagactcggttcaacctgatttcatatttcgaaacaacttgtcagactaagcaaatatccacacacacacacacatatataacagcagtgatgtcaaaggttattaccactccagtttctgggttaacacaagccatgtttatccgggtctggaacctcacagtcggtggactttcagggtactccttaccacagaaaagcttcagctgaaagattttcccttcatatgcagtctgatattcgttcatcaccaaacaaaaaacatcaatcttctcaaaatccaaaagcacaaaccaacaatttccttcctttttgtccactctaatcaatagtaatcaagaaatgtcactacataccatttggagtaaagggtcttagataacacagccaacggttatatccattcgagaaacagccacacaactactagttacttcagaaacgcacccaaaacagagagacaaaaagtagaagaaaactccaaagcatatctaaaaaatgtttgaacactaaaacactataccaacaattctctcacaaaagtgttaaaaattgcatctttactctatcaaacacagataaatctaaaacaaaactcagagatcgatagagagatacatacattaggaggaccaagaatggtgccagtccaagattgcatataaatatcatcagcatcatccattccatagctaacagtaccatctccaatacctttctcacctctttcaagctcttccaacaatctaaagttcctcggaactacatcacaaaatcaagctcttataaatatcgcccccaaatcaaatcattttacagatcagatatatacctaatcgagaccatggatccgatcacattctcattaaaaaaatctcggaaacaaatcgaatcactacaacaacataaaaacccctagatctcaaaattcaatctacgagaaggaatgatgaaattgaaagagaaatcaaccggagacttaccaacgaccttggcttcctccgaactcatcgccgatgaatctcaggaataatgaataattagggttaggtgagagagagaattgagcaatagcgaagaagcaatctcagagataaaagagagagagagaatgttcaaagtactgtttgagagcagaagaagaagaagcctttctatagaaaataatattaattaagagagacttttggttaatttagctacaagtaacaattaataaggaaagacaataaaacataaatctcttacatataaatgttaaattctatatataattatttttcaaactaattatggtgaaaaatttatggttaaattctatgtatgttaaatggtgaaaaattggaaataaatcctgttgaatagattttttttaatagtaaaaaatatttgacatttaagttttggatcatttggttatcaaaatatataatttaagctttggatagtcaaatatttgacgttaagattaatctaatttttctatttatgtatactttttgagaccatacaaaaggtaatgtacatgttgatggttgttggtggtgtccataagataatgcattttttacatagaaggtagtgacacatgtaatttgttttcacaatctcacaaatataaacatgtggtttataaatgtcagaagaaaaaaaaaatcttccttatactaaatttcatcatgttgtgtgagtacatgatgcaaatctaaatccaaaaaaatgtttagttgttatatgaaactagtaatggtcgtcaaaacaacattcctagtagttgattaaattttgattctgacctcaatcttcttaaccttttgacggctttttttgctgctctctgttgcttttttttgctgttaggttatgattagtctcgagtaagtcttaagcaacccatggcttgtgctggagataacttatcaaaccatgatcttaataactttgatttccggttcgatctttctttttggtattggtcagatgatggtgaagctaaatcaattgaagtatatgaagttgagctggttcttgatttttctttagcatggaagcttcagggtttttgttgcagtcgagatgttaccttctcgagaaaacctcgaggaactcgaaccggtagaggacacgtttccacaagaaaatctcgatgaactcgaaccaattctcttagaacctgaagattctccaagcccacctcgtgacttcacactctgattacgtttggttttcgagaaaatctgtgtttcctcaacagatgaatctaaaggacaagactttccaacttggatggaaaaagaagaaactgaggaaacgtttccacgatacttcttctcagggtgacttgccatgctattggagtgagagagaagtttcttcggggaagacgaaaccgagtcggttcgagaaaccggaagagatttgagacgacgtaaacgggtttcgggattagtgggaagagcagtgtcgtcggtgaagcctgaacagttgattttggcgacttgttcaagaacgtattgatctttagcttgtgaaagaagttcctccacagctgaatcatctttaccagtaaaaaaacttgacatcttcgttgatttggtttaggggtttagagtttttttttttgttgtgagagagaacgatgaaactatgattctgcatttagaatcattattatctatagattttagattctttctatttctgtctgcctaatgtctattgtccattttctgtgctctggtaaaaatatgttaattgtccatttttcataatttgtaactgactgttgaatacattaagtcggtaatttactgtaaatatatcattttccaattattttgctctgtgtaggattattgtaaatttgactttttttatttatcttcaaatgaaattcatatttttcaataataagtatatattaaaaaaaatagaaaagacataaaaccgaaaataataatatagatgtatccaaaaatctgctaaaacgtacactaattttcacttcaaagcttctaataattttaacttcaaagtttctaatatctaacaaaaaattcatccagttttaataattgatacatcaaaattcattcaaacaaggcctcttgttttcaagttttcagtaacaatatccaaaactaaattgtaacttgaatataaaatggtttataatttaaaatgtaagaacatattaagcttttacaagataaaggtagaaattctacaaaaccaaaggcctctcaactgaagaagtttttacctttttcatcattaagtatcaaaaactttcacaatctttctcaaattttaaggcttttcagggatcttcttgtgtctgcatcttcttgctcaacctaaaaaagacatacatatatgtaagaaaccatcgaaatcgtaaacacaaaagtatccttgcaaattatttaagcaatcttgtggaatctctcacctcaacaactactcttggtttcttctttgcttttccattatcatcagacttctttaaagctcttccctttttatgaatcacaacttgttcttcagcatcatcgtcatcctcgtcatctgagtctgtagagagttcacgatcgggttaaaatagtttctcaaaatacatggattcaattattgagtggaaattgtaagaaacaggaaggagatgaatattaccatgatcatcaccttcaaggtaagactccttagatggaagaccagagaagtcttccatgtcttcttcttcctctgcttcgagttcatcatcgccttcaacatattcaatcactccttcctgagatatacgttaatgaatgaagatcagtagaaagatgttgcatctagatttgatggactaccaaaattacacggcttttacaaaagtacctcctcctcttctttctcaacttcgtcgttggtttcgatttctctatcaagcagtttgttaaacacactgtcagataaattgtatatttcagtagggtaaatgcctttcttcaaacgttccatcaactcggtttcaatagcctgtaaaaaaagaatcaaaactatcatgaaaacctcagaactagagtgaagcaagtaaaaatcaaaacccaaaaacaacaaatcgtgaccttatccaactgagctgcttttatagccttttcctctcttctcgactccctctttatttgcctcctaggcgtagtgactactacctccctgttattcaaaaacaaaagtaccaaataattaatcagaacaagaaaagaattagacacatgtaaatcaaacaagataccaaactccacaaacaaaaaccagaagaggacaagaccttgttttcagagcaagtttcctcatacgaatacgcatctgagtcattttagtcagtctttgtttaaccttatgctgcaacaacttgggccagtacaactgccacacgtaagaaagaaaataattaaaaccctcccagatcataagacattgacattgctaatgaagaagaagagtaaagaaataaactgtggcaataaatctcaagctcaccaagtgtttgtcaatcatttcaagagccttctcatagtttacaggcagcttaactctctcccacaatttatttggcatgtgagctctctcaatagtcttcatatataaataaaacactcctgtataaacaacaacaacacaagaaaatccatttgtaagaaaccaccacaacaacactaaactcaaaagaaacatctttctaattgccctttactacgtaaactaaatcaacacccaatcctaactattccaacacacagaatcagctcaaagattgacacttttctaaaaattaccatcatggtcacggatagtggcgtatcggctattagcaagagggcaagagcttcgattacagattcctgttacattatattggtttctgcaaaagattccagtttcgattctagaaaagcaaaagagaacaaaacaaacccatcaacaaattgagctacaaatgaaaattgaaagctaacaagtgaggataaaaaatacatacttggccatgtaactacagtgcttgtgcctaatgacctgccatataacctcatcgtgttgcatctttcccggtgaagcttgaaaatagctaaagggtttagctttcgggcgagactttagggtttatgagtgaagaaaaagaagaaggagaagctgtcaaggacggcgccgatcaactgtcgtcgaaaaactcaaaagtgaagtggttaactaaacctgatattagggattcatataatgggcctcatagcccaatttaataacataaataacctgtggtataattgggccaaattattaaaaagcccaaaagacaatacactatctctgtttctccgaaaaccctagctgctaaatcctctctatataaaaaccctttaagatcatttctggttcaaaaccctagatctgatactaaaatggcgacggcgttgaagaagaacagaaagaagagaggtcacgtcagcgccggacatggacgtatcggtaagcaccgtaagcatcccggaggtcgtggaaacgcaggaggtatgcatcaccacaggatcctcttcgacaagtaccatccaggttacttcgggaaagttggtatgaggtatttccacaagcttcgtaacaagttcttttgcccaatcgtgaacctggacaagctatggtcacttgttcctgaagacgtgaaggcgaaatcgagcaaggataatgttccgttgatcgatgtgacgcagcatggtttcttcaaggttttggggaaaggtcatttgcctgagaacaaacctttcgttgtgaaggctaagcttatctctaagactgctgagaagaagattaaggaagctggtggtgctgttgttctcactgcttagttttttttttcaattcagtctctttttaatttatttcatgttattgaactcagctttgttggattttggaatcagagatcttttaatctatggtattggattatataatttgcttcgtattatttggaaattttgggattatttgtgtgatctgattcatctctgcatttgcaatgttgtcatgttcttcaagatcattgcgtgttatgttcactggtttcaaagattatgtctgggtaaacctcaaactcaatgtcacaatagtgtttagattcttacaacaaagtcttagcttagcttgatcaatttgggaataactgattcttcttctgggatggttgttttgtttattacgaatctgcaatgacttgtttaatgatcatttcctgtgattgttttcaccatttgaattgttttcatcttcttcacagagatcgatctcttctcttttgtttgattggtctccccatttttttattctagcttctgctaatgaagcctggacattttgcataaactttaatacacaaacactgaaactgatactagaatttgacaattgcttctttacctctttcttccagttggttctatagataatgaaaagtagaacagatgtttgaactactgttcccgttagcattcctgtccatatcccctgtagttgtgtgtgtgtttatatcaacttgaagcttatcatgtatgcaagttctttattaaggttagatttcgagattttacttaccttcactccaagttccatcttgtagccgagcacaagaccgattggtataccacatagatagtaacacccaatgttcacatatgcaacaatgccttgccatccagctccaacagctacaccttttgtaccaatatcaaaaaccaaaacacattttgtcttatacacaatcatgctaaatttaagcagcctagggtttttgagtgttgttagagaaactaccagaaagaacaggctgaatgttgttgatgacgatggtgagagccagcaacggagtcagctgcttcacgagtactctcacttcttcatcatctgagaacattgctggatacttgtctcgcaacacaatgagagtcactgatatcacaattccgatcgatacagaagttatcatagccactatcaataagaactttgctcttcttgggtgttcagctcctagctcattcgactctcttacactgcacatataacacatcattttttccaatcattaagcttttttttttcttttctgttaagagactttgtgatatacctcacagccgcattgaagccaaaggccaccatgatcggccatcccaatatgttcatgctataaccaaaccgttaattccgttcctaaccaaaacagaagctttcacagggacttagaactcaccatatcgaaagagcagctacagagacttgagggttcttgaggtaacccgcaaacagaatcaacgccatgaaataccaaacctctaggctgaaaccaacaaacagcaagtcactaggtgtacccatcaatgaaccatttatgtatcgatctgactccaaagtgttccgatatctcaccaaaccatgactgcagaggcaagagacaatcttgcaaagcctctgagattcttgaacgccatccaagagagccctgaccaagctctgccagaagaaccaccacaaatataaactatttgagtaacatctattaaccaccacgacatattcaatacaacggctcctccggccattccccatctaagtttcagcatcagcaaccaactcaatagagtgtgctgtaacagcacagtcgctgctataaccgccatcgcaatcactttgctttgtgcctataataattaatcaatctcataaccaaacaacttgaatttacctcaagtaaactgattttgatgttgttacctgcaagaacttggcggtggcgaagttaacagcgtaagcaaagagctgaggaatcatccagagggagaatttcccggctgctttagagatctccggagactgtccgaggagactcaacagtggagtggcaaacacgtaaaaaagacaaagaagaagggcacaagagttaaggatgatccaagacctctgaagatatattcccatcatctctagttgccctgctccgtacgcttgcccacaaagcgtcgctagtgcacttcccatcccaagcttaaatcaattttaagtttaaaagaataaattatgaacaatggatcaactaaaaaatgtgttacacatttgtcatagatatgtatgcttaaagtaactaattatattaccataatgccgacagagaagccggagatgacggagttctgtatggagacagcagctaaagccagcgtgttgacgtgtccggcgaggatctgcgtgacggcgccaagagagtattggcagaaagatgtgaatatcgcaggaccagcgagccaccacaacttctttgactcagccgcaaactgtcgaatgaagtctctaccgccggagatcggaggcatgtcggtgtcggatttggtatgtgctcgatgttcttgttctgaggaaatagtatcttcatgatcaacgttgagagtttccatgtcttactagcaaaagagagatagtaatttcttagacatgcatgcataacgcatatatagagttttatttgtatgcaatatttatgttaggttttttttgtttttttcacaaatttatgttaggtactataatttttagcttttcaaaattctagtatcgtaccacaatttagagatgcagtggattgtacgaggacaaagtggtctaactattcttacgtagtctccaaacttgtagtgaactttatcacccaattttagtttctgaaattagctgactgaactcaagtcatttggtatctatcattcaacaatgagcaattgagcattattataaaattaatcttttctaatagtagtttgcttagaattgggttgtgcaaattgcaaagcacattaattgagccaaaaactgtacaaaatttacattcattaatcaaaggctaattatagtttcttaaaatatattatttaaatactattttatgtttgaataattttcacaacaaaagaaaatcatccttatttgaaagttgaaaccttaactcaccacataattttatgttatttttccgaagaatgtcgatgttagataaatactaacatatagtttttcgaggaaatcacgggtttacgttttttggcgggaaaatcatgggtttacgtttatgcgggaaaatcacgagtttacgtttttggcggaaaaattacgggtttacgtttttggcgggaaaatcacgggtttacgtttttggcgggaaaatcacgggtttacgttttttggcgggaaaatcacgggtttacgtttttggcgggaatatcacaggttttggtttttggcgggaatatcacaggttttggtttttggcgggaaaattacggatttacgtttttggcgggaaaatcacggttttacatttttgtcgggaaaatcacgggtttacgttgttggcgggaaaattacgggtttacgtttttggcgggaaaatcacaggttttgttttttggcgagaaaattacggatttacgtttttggcgggaaaatcacggttttacgtttttggcgggaaaatcacgggtttactttgttggcgagaaaatcacggatttatgttttttggtggaaaaattacgagtttattttttctcaatttcatcgcttgtatatttaagaaatttggaaaaatattgattttattaaattggtttagatgtgttggttaagcttaaattgatattggtttagagattttagttggtttaattcaattttacaaaaattgatgggttaattgggtaaacaattgaaaccattaaccattacaacccaactcatttgactcatcaaacaaattgatccaataactcatttgactcatcaactcatttgagtcaaaaaatttaactcattagggttcatgggttgagttgagttgagttggcccatgaattttgacccattttgacacccctatttgaaaccttaactcaccacataattttatgttatttttctgaagaatgtcgatgttagataaatactaacatataatttttcgtttttaatcagattatctttaacttgaattgcatcgcgctagttagtcactaaatctaaagataattttttgatttgtttgtacataaacaataattttaagaatgaaaacaaagtaagatatgtcctaattaatcaatacctaaatccatcagagcaccttcatcggtgacacacacatttgagaatctagcaaataaaaatattaatttttctatatagttttattatttaattaattatttatctattaagaaaacatcaaccaatcaataagcgacaaatgtagacatgtgtctctcaaaacaattaaccaattattatttaactaattatttatctattaagaaaaactgctagtttacagagaagaataatctctgcttcttctgcgtttaggtttgggagccggtggacattcaagcggctgcgaaatcctaaactcctctgctttaggcattgcgcactcttcttattcttattcctcatcttctttctctggcttcttctcaaccatcgtcacctgacacttaaccggcgagagaatcttgatcagtttctctccattacagattgtcttcttctccgtctttgctcattctatgttttcttccttacccttgttattactctgcacctcttttcccgcaaaattcataacttacacgaaatatagaaaacagaaattcaaagtatcaagaagaatagacagggaataaatacatatatctttggatttatcacattaataaaattatattaaagacgatttttttttcataatcaaaaacaaactaggacatggattattattattttctttaatataattagcataattacaaatttcacattgccacactaaaaaaaggctatcaccgttgattaaaaaaaataatctatggcctaaacttcatttcattgagaaaagatcttaatcagtttccaattgaaaatagaaatagagacacaagagagagtttacacccaaaaaaaagagacacaaagagagagatatggtttatagaatagggcaaagagaaagagtgtactacagagatttagctttaaagagtgtagcagaacacaatagtcgttcagaagaagaagtaatcacattttcgaataaccaaagttattatcatactgagtcatgaactcgtcgttgaacttcttgaagctatccatgatctccggcatctcatcttctgctggcaggattgttgtcctcagatggaacacactgtcaaaatccacaagtggaatgagttcataagaagagatcagatgagcaagaaagaaacagtagtagcagattctttacccttctttctgtccaaatccagagccaggtactgtggagattcctgtggcttctaagagcttgagacagtagaaaacgtctggcacttttccagcttgttttgcagcttggagagctcccgttggtaaccgtatttgaggaaacgaatacattgcacctaacatttacaccaagaattaaaggatcaacttcaacaacatatactcccaaattttctacactgcacaggtgctaattgcttcattattgttttaccttctgtgaaattgcacacgacgtttttgcagctgttgaatccatctgtcatgagccttgctcttcttctcaaagattcaagaatccccttgctaaagaaatgtgcaaaagggcgatttgttattcaatccagggatgatgatcacgagcatgtaagcttatatatatacctttcacgggcgaactggtcatatgaaatgtctccaggctttggaggattaaccatcaaacccatctgcacaggtaataatcactcgcagaacataccaatgatttctagaaaagtaaatccacattactttaagacctttgacttacaaagatttgcgcagagacattagggctgagggcaattgatgcaaccttgtatatctcctcaacaacctgcaaattcagaaatcgtattatgattatgttatgtttgacacattacataagtaagtaaacagagagtaagacagacccttggagggaggttggtcatctcaaagtatccacctcgctgtccacattcaccccaatatcctttagagactgtgtgaaaagatacaagctgaacttccttgctgaacggcgaacccatttccatcaaaacctatgattttttaagaatggtcgtatcaaaagagagatcacaaatcaggcacaaggttagacacatgaaaccaaatatagaagctaaccttcttggagctgataaagggacgctcatcctggtatatgttctgctgataaacctcgtctcccagaagaaccagtttctcgttataacagaacttcaatatctctcttatgttagcttcgcttagacactggccagttgggttcccagggttaatgatcaccattgcccttacctgtacatgcattcaagacaatttgtaactggagcaagaaagacatcaccgattattgcaagagaagaaggaaaaagagtgcttactgttatcccttgagaacgagcctgagcaacggattgtcgaaggttagcaacatcaagtccccagttttcagactcatcaagatagtaaggaacaagagtaccacctaacagtgatatggtagctgagtaaagtggatactgtggaaccggaactagaatctgccaaacggaaaataaaacttataaatgaaatgtcagaaggtaaatcatagcagaaaagacctcttgagacagagcattaccccatctccattaccgcgtataacacaattcaagatttgcatcacacctttgctagctccatcagtgagaaagatgagttctgggtcactaaaaataaagaaccaaaaagcctaagctgggtttgtttctacaacaaaaatctatttcattgtgcagatgaaaacaatcaccttggatacccatcacgccgttgaatgaactcagcaacctctttcctaactcctggaaggcctcttgaatcactgtaagcacctattgaaacagaaaaaggcaatataactaactgttctgtttgtcaacactaatctacatattatagatgggctcataaggtcatacctaaaccgcctgaagtcaaggaaagataatgtttagctcttgcaatagcatcagctggaaatagcattccaacatttgggtcatctagtagaaacggagcttggcaaagcgcaaccacctgtaattggtattcgttttactatttaggctcaagccggagattgaagtctggctgtctaataattgtctatacacacatacctggcgaggaaatgtcaatggcttctgtcctaaagcatgagggttcccaacgtttgtgaaaataatctgttatagcccaagttaggaactgccaataactatggacaaatcaagtgctagatcataattgcaaatgcacatcaagtccctaaccaacaaaggaccacaggtctagtctatctaaagctccttgtttcatatttaaagttagatacagagtcagagacacattgataacacctattattgagtaaaccaagatgtaaaggcacaagacatgaagacaacgcaaagtgtttacctttttgccttctttctgcagctcagaagctcggagataaagttcacctcttacggcatactgacacttcttgacgttttcattcagagtatcgtagtctaatgccttgagagccatttatgttcactctgaaccaatccctagctcacttcttccctcctctacaattggaagaaaacaattcatcatcagcaattggaaccagaaaaccagaatttggataaacgaatcaagatcaaaactaattcgactctaagaacaccaaaaggccactaatttctgggtttctgtagctcaatttccagaacaaattcgtaatcacacagtgtaaaggagacgccttttcaaaagggtatttcagaatcattcaaaagaagaagaatttgatcaatgatcgatccaaagagaaagaaaaaccaaatcacaaaccttcaaactcaatgttgtgactccaaaagtctatctggagagtcacgttcggttctagagccaagggcaaggcaaagagtggggagagttaaaatattagtgtgtgtgattttaaaagtattttgtgtagcagattacaaatgtgtgtatgacatgagtttggatcattcctcaatctaatctatgtggcttcacaacaaaggaagcagcagagccactgaaattgacgaagaggatttgtcagacaaaagtcaattcacgatatctctatatccgtgtctcgtttttatgctacgaagaccgttcttgcttaattataaaaatagaagcagataatttttgaagagaataaaaatgtggtggagattccagacgaagagattgttagttttgtcatgttatggactgtttttctgagtaaattatgcgtttggaacatgaccaatagggtcgatccacgtgtccgtcgtttttgtttcgtcctctttaagacgcagcagccagcagctttgtgtttactagtaatctttgggcctattggctcctcatactctcaaaaggcttaagctatatgggcaagagttgttttgccacttcaattttgagaattgacaagtgaatgatagaactcaagacttcataagtgaatcaatatgagttgtttattttttcttaaacactttctatcaataatttcttttgtattaagaatcgatacgaaaaatatcaccttgttaagtttcatatcccgaattggattttatttaaggactaaaaatgtaaggcttagggtgtgactggttacggcggttggaacggacaaaaccgtcaacggatcagaccgctttttatttaccattcatcaattatagtttgcagtggtccggaccaaaagaaatagaagaaaaccgcagcggaccatttgcggaccatttttacatacaaataaaactggtctgtagcgatttattgtccgccccaaaaataagatgaactaaaccgcagacaaattagaccgctatgtccactgcatccattcaaagccttattttgccacatctataattacattttgatgtacgtgcattgaataattgtaaacctaaaccaccctaatatacatataagttagttttcttttatacatttaatttacaacggatattatctatcttaaaataagaaaattatttttgcaaaagttatataccctatttggtcaaagaaattcttatgttatctaaaatatgcatatagacacatataacattaatcaatttaactaagagggagaaaatcattgcgtagcgcggaaactcacatttaaaagacaaaaaatagaaaagcttagaagccaaacgaaattaaattaaactgccaatccaataggttatttcatgcaagttctcagccgctttagaatttattttatgtggaaaatttatctagttaaaaatgaattcttagaagctgagatattagtttgagagaaccaccttgaaatcatgcaaaaaaacctaagacaggatccgaatcttaactttgcattgttattggaaaagcccaggttgtgttcatttgtttatgtcttccctttgtttggaagaatgaatactgtttgggattacattactcattctcccatagaatttcaagtactttgtgtataattaacgattcgaacaaacattaaatctcttatatgatatattaaaacatattatttcacatactactgaataatgctttaaaaacataacgaaaatagcaaataaaaaaaatcaaggctcgacgcatttgagatccttgatggtagcgagtctttggagagagacgtcaaagtcatcgtcgcggctaagcatgctgacacggacgtacctcttgttacaaccacatcggtctcctcctctcgtcaaaaccttcttctccttcaagagacttccgagatctctttcctctttataccccaaccacgcaaacgctgcaacaacaaccagaaccgttaacaaagttcaacacaaaattgcgttcgtggtgtttagtacgtaccaggagaagtggagagggttttgccaaagaagttgcagaagtcttgagggtaattagggagagtgaatgcgtcaccggattcgactacctcacgtagcctctcccaccgtgacttcatcttctcgtagccatactcgaagaagctctccgattgtgtcctacatgtttttgtcagttcgtttagaattgtggtggctcgagtttgtgactccttcgacacaccaatggagtttattgttaagtagtgcaccatcttcttagccacctctatgtccttcactaacgcccaccttcacccacaaaacgaaacatatacactttacaattctataacaaaatctaaagagaaaacttacagaagttgaaggataagtaaattttaatttagttatcatttgcttaaaactatagccgtgtcaaaacaaacatgatttagtagttgcaacatatatgaaacgagcatgatttagttgttgcaaaacgagcatgatttagttgttgtctacaaaacaaacaaggcagcaacgttgtttaagtgtttagttagcctcacccaatgcgtgacccagcgtggccggtgattttggagaaggtgaagagcataaggtcatggtcttgacggcgagtgatgggagtgtagtgtggccagtaatacgccaagtcgtggatcactttcccaccctccctacgattcaccaccggctctctcatgatcccatcagggttgttcggtgacgtcaccaactcgatgtacggtccctttttgtcgaacgtccttgcgtctccttcccatttgtatagcgtcgattgaagatacgatgcctcctccacgtatgtctatgcaaaacataaaaacaaaaatatgaacttactttaaaggaagaatatatgtttttaggaagaatatatgtttttgggaagcattaattaaactttggtcaatttttgtattttctttgggatgactaatgctgtggtcaagaaacatgtggtacttacacaaccctaaaataagagtgcttgtaaatatcttaaatttttatagcaaaccatcttgatatgcttatggagatacaaggagagattcagtgagtgggggcttacggagtaataaggaaccgctgcgacgatgctgacaggtttgacctcagagagcgatgaaagtgcaaacaaagcggcctgacaaagctgtgaagagccagtccccaccacgatgtagcgttcctcggtcgctgcgttaccgattgcaccatgcaacgccttgatcgccttctcaagctctggctctaggaaccaacacacgttcttcgtgtcgctgaagtaactcatcagatcccatgctggtatcaccaccgtacacctgtcctttttcttcatccaatactcttgaaacgccgtaggatctcctctgcaaaaaaatgagtacaaacaattaatatcttttgtcaaaatccatcatgaatctacgtcaagacgttttactttgacaaaacgaaattaacatagttgatttttagaggattattatgcaataaaaaaagtgagttttttggtagaaagagaacaaatactgatcaagattgatgatgtcatcggacaagctcttgtcttcgttcgaaccactgtctgatttcttcgagttttcacacccaaccatcatcttcttgaccttgtttactctcttgctggctattttgtgacaatgtataagaatgttagtgattggaaaatcgtatggagtctatttatattataacgaggagtcatgaaaacaaataacttatatggagtctattgattaaaaggtaaaagatttgagttgtgtattgtcagctgtagaaacatatgctccatttttatggtcaaatttacttattcaacaattttgggtcaatatgtatctcataattatgatcgttctcctaactacgccaaatgtcataacgaatctatcatacttttgtagaaacttacttaaggaatgtggtcaagagattattatctatataatttattttaattaattactatttaatgttatttgtatttaatagaattctaagtcagatacacttagataagaacacaggttttactccagcattatgtccccacgtgttgtgttatcgttcttatactttcatttcctttttatttgttcttacagtgaatttggataaattagttaaagatcgatattttgtgatatgttcaagatatatggcatttatataatcgaattaacagtacaagactatttttagatacaaacttgattaaattgtggactctattgagaatccgtaaatgtgaaccaatataatttttcaaattttagtatttagggtttaggatttagcgatagtgtttctaaattttagagtcattcgtagagtttaggagtgtataatatcctatccgacaaaactaatgtaccttaaaacataaatcttttgtattcagatagatttatatctcccatgtaacgttatttctgtcagcgccgacattgtctcacgtaactttttatattaaatcatgttaaaaatgtagtgctgtcatcatttttgttaacgccgtcatcgtatcacatgaaattggtatattaaaccatgtgaaaatataacgccgttttttttagcgccgtcattgtgtcacacaaaagtttaaataatatagtgggaataaattgttgataaagaaatcatagcattaaattagatatttaaaaataatgattattaatttaaatatatttaattgaccaatctaagtctcatgctatttaaaatgtaattgatagtaatatataggggtctcaaaatggataactcaactcaactcaactcataattaaatgagtttagggttaaatgagttatgggatgacccaactcattttgttaaatgggttgggtcaacccataactcatttaatttgatgggttgagttgttaaatgggttaacccatttaagtaataatttaattaattattattataaaataataataaataattatcattattaataattattaattcattatcattaaacttaggatatttacggattctactttttacgggtttacgttttcggcgagaaaattacggattaacgtttttggcgggaaattcacgggtttacgttttttggcgggaaaattacaactttacgtttttggcgggaaaatcacgggtttttgtttttggcggaaaatcacgggtttacgtattttggcgggaaaattacggatttacgtttttggcgggaaaatcacgggtttacgtttttggtgaaaaaatcacgggtttacgtttttggcgggaaaatcacaagtttatgttttttgttgggaaaatcacgagttttcgtttttggcaggaaaattacgggtttatgtttttggtggaaaaattacgagtttactttttctcagtttcatcgcttgtatatttaagaaatttggaaaaatattgattttattaaattggtttagatgtgttggttaaacttaaattggcattggtttagagattttggttggttcagttcaattttacaaaacttgatgggttaattgggtaaaccattgaaaccattaagcattacaacccaactcattttactcatcaaaccaattgacccaataactcatttgacccatcaactcatttgagtcaaaactttcaactcattagggttcatgagttgaattgagttgagttgacccatgaattttgacccattttgacacccctagtagtatatcatcaaaattgcaactattactatgaagccaacttatcaatttggaccaaaaaagcaaattatcaaatctagttttaggatcataataccactgcttttataatgttttaatgatataaagtaaggccctatttgtttgtccatccacatgatccatccaaatgaaaatgaaaaataatgtttgtttttgacaatttaacaagcatttggatcgatcatctggatgatacatctgaatgagtttctaaatttagacaaatttatgaaactcatttggataaatttgattgaaccatttggatggagatggttcatctaaaaataacaaaagactgatataccctcatttatagtcataatttaaataatttttttttctataaatttcttatttaatatttttaaaattacatattgaaacaaaaaaaactataaaaatcatgaaatcacggattattcttttatgtcaaaatcgtaaaatcgtggaattgcgttttttggccaaaaaccgcaaaatcataatttttgatgtaaaattatagaaagcgctattccacctaaaatcataaaactatatttacgctgaaaccactaaattatattttctcgccaaaatgacaatattatgtttttccgccaaaactgcaaaatcatgttttcctgccaaaattgcaaaatcatttttcccgcaaaatcatgttttcccgccaaaaccgcaaaaatcttatttttacgccaaaaccgcaaaatcatgtttttcccgccaaaaccataaaatcatgtttcccgcccaaaccgtaaaatcatgtttttccacaaaaccgtaaaatcatgtttcccgccaaaaccgtaaaatcatgtttcccgccaaaaccgcaaaatcatgttttcccgcgaaaaccgtaaaatcatgttttcccgccaaaactgcaaaatcatgttttcccgccaaaattgcaaaatcatgtttacccgccaaaaccgcaaaatcatgtttttccctcccaaaccgcaaagtcatgttttcccgccaaaaccgcaaaattatgtttttcccgccaaaaccgcaaaatcatgttttcctcgtcaaaaccgtaaaatcatgttttcccgccaaaacaataaaatcatgttttcacaaatccgtaaaatcatgttttcccgccaaaactgcaaactcatgttttcccgctaaaattgcaaaatcgtattttatcgccaaaaccgtaaaatcgtgtattctcggcgaaactgcaaaattatattttcccgccaaaaccgtaaaatcgtattttcccgccaaaaccgtaaaatcatattttcccgccaatatgtttggtattgataataggtaatgatgttgaatatttgtcattagttaaaatgaaagcatgggtattttagtcatttttatctaaatgaaaatgtggatgaactacaaaatgatcaaacaaataaagatccatttaaatgcatcatttagattaaattacaaataataaaacaaacatcattcaaatgtatcattcaaatgactcatgtaaatgaatcatttgaatggaaatgataaatgatgaaacaatcagagcctaacacttcaaaaacaaacagtaaataatgaatctacggatacttaagataaacttaaaacaaagagatatcagtttaattgaaaataattgaagtttaaaacgtcagtcactcactctacatgcacatcctttattgcgtgtcaaacgagtgcttaaactagccttacttacacacacgcaagatgcgatgcgacgatcaaaagaaaaactcactcggactctactcactatcacctgatataacgtaactagaggtaaggtaaccatgttcaaccatttacgattatgagatggaccaatactaaagcataggaaaacagatgtttgacatgtcccttggtgaaactttgatctgaaaatacaatttcctaaacctacaaattttcatcaatttttgcatttgactatatattttttcatagtatatagaattcacttaattccaatgtcctaaaccttgaaggactcggattcatttgaattttcaagaagtaaattctaaaatctttgtctaaaattattgaagttttaacccaaatccacttgctaatagctagatgaattcatatctttgatacactactttagtctctcatgttatactagctttgagatttctaacagaattcaaggcaaaatggaaacattatcttcgaataggatattatcataaatagtgaacactgccaattccagatcctaatccagtaatcttaagacgctggtcagagttatgagacaccaaaaatctcgagctttggggattcttcttgttacaaacgaagctatacatttgttgatcacatttgggtctctctactcttcttggcctcctctttcctggtgttgagcttcgttaggcaatgtctgaggagccttcctgaatacatgtttcctgcaccgctcaaagatactgtcgtagatcaaatcgaactccacacctgctcgctctcggtttataatgaacattatatgatctgcctccacgatcttgtagtacctgaaacatttcaagaaagccccagtaagaccgttaagctttcactgaatttccaagacattctaatccaggtcaaatctatggttatagcgagaagaggactaaccaaatgcctggttggagagggagacagtctgagtcactacgaagaatgagactagaatgttcaaccggaattcgtgggtgagtcatggatattgtgttcagtgctccatcattgtcctgccaatcttcatctctgtaataccaaatttgaacaagagattaatatagtatggtgtagctttaagtggtgatacaaagttcaaaaagtctgacctgtagcctttataaggcagaggaatgtcacgaggaaattgccactgactcatctgcaacacgcggatgaaaagcagaggatgaatccccatcacacctgaaggaacagtcatcattccaagaggtttagtggtacgcttagtcgcatagctgaagtagaacgtgtttggaaaagtctgcagactagcgtttagcgtcattgatccctggattgagaggtccggcaagatccaatctccacatgcagcaaaaggacctgcgtttccaagcagaagatcgactaggccgcgtacaccagttttctttctcgacatgttgaaatggtcgaacccgaaattgtaataggatttgagccaaggaatgtcaatccagtcatacattatgactccaagtttgcaaatctgaagcagtgatataggttttagggacttcccatcttcaggcctgacaatgatatacattttgaattataagctctttgttatttagctaaaaggtcacgagaaggaagagaaaactcactgaattccatcgatgtaggttcgagtagtcccgtttaacgctcctgacaatgacgttagactcaacacccagttctcattcgtgttctcataaccctcaaacatctgaaaataacacaacacggcaactaagtttcaacaacaacacaaccaaatcctatgctctatcgatttggtttcttcctaacgaagacaatttaccttatcagcaagcatttgctgcaagacacgaacaacttgagcaccagcagagtgaccaacaaagtgaataggatgatcttcatcccattcttggtattcccctgaagtaaaatcacccatttcatcagcacaagagtccatcaaaagctactcaaaagactgaattaagagaacacataaaagactaaacctttttcataaaaacgaccaaattgagagtgcccacaagctttactgtgttcttcaccataatcaactaacccacctttcagataataaaacagttctcttgccctacaaaaaaacactttatcagaaactcaccctaagacttatctcacaacaaaaaagattggaactttctctttcacctatcgtgtacactagtcaatgatcccagatcaggcactaacactctctcatccttcttctctgctccagcgaagtatgataaaccacctaatctctgcaatggcaaatccaatcaacgaaacgataaaaacacataaatgtagaaaagcagagaaagttgtgaactttactcctttgccaaatccgaaaatcccatgaaccaaaacaataggaggcaaatcattgacgtctgttgtcttttcttggtcaatttgtttgacttcaatggtggatttgggtttgaagattgactcgctcaacgactgagtaagatctccggcgacggcggagctgaatatgtaaagcccataaaacatatgaacaacagagctcacagatagctctactacttgtatagctgataccatcaaccatggaaccatcctcctccttaaccaaaaccccaaaacttaaatctttcgtctcttcaataaaaaaaacgcagacttgtctaaaacccagtaatcaaaatctgatttttcacaaagaagatgaaccaaattccaattctgtatctaagaaagaaagaagcaaacgagtcaacagaggttgctctgtgtcgacattgaatcaaagatgaaaaaccctaaacaagacaaattgtatgaatcactgctttgttgattgaataatttctttctacgaaaaatggtttatccacagaaacacacaactttctcgttcgtttttcatttgccctcacgcatgaaacgagctctgttttccaaggaccaatgaaagacgcacacttttattttttattttctctatttaacagtgtattgtgattgatgctttcttgtgtgtagatgaaacgtgtatagtttgggaaaataaaagtgggttccattgagatttgagagatatggtgaactgttttattaaaaagtaacgtttggttggtataagtaggagcagttgctgaactgttaaaaataataatacatacaagtttccggagaatccttcttcttcatgtttcgtgaaatttctaattaagtattcgtggtccacattaatcaacgtcgtacacacgtccacgcttaaaactttatgaatgatatttctacacagttgctggatttactttgtctccggaattcttaaaaagtgtaatgacaccctcccaaactgctatacttatctctagaccatatttctgcaaacaattatatttgagcaaagtgttaaacatcatgatgtaaataaacaagctcataaacatcatgaaacactttttcattgatgcatcctttcaaaagatttgatttgcgttcactaagagttatcgacgtcaataccacacttctgtataatacattgaagaatagtttatatatatataaatttagggacccttaaacttattacaataattgtataaaatacatgatcattgtttttgagtagtctaataaatcatggaattattggtttgatcatttcatcaatgttgtggtcttcttgaaccgtaataagtgtttgcttagtctctgggttttggattgtcaaccttgatgcaaattttggaaccattgtctcaggttccatcagagccaatttggccaagcattcagcaatagaactccttacacatttgtccttcctttcacaacacttcagtagtgaaacaagtatttgaaccacaatagaattgttgaagcacgctacatcatgactaactaacacctcctttggtgactgaatgagacgataactctgtttaacttgaacagactaccaacaacgaggtttcctagtgcataggaggttgcacactctcaacgaacatcagataggaaaacttcgtaacaattgttttaatgttggcagtaattaagcctctagttcttccaatcttgtcaagacacaaagtggtaagatgttgtttgtcctataggagttggctttcttgccatctacattatacgcgacacgtattatgataacgtaaagaaatttatgttaattgattgatcaaaaataaagaagaatgatagaaagttaagttgtgaaatactctagtatatctaaaaaaattatgttgataaaaaaggctgcatgtcggactacacatgtataatggtcgttcaaggatcatatcatcttgttctttttagcctatgtccattcaccttgtattcttctttttctttctaattccgtccattctataaaattctttcgaatgaaccaaattcaattaatctccttaattttgattaaaaaccataaaatcgtgttcagaaactgcacttatgttaaatggaactgtaatcataattcgagtcttggttttgtattgtgagaaccattagctttcctgagtcttgggaagtgcaaaaatgaaaatatggatggactgtgagaaattagccaattgttagtatataaattatgtgttataatttctttcaggcatgcattacaaacaaagaaagacataggaaaaaaaatataaacgcctacttccacttaacaccatattctacatttacacatttgataacatatcaatcaatcgatacatttcttttcttacaaacaaaaaaaaaaactatggatctttcatcattgtcctgagctctaaatcccaaaaaatctcatttacttaagctcaaaacaacactatccacttcttttttttctctatggacatttcgagtttttacccggtcctccgtaataaaaaaagttaccccaaacacggtttacccctcctcttatatcataacaattaggatgatctgcaagaactttaagattagatatcggaataagagtattgtcccaatctaccatttgaagattcctaaagtaagacgcttttccaaaaccttcaccggcaaaatggccactgcccatttgagtcgaagtatgtgaaccaccaggtcgtgtgttcacgatctcgccaccaaactggaccatgtttccatgctccctcaggtgtgtgaacagagatacgggccaatatccgactagtgtacccgacccgaattggagccaccaatgtccatgctttgggtcctacacgtgggattttgattagtttgttgtgttacgtattggaataattctacattatcaaagatgaaattcatataaacacatataaaagttgagtgagctgtattgaccgtgtaagtcatatgaatatgatggataagccttacacgggagacactaaattagtgctaaattaattgggtttaaattgttaggagacaattctattaaataaaatatgacgtgcaataattatttggtagacacttgagtactcaaaactcgagttaaaggccttatttacgccctaccaatgcaatcagaatctaaatatacaaggaatgaaataatatttagtatgaatttaaacttagtcgtgattataaaatagagaaatctcaattataccaatgcatattatgatatgtaagatagttttgatgtactgataaggaaatataccttccatatcaataagcttatatcgaattgtccacctttatacgacgaaacgggcgaaatcgccgctccaattgcgattcgattgtttgtttgaacaaaaccagaacatagtaggttatagcatcctgttgcttggtaagcatccgactgcaacaacacaaaatagtagcttttcatcaataaactcttgaaaaacagaaaaacaaaaaggttttagtcaaaagatagtgcaagttttgaagttggatggaaatgtataccgtccaataggtgaagaatcttgggttagtgtctccgtatagctccgggctaatctgtcagacagaatcaaaatgttaagaatttagaagcatttggtttttccttttttctaattatctaagtaaataagagatgcaaataaaattatttatatgacacgtgcctgccaaccagcttcgatggtattaagatcgccggcgaaagaaccggcgatgatccaaatctgagatagactaaactcgtattggcttatgacacgtggcgtccacacgtttatacttgcttttgctccgtagtattgacttcccgatacgtatccaaccgcatgctacaatttcatttccataatgctaaaaggttattatatgtaaatcgagacaaaaatataaagtggaattagagaattagagagttgtctttcttttttttctttaaagatttgagcaaagaatgatattcactctgacaaataaaattctgtttatggcattgcaaagatttgcgagaaaggtggtttttggtattactatgtatctatctgttttttaagaaaattaagaaaagtatataaacgtctgactttatgataaagttaattaatataatgatacgtacctcgtggccattactgctcgaatcccttctcacgcgcctgattttccgaccaaatctacggacagaatttgctcttaacatgtcttgctccgttgttcttctgatcggaatcgtaccttccgggcaagactcaccgtataaactccaaagctggaaattttcgtgggattcattttcttggctataccctataggcatctccggtggatcctaaacatgtttttcagcgaagttagagacttttgagattgtagtagttataagaagaacaagaaaatgtgaatttcttatcaaaaaaaaaaaaatgtgaataccattggtcgttgtccctgtaacaaaggatgatcaaaagcaggctggtgatgagatggaacacaatctatcgtatctccatctgagctctgtgtagacatcacaagaacattacataacttagtttatgtatagaagaaatatacagtttaagaaatagagtttttggatttacatgaatggtcttgatggctggtttattaatcttttggagttgttttctgatgagtttcatcttctgaatctctctttgaggccggagaggcacagtttcggatgtcgaattcgatggagaagcataggaggagaagagactgagtaagagaatgaaagtgaagaacaagcaagaagaagaagaagacattgcaatgactgaggagtcaggagtctcctctttttcacggtattgacttttctgaagagtatgaaaaacactttttgtgtggtgttgatgtgtgatgaagatgaaggcaaaacatttattgcaagcttattgttgttgttcgtcttcttcatgtcactgacacatctttcaacaaacccattaaagacacaagtcacttctctaagtaaacctagacacccaaagatccaagaattaatgaatcaactcacccctcataaataaatgaaattagtgtatagtagcgtatattaatagaattctgtgttgagaaagttttggagcatgtgggtttacacataaggtgatataaatactaggtagtgatgaaatcatggaagggttttgggaggaattttgtatattaaattaaatgatgaaaagaagagaatagattttgatgcagctttatcgttatgtgaaaacggtaattttgtggtaaaacatggatttggtttgaaagatgaaagttgaaaacttaagatcttgattttctcagttattctcaaactttaacttctgtttccacttttaacatacatttgaatccagctactttaacaatccattatttattccatcgtgtcaaagaaaactaacactcatcatgttttatatattccgtcatattaattttggtacgtatgtgttggtcgatttctcttgaatataccaaaaggtacattgtcctttgtcccaaattatttaactaagaaaaagtttttcctaaatctcaagcaattgggcataatgatttgcaaagcatgaattttcatgttactagctacaacctacaaggatgcatgcaagagcacattcgttattaatatttaaactcaaatttgttttaaatgtacgtaagattaattttcttaaactatatccaagttatttcccttcttaacattttaaacatttaggccaatgcgcatactaaatagcaaaaagatagataagtttggttaattagtatttattactacttgagatgctttagattgatatatcatatcttattaagacaaggtttttttgtaaggagctctatcattatgacatttggcactctttttttacgacatgtggcatatagaatacttaaatgtttattctctaattttttattattattataacatttaatatatacactaatatctgaacatttaaccaattaaatacataagaagtttaaatacaaaaatataatttaattagtccaagactgttataatcttaattactcgaccattaaacaattttaagttataatattattttgtaacatacaaaacctattgcaatatctatataacaataacaattttaaataaaatcaagtgggttttaatgagtctaaccattacaatcttcattaaacaccattaaacaccattaaacagttataagttattacattgtctttgtgaaatgtttagaaaacgtatatattgaaagaaatcaaacaaagtttagaaaacgtatatattgaaagaaatcaaacaaacacaattgaccttaatttaattagtccattaatacaatttgtaataaatcataaagaaaatgaaaaaaaaaaaaccacattaatatagttagaccaaatttgttgtgaggtgattttcttcctatatatataagtgatgatgtagctgggagaatacatcgaataaccaaaatgagatcactttttttatttcttatctttcactatatatattttcttctcttttttttttaacatatatatattttcttatctaaactgcttaatgtttagccctcgagaatcaaagtttttttttggtatgtttttccaaatttaataaagtttcttgagttatgttttatattttttaagttgtcaaagttttggtgggattgatactattgcaatataaatatattaattatttttatttagttacaatgttctatagctaaatatacaggaactatgttttatatattcttcaggttgttgtatttgtaggtggctttggtacaattgcaaccgagaaaaacaaaatctatcatgattcaatatttttcacgtgttaattttttctttcttacattttataatctctctttttctttcttttcatatgctttccataatatgtgataaagcaagttttttttttaaaaagataaagcaagtttttagatggattatgaaggaagaacactaactaaaaataaaagaaattaaagttgatgaattgatcaaaaatatttgctaaatcatgagccaatgtaattgttgttgggggattctgtggaaaattagcattacatttttgtgagtgctacaagtataggtataggtgtatattttttctcatctttaacaaacaaatgtctttcacttaattaatttttttttgtcaaagtcacttaattgttataaaaaggaaaattatattttattatcatatgataaaaaaatcatgttgttaaccttgagatgtctttttatattataggaaggtatgagttgtatttctctatacatcaacaattttcatcaacaaattaaattaggaatttatttaattagattaaagtgtgtaaaaagcaaatgtgtgatgatggagtaaaactatacattttatactcatctaaaattaagtgtaagaatgtttttttagtaaacttatttgttttcattgtcattatcaaagtttcacaaaaaaaaaacatttttattaggattagaatgtataaaattaaactgtatgatgaggggcaattaatgcaattttattttttcctcacccaaaattatgacagaaagaaattattttcagtgtttttctttttaattgagttcattcttatgtagctaaattccatatttagatttgcttcatttaatttttattccaaaattaaaaaaaaattggtatttttgtattccaaatttaattctaactagatcataacccgtgctatacagcacgggcattaatattttgtataaattaaattttatattttgtttgaattacataagaaatattatagtataaaaatgatgtcataatatttttcaatatttttactatttgcatataatgctgcattggattgactttatttaaaaatgttatttttataataaatacaacatatgtagttttaagtaaatttgtaaaatttgtatataattgttttggtaaaaacatgtttcctttgtattacaagatctaatttttggcctaacttagaattagtctttgtatagtattttggttacatttgtagacttaattgggacctatattagattatctttgatagggctgacgaaaaaacggacccaataaccaacctaatacccgaaccaaaaaactgggttagggcgggttaaaattttaggaaatttccttattgggtagagttttagtaaacccgtggatatccgattggtccggaaattatccgttacccaaaaagagtattcaaaaacccaaacattaatttaatatccaaaatattaattatatttaatcgtaatattatctaattatctaatattataattataaatctaaatatgtcaattaattttggacttaaatatccaaaacaactaaactattcaaaaatcatttgttatgtttgtcaaagtttagtaaaatataattaaatttgttaaaacttaacaaatgtaaaagttttttttgtttggagacccgctatctacataaaaaatttcccgtttctatttttttgggtatttttagggtctgaaactttttccaaactgacccaaacccaactggatctgacccgaaccagaaccgaatgtttagaattattgtattaggtagtaaatcatatacccatcaatcccaaacccgaacgggttctacccgaactcgaatgggttactcatatgcccaactctattctgtgatttaattatctaaaaactcccaaaaaaacatatgttttgctgactatttttttttaaaaaaaattacatcctcttctgccaaaatcatttcataagacatcacaaaacctttggaataataattccatgaatgaagaatcctaatttgaatataccaagaggttttgaaaggttttaactttttgataggtgtgtatgtgagaaggtacagacatcgtgatagtaatctgcttatttataatttcaacttgcaatataccgcaggtaagcttatattttagttaaactaaaattttttattgtaaagatgattataaatatatgatattattttatttaattttaaatatacagtaaactgcgagttgtatatgttttgttgatattatttatattgtttagtgtttaaaattatacacttgtattttgattgttaattttagagtttcacctgtagtataccatcttatattaatatcaatttaaacccgtcaattctagggttttccagcttgtattaaaaattgaatcacatcatacacataaaaaaatctaatatgttattaattattgtagaatataagattataaaattttaaaataatatgtatgaaattgaatataaatattcaaattgtgactcagtactcagtataaaattttcttaaatctatttttgaccctttataatatttttcatgtattgaacagtttatattcgtttttaaaaatttaaattatgccatatgcgaaaaaactctaattattgttttataacgatgatattattttttcgcaaaaatagaatcatataaagatgagaggtgtaatataataattaataaaaaattaatatgataatttggatatcaaatctaattagttgattttaattgattaattttttggaaattaataatgtattttgttttttaattaaattagtatttgactttttaatttttaaaaagatgaattaatttacttttaaaattttatttctaatggcatacctatgtaattacttacaaaaagtaaggttatatttaaaatatactttccaaataatatagtaggattttcacatctttttctgctttcagggataatttttgattagaattttagttttgttgaatacaatttttttaacaagttttatcatataaaaaagtaatatgatatttattttatattttcttgcaaaatacatcatatttttctttaatctatttttcattgtaataaaaaaataattcacatgacattattattattaaatttatttctattaaaaattattattttgcattgtgctttttaaattgttgatttacatattgagttatatatatgatgcataaattttacttttggaagatatattaaatctttactataattttttttaatgtaagtattaatacatcaaatttattataatatatattttttagttatataatattgtatacgttactatattaatataactcacgccttgcgtgggactatttctagtatcttagatatttgggtcaaggtactcgtccacctgtatatatttccattacaaacaaataatatcaagtggtcggattatcgtgttgttcaaaagaaaactgtggacaaattaatttatactatacgcaccttaaacttttagaattcactatttaatcttatataattggtctagaagaatggtttttaataaagcaagtagtcaagtacgaagtgtggaatggacctcgagagtgaatttgttagaatcatattgtctagtctttaaaatcgagggaatgattgagaaccaaagcatgcaaacatgtaatgttgcctctggatttctattaaatatttattttcataactttggtgtgaaaaaaacatgatttgctgcaatcatgtttttgttattctcattatttttctttttgataaaacgattaaaaaaaaagattacatagaaggttgaccagactttgacgcataagtttgacttaaagaatttgagtcaaatgtgcaatattatatagcacatttagggaatgaacttgaccagaccttcaaaagaatttgatttgggaacttcagggaatgaacgatataatatatatcaaatgtgcaacaaactgtatatacaaaaataactgttaacattttaattaataattaattgatagggagatagagagagagagatatcaaaagttaaagagaaaataaagatgagtgtattaaagctaacaaaaggagaatggaaacagtttgatgtaagagcaatgatagtgtctctaaagtagcctcgagagctcagctttttccaatattatctcgaaccataccagtaatgatcttagttaattaagatcatcaatggagtattaactgaaacaaagtaagatttggcgttggagttattaactatgacataatgagacatgatttacaaagcggcgtgaaaggttggacgttaatgttcggaccatgcatgaactttgtttagggtacatcatcatggatacctattgtgagttgtccattaatgatgtaaccatgaaaatgttacagataggtaatattacacatacacacttaacacgcaatatctatcatttattttttggtagtgttacaaaggggaaacaaaatcttcttcaactcatatatggacaactcctttaaacccaaaaaaaaaaacaaattaaagaactagtaattgtctttcaaaatgacaaaaggtttactcgcaatctcgcatcattgaatctgaatttagatacgagctccctcctccaaataaagaaaacctattaattggagacttttgttttgcatgcaatggttgaggttgaatgcttaattctctctaaataaacctacagatttaattagaacctcaaatataagagtgaaaaagagaagtagatcactatatctaactaatataacattacgaattaaaacacttaggacatggaacagaattgaacatgcatgtttgaaattagatacccggtgtccaaacatttttccatctacatacacacatgatcatcctcctctctctttttttcttgtttgtttttcattttttttaaagcgaactgaatcaacaaattaaagaaataaaattacaaataaataaacccataaaaacatttttaatttctcttccaaatctccaagtctccttaaaatcaatgtttaacgagagttgaaagcgccaagcaattatcagccatacggtacaaaaccccggcggatttataaatgacgttgacctccttagtttccttcatcgagtcgctgcaagtatcgtaatccgtcaaggcggcgctaaggttaatgttaaggctaaaaccatcattttccttaatgtttgtaagagccttttccaaattatcaaacgcgctattgaagttggacaaacaagtcgcgactcctccatcgcgtttcagctctttctccgcgattttcttggcttgcctcgtccgcttcatcaactcttttatggccacatccgtcgctgcattcacattagtttgacccttaatggtacttctgcacaatgcaggaaaatccgacaccgtgcaggggtcagctagagaaatactcaacgcttggcttgaggtagcggcgaggaggaggaagattgtcacatacggattgatagacatcgtgtgtatgatagatacacggaaacgtatatatattgtgtatatatacacgttcttgtgtttgcgatctgaacaccgggtggtggattagtttttatggaagaaggagatgagtttatatatgcgtatgcaataagatggttatatttagtatgtttttgaacaagtatttagactgatttgccaccggtgaattagactggacatttctattttggtatgttttgttaataattaggtataataatgggttatcggttttcttgttaaattgattatactgttttgaacttatttttgttgttctattttggggacgaatctatatattctaaacttatatggaatctgtctttgaaattgagttgaatttcagttacatttgtacagtgttatgtcagcatatatagctaagattaagaagggtctagtatattactttgaccaaatggtaattgataagataagagatggatctttttggatgaaacggctaacaaacaaataatgcaagagttgcggtttgttgtggtgggttttgtatcaaaattgaagatgcgaggacctaattgtacttctaataacgtcatatgtaactgttactggttgtagcaagtttggatacgaattatgaagttactaaattcatgaaaaatgtcttatattactgatccatgtagggcaccattacaactcttacctgtataattaaatgttacatttattattttgctctcatgaacaaaaaaaaatcatgttcacaattacttgtgtatgtttctctctatatatacacaagtaattgatggacttcaccaagcactgaaacattccacaatccgagacgaacatggaggcattgagcattaggtcgcctaaaccggtgacgggatatgcggattgtggaagtgattgagagcctggtgaacagccatcgatacgttgtagctggagtgatttagtgcttagttgttgtatccctaaaagttaatggtagattactctaggtaggtataaacagcggcaaaatgcttaaactaggagaaagattcatgatcatcgttgggatcagaaacagattacattgacagtttgatcaaacaagtaagttatacagataaaaatgaattcctctacattatctgcatcatcctaacgcaaagcgtttctcttttcttataaaaatccagataaagattgtgtcaatatatctggtgtagaagtgtagtcaaacgcgctattcctttacctcatagcgaccaaattccccatgaaaccaccgcttatctcataatggcaggcacttgagaagccagcttctagagcaagagtctctagctcttctcctgccaaaggacatttgacattccaatcagctaatgaaaacatagagacttagtataagctctttaatacagctataagctttggattaaaaacacacaaatatcagctctgccatataatgaaaaggcatatatgtcatcaacagagaacgaacctgttagatagccattgattgaatacttgagatattcatactcctttgcaagatcataaacagtagccacagggacaactacattgtcaatcatccagccctaacaaaaccaaaccaccaaccaaattatttcctcgacatataattagcaaatcaaacgaaaccacacatcacagtcgatcagtcatacaaaaacaagtacctgcataaacgtagtaacggattggttgctcttattgaaatcaagtatagatactcttgaacctaaaaaccaacaagagataactaagcatagcacgagaaaaaagccttggataaaactcaaatataccaaaacaaaacaccgacctggtttcaaaacccgatacatctccttcatagctctaagtctatcaacaacgtttcgaagaccataacccatcgtaaccgcatcgaattcacaatcatcaaatggcaaatcaatagcatcaccttcaatccacctaaacaacacattcataaaatctcagttttaactctttcccaagaaatgttagaacaaaaaaaacaacaagcatgattttaccagtgagctcactctatacacttgtaacaagaccttgctttaagactctgtctagttgctgcaacagctagttgttcagatgagaaatccaagcccatcacctataataatattaccaagttatcagaacaacaattttacaatcaagccaagctacacatttctaagaacataaaccttgccagttgaaccaactttctcagataagagaaacgctaaatcaccacttccacaacacaaatcaagaacgtaatctcctttttttgctctaattgtcaaatcaaaacaaaccaaaatcagaaaatagagataatcaaaacacagaacatagactgagatgtaatactcttacccactccatgagacagccatgtttttccaaattcgatgctggcctaagcttaagagatcattcaactacaaaagcatataagaagacgatgatttttgtagtcgggacaagttagaggaaaggagataagagagagagaagagattgatgtcaaacattatcgtaaactggagcaatgcggttgaagagaatccggcgttcgttcgagcattttactaccgttctccgtcgcgatcgggaatttaccgggtgctttccggtgaaagtcacaggagagacgataccgagtagagccgccattttttggccgttggttcacacgatcatgttgttttgttccgattactcggattggataaaagtctggtttcagtttaatattgggccgattttaggcccaataaggataatttgaaacccaccccaaaatttaaacagagatggttggattatgggcacaaggttccaattgctagatagctaaacttttggctacaattagcaaaatgtacatgatgattaaactgtcaataaaagaatgtgtttaatttagtgtgatttacacaaataacaagatattttataattatttttgaaaaacacatagttaataaacaaatctaacctatctaagtattttgtttgttcaacgttttgccaataagagggtaaaagctatatcacgagaggtccggagaagacaaaagaggttatttttattcaccgataataatagttacaaagcattttgacttgttccttctactacatgtgagtgagtgtaagatccatttcatgtgtcgtccatgcttcactctttctttctttttttcctttgtcggcaaagcaaggcagaattatacatccatcttttaatcaacgttaaataagtaccataaataaattcattcctcggtaaagaatgatccactagaatcatccatcatagcgaaaggcatattctctgatggcttccaatgacgtttcctttggtttataaaccaattgttgatttgtttttggtctaaccccgttgcatcagctaatgctatcttatctccttcctgtgtacacacacattcataccacccatttatatataagtgtagtggttagttatgtcggaaaacatgcaagtgttgcttttgcttacagtagggtaaggccacttataatggagattccaccaatcaagaagagcttgtcttgcttctcttggtaactttcctttcttcttcttctttgagaactcaagctttaaagtactaatacggcttccaaatttgcgtagcaacctatctttgaggtcccggtcttcacatctttgtctcccatcctctgctacctcatgatcacctccactcagttcctcgtcagatgatattacaccatcctctgttacaccaaattcacaagaattatcactatacaaagacatcaaagacagagaatggttataggttatagcaagtaaatgtaacagaattatcactattcactaccatgaaaaagtttaaatgggctttctcggctaaaacggctaagtggctaaagagggcaaaaaagggaaagaagaaagagtggtaaggggtagagaatatcgaggacgcacacgattgagtgcagcagtcaaaaaaccgccgcagtgaatagttacctccattgtcatttgtcaggagaggactaatagtcttgtccccatgaggagacatccccccttaggcctactaattacccaatctcaatatgacacgtgtaaataccatttagaggttgtgtgaacccccggaaataacgctacacctctcatttatgttctccacgataccccaaaactcaatttccttttctctctctctttctttaatgtatttggacatttatatatatgccccaacgactctactgacccacttacccagcttctctgacaccaaaactcaacccaaagacgattcaagaacattacctgattttacaatagttttgcctatgtgacagaatatatagtcggaccaagcaaccgtgcttagtcaaaatatttagtcagtcacacaaaatactggactacataatatatacacgcaatttcagtcagtttataaacatatattaaaaaaagttaaaagatttctacaacagccaaggtaatttcagtcaatttataattcacgcaattcagtcagttttataaacatattataaaagttaaaagatttctacagcagccacagtaattatgaaggaaatagagatgttaaataggccaataaaaatatactaaaatgcataaaacatgaactgatcatatattatagagaccattacgttcacattacacacatatgagtagttagggtaacagtttaatggcaaaaaacgatagtttgtatggttgggattattatttacattttcagcaatgcattgactgctttgaaaatagggttcactgaagaaggtaacatgcaagtagacacgtgctagtagcgtgcctcagagagacataatacgacccaccaagggaacaacgcaaccagagggcatggcaaaagagttgagaaagatagagaagaagcatagtcgcagtcttatagatgatttgattgtggtgtgtagagaaccctatgtctccttttttttttaataaccaaatcaaaaataaaatcttaggagagaaagttggtggggtcattagcggaatccacgggagtccatgtgacttttccaccttttactttataacaaaaaccaaaagaacctctaattcaagctaatcatgcactatgttcctattcttctcgttgcagtattcttatcttctagatcaaatatgcaaacatgtaacattgatgatattgcatgcaacaagacaaatgttgactataaaagtcaataagagaccatccactctaagtagcaagataaccacgcattagaagaaaagaatgtgttgcttttttagctagtccaaagaagggctttcgctaagttgcattaccgtatcacaacaaccaagaagtgagaaatcaaaagtctatgtgatcaacttgtattactaaatcagatcaacatgaaagaaaccaagcatgtgattgaactgagaaactagtagataacatcgcatcccatgtgaatattgtctaacaattgtaagcttcttttttctttattagtttatgatttcattcaggtgaaagaaaaagatggttaaataaagcacacaaccaaagaaaaaaaaaacagatgagatcattcaaaaaggcaagttgtactttgaacaaattttaaaattattaatcataaacattcgtccattatggaaaacctgcatcgatctattttcaacttttccagttgatactctatgctaactctcgattagtttataaagataagctgatatgtttttatatatcagcagcttttttcccccaataaacaatattaccaaagtacaagtggaacctgcatttgagatcgaccacgataatggaaaactcctgcaaagctgaaaaaaagtctaccaatctatggagtttcatttctttacagctaactctttcagctggagtttttcttctattttattgtattaaaaaaaaaactcctaaggatcagtatttctagctaacctgatcggttgatttgttatggccacaatgtttttgctagttgtagtacaatatgtggtctaaagagataatatcagtaaaccacaaagaaagtcacttatttgaagcatttcattcatgtataagcataaaacctagacttttaaatcgcttcaaaattgagtcagttttggtttattacttacatataagtccaacaagactccaacaagaacatgcagataagagtggccacttggcaatgatactatttccgatgatcaacaaaaatctccctactcttgttctcagatcattgaaacttgaaatagaccaaagttacgttcttcataataaatgtcgaattcaggattaaatttttatttcacaaagaatgtcgttttgtagacttctatattaaatttaaaatacaattttaactttattgttttaacctatttaattagatagaaaaattatatggtgtgttattaagatataacagaaatttaatcgtaaaattatctaaacacgcttattaattccgatccagagaatctgtgaatgagcttaaagaggaattacagctaataactcttatggcttattggttattaataatcatctgaccaaaagaagttgaagtcttagaaaaactggtaacctaataaggttgttacccataaacaagagtgaagcgacttatgagttatgactagtacttatacttacttattgttaaacgagaagtgaagcaaaagaagctcatgaaaaatcaactacacatattgttaaaaagttatgactaggtttttctgtcaattggtttttcactagaaaaaagcaacaagttgaaaaaacattcagtacgcaacaagcctctgaaacgtcaaaatcagaatctctaccacaaaagtttattgctttctacaccattttctttctgacagagaaagaagagaaaaagatataaagtaaaatttgtatgattagcacaaagatcaacaacaagaagaagaggaaatccccaccacactccaacaccctaatcccatggctaaaacattaaatgaacgagtaaaataattgcacaacaccttaaacagatctttgtctccagagtttcaacgtgcccaaaagaaaagcacacacaaaacaaaacccatcaagggaaaaatagctatggaaatgaaacttgtagctagggtttatcttcttttttttcattttttatctattttgctttctgatcacttcaaaagcctagggttattctatcaacaagctaccaatcatttttcagaaactggtcatatgaatcaaaaccctatggaaatatcgaggaaaggatattattaatgaaaaaccacggaaaagatcaaaagaaatcattcagaactaaccacaaaatagaaccactaaaagaccgaaccagagagggataatttaagacataccagaaactcccctggcagactcgacaccagtacataggttccgtagctgcatctcaatcttgttcaagaaacacgttgcctcgtcaaacggtcttgctagatccgatttgtatttcactaatatatcgcagtacgtttcctgataataaattatcttcttaagtacaaaaatttccaaaaaaaaatattttaacaaaaataaaaatccgaaaaaaaatcgagggaaaaaaagagagagaccataaattcatcaagctcaggatcagctccaaagcaagaagaaggaacaacctcttgcttataaacatcactctcccgttgaatctcctctagtaaacacgctatctccggtggtgctccgacctgtttctaaattatgaaattgttaaaccataaaattataaaaaaaacaatcaaatatcaaagcttctcaatcttatctttatctttaaaaagtaaaacctagattttatctaagtgataaaaaaagaaagagttaacgatcaccttttggcaatcgatgtaagcttgaagtaagcgaggatacgaaggatgacaagcgattttagctttgatgacagttagagaaacgttatcatcatttcttcggatctccggagcgatcgaagccgcctccgacgacaaagcggagacggctactgagagtagctcgtcggatccgaaaacatcagagacacgattttcaccggcggaggaacatagcaaagcttggtaatcggaaggaaacatgagactctccggtgacatcatcagaaccgacttatctgaataatcaccggccgaatggaaattgtacattccatccataagtataagatctccggtaagaactcctccgtcttctaaatcgctttcttgaattgtcttcttgcaaaatcaagaatcgatgaagaagaataatatgaaaccgcttataacaaactttttggttcttgaaaatatttatttctatgggagtgtgtagagagagagagaggctcgagggatcttaatttattttcttttggaagaaaaaagatatgaaagttaacggagaagaaaaataaaatgataattacgaaaaaggacatatgctaaaaggctcaatggagcttcaggcttcataggtcgagataaggccttcctaacatatatatctaagaaaggtccaaggctgtgttatgatagaatttgcatgatcatgagatttttaatatcaatgaaacatggcgagaaacaaaattatatattattgaaaacgaaatggaaaaaacggaaaaagtgtgattatttaccagcatactatgtcagtttatttgaactcttttttttctcatcgacaatacacttagatggtaacataactactagtacatataaccactaaactacacgcaacttatttgaaagctctgtgtaattttcttttcaaaaagtatagttgatgacttgatgtatatattataggacctatagaaacaaattgagcatctaacataatgatttgtatcagtatcggcattgtatcgttatcttcattcaaatatgataatatgcatgtgtgagctgtagacagttaaaaaaataatccccaatgtatatatattttcgaaaaactttgtagaaaatatatttttattatgatcctaagaacatatatagatacacctacataaatcgtttatttgattgcaaatagtgaaacaaggtgaaaatgttaaacaacaagtggaaaaccgaacagaagaaagaaaacaaatgaagtcgcatatcagaagataatatagtactaatgatattgaatcgagtcaattagaaatagatattagttcagtatatgagagatgttttgggtatgttgaatcgaatatatcaaactggaaaaacaagaactggttacaaacaactagtgagctgatacatacatatatatagttaaagagcggtattattttaatacttgtcactgtaaatttgttgctagatacagaacaaaattatcgaacacgactactaacaaaatgataatcaacacatatatattcaaatgatggtatgaaataaatcaaatgtgaagaatatatggatatgataagtgattcttagtacctactacgtagtaagaaattttttaccaactcggatgttggacacttcgattgtacgggatgaaatgggtttcgagaagcgaaggtccgttcctagatagtagataagaaggccctaatggaaaatcgtctaattaagattaaattagtatatagtatcagctagtgtttactttagaatagttctgtataaagcaagtttgtggataaaactaagaataaaataaacgctggtctaggcgtataggagctgcaaaatcaatggtcttagctaatttatgatttatgaaatttatgccaaaattgatgatgctgatattcatgatgactttagcttatgaaaatgaactatgtaatttattcacaaaaatagacataagcataatttggtatatttaatgattttacatatgtattaagtttgaaattatgaaattggccgtaatttaaagagagtatcaagaaaaaaacgagcactttaaccaaaaagaaaatagaacgagagcatctataatatttcgaatggaactattcttttagttttgtcgacagctttttacgtctatcatataattttcaatcaagaaagtggcatgttctttcatactactttaatataaactttgtttctgtttttattttttttctcaaagactagagaaagtcattttcatcttaaaggtacttgcaaactattggttgctctaaatcacctaacgtatcataaataatcaaggggaaattaagttaaagaaaggagacttgaaattagataaatatgaagtcacaaaagcgaaaacaatatatatatcacaaacgagtttgccttcttattattggcaaagatcagacgaaaatatgttatttatttatttaacatattatttgttcacatatgcatattcttggtgagaaaaaacaatacaaattttttctggagacacaatcaaaatgttcaatattttctttctctggttatccatgcgatgcgccacttggatgctgatgttgagtattgagctcaggaaactacgtgcgatgttatattcattttccatcaacatatctaggctttgtgatttgatagattcttttcatttttctgtacctatctccctacctatctatataattgcaataatctatcaccaaataatgtaagacgacataaatatatgtaacccaattataaagttcgtctacgtattatacatgcagctaaagtactgaatttataattcggctcgtggtccattctaattgtgacctaggatccaacaaataaattattgaggaaatttactaagcctctcaaccattttttaataactatggaatttttccaaactaatctccaacgttcatagtgaccagccatgattttttagccaatatttatagatttgcaaccatatttaatgagtttagtgcttcgaaaccttgtttccataatgtaaatcatcaacggaaaaacaataacaagatttataaaccaatattttatcaaatatgttcctctattttctctattaaaaaaaagtgttaaaagggtcttttcgttgatggacaggttgattgacccatccattttcgggccatgtttgttcgaaaattatctgacacaaagttacggtttcgtatgaatccatataaaaaacaaacacagctttggtccctccatcccattcccttggatcccgaccgttgatcctcacccaacttttataaaatgttaggattactagtttatacccataccatcatcagcttgaaccacttgttagttgttacacttttaatatttgaattgatagttatatctggttataggtttatagccgagtagccgactagtcaagtgttttacatcaaataaaggagtgatctaggttaggtatatcggtatttaacctgttaattttagaatttttatatttatgtgggtattgttttgcaaaaacccttgatatcttagttttggaatatgatgcataacaaataatcgatattattccagcaatgtttgtaagatatataattgatatgattcgagcaatggttgtatatgcccattcataactaataagaatctgtttttttttttttttgttgataaaactataagaatcatttgaaaatcttttggtataaaagttcggaatcagtgttaatatcataaagagaaattgcgggtttatttgaaagaattatataataccacttggacatgattgagcataacagagtaataattgatctcatttatgttaggagaaaaaaacctcccactcaacaaagttgttaaatgtgaacatacctgctattataggaagggacaaagtaacccagaatagatatatctgtggtctgtggaccaaaaatcttctggattagaaatctgattagagcaccaaatgtctcggtctttgttgttcataatcaagccttatatacaccatcacctcctgatggacgtaagccaaaatttgtttctaactatatttaaataaatattcaaccaatgtgtaaagtatcaactttagccaatccaaacgtgacaagaaaaaaccaatccaaatgcggtacgtggacaatctgacaaacaatatgaatacattttctttgtggttttattagctcgaaaaagataaataaatagtatgtaattcatgagtgactaatgacatatcttttcatggaatatatgggggaataaatctagtgaaatgcagcttaagtagcacgaaccataatgttatgcgtattgagttatagtaaccttatgctttttgggtcaagataggatattagtatattactaatagttttacttcttcttcaagatttcagtgatgtaaaatgttcaatattaattaagtcgagatccggtctaaatatagagcatataaacaattgagatacaaaaggaaatctctttttaatataaaaataaataaggaaagtttagaatatgtaacaaactaacaaatgcacataggtgttgttttaaattatataataaaaactgcatcagcactgttatagtgttatgcccactgcggtcggagaatatatgcgtcccatattttttagtcagaaattggcttttcactttactattgtacgttcataatcactattactactctattaaccgatcgagttttattaatttgatgtatactactaatatttttctttctgacgaaaataccacgtgcatgtttatgtataaagtataaaccccaacaaatctggtgatgttgtgggcatgtattgaaacagaaagaagatcgaaacatcatcgtcatgatcatatgatgcaaagtgttaaatggttgttgagttaataatattctcttttgttggaagtggtccttagtttttgtgtctgtggtccatcaaaatgatatacaaactttgtctttaattttgttacataatcttaaaattgactcgaaagttaactaattaaggtttcgatccaacagaaacaagaaagttgtctctgaatcattccttcacattatttctttccttgtgtggtccttcttgctttaccaaaatgatgaaacaaagaataagaaaacgttaagagaaagataggagagaaccaaaaccggccaacaacttttattgaagaggaaaactctcttgcagttcatgtgggcctgacccggttcaaagcttcgacttaggcgaatccttgttggtgcaaattttaccaaataattgaacatataaaaaaaactaccaatttttttttgacaaaatatcttcaaacactacatataaataatttttatctaaatatatccctccatttaaacgtggcctaattgagatcgtggtttgtgagctcccgctatgcaaagtcaaatattattctattttcttggtatgaaaaattaggtttttttcatctagttcatcatttgttgatcaaaaagttcggtgcatataaaaaataaatataagtaagtagtcaaactctaaattaagtgaattatatagcgacatgttaatcaacgttgatttgtcgtttaagggaaaatatcgttccattagtgcaagctaattaaatagccaaatgactttccaaatggcgacgggcgagtgctctatctttgacttatcgagacaccattattttctgagttccagtaatagtggcatccataatttctcatgtatgtaacatctctaattaataggaaatcgagtaatttgtaccaaaatgagatagcatacaaataaattttaacatataatcttgaaaaacagtttatgggctcttattagtgaaagctgattcacaacatttctaatcttattatcgtaatcaaactagctctaggtttcaaaaataacctcttcagcgtgtatatttttgaaccatttaaccgtacattcatcttcaacgtacttgtacatcaatccaagtaacttcgatgcgtgatggtaatttacaacaaaataaaggaatttgattagatacctttgtattttatttttgtttaaaagtgaaagctaaatgggcccgtatcagcccatataacctgtactttttataatgtcaaaagcgaaagctttcaaatattccattttccattttcgacaaagatatcattctttttttttttatatgaataaaatgtggttttctctgagattaaattcgagaaaaagggtagtttaaaaacattctagtgaacatgatgctatctttcatgacttattaatcaattaattaattatgttgtatcgaatttaaaaatggattgcgacgatctttgcctcactcactctttggttttgtaaggaaataattaatttagtaacccgacaaacatttgtacgcattacaaaatattcatttatcttacgaagaatatcataattcgacttttgactcttccactgccacggactagtcctaatataagttttataataacgtatataagaagaaagatacttccacatgcttgtttccaacacacctcatgtaatcgtttaaagtccaaatcacaaatgtctatcaaggttctaatataatatttattcaaatacaatcaaattctatcaagatatatgataaatcgacctaattttaggtgtttggatgatattaaaagaacaacatatacatagtgtaaagggaaccaaagaaggtgcatgaagtttcttaccttttgaaggtgttaccctttaaccaatccattctattttccaatccatatgaaatatttaatgggccaaattttccggcctgtttaaggtgagtggtattaaaaatgtttcgtttacgtagtaacgtagcttatttccaacaaaaagaaaaattgcgtccatgcatcattaatgggctacaattttgggccctatgggctaatttatgtaataccttcaagaacacgtcacactcacttagagacacgtcaacagcagacaaacacttcacctaacaaaagtatctctcgatagcttccctaaaccctttttacgcctctaattctttggattattatccacgtaatccacttcaaactatcaaattattacatcctctaaaatccatctcacaatagctttacaataaagtttcgttgaaaaaagctaacacgaaattgccaaagtgactagaagctttgaatttaacggacacgattaaattcaatattttgacgttgagagaaaactcaaattattcctaaacgcaagtttcaaatcgctaaaaccaacgtttgaacacgcaacgattactctctcagccgcgtgactttttttccaagtagcgtctgcgtttggcaaagtcctccacttacaaagctttcctccttcaatctccgccgcaacaatctctccgccgttctccgccgcaccatgtacataaaccatatctcccaccgcgttcaacactatcgacgttaacggccaatcagaattaatccctcttagtttctccaaatacgtctcaggcatagatccgatcgactcgaatttcaaatgcgattcgtcagaatctataacttcccacagttcgattcccgtcggattatattcatctccgatgatcccagccataattaaacgattaacggagaatccaatcgaacgtgagtataagctacactcgccgggacagagatcgagaagcttcgtccacgatctagttactggattgaaactacacgtaacgcctgatctcttctccgtcacgtacatcttctccgaactcaccgctacggaaagccacgtggacgacgcggattcgtagagaaaatctggcatcgattcgcatctctcccacgctccgtctccggattcgatgtcgaacagctccacggcgaatctatcctcctcgaaatcgcacacacctccggctataatcaggctccgtccgactacagccacgattggatcgatcctccaaactctcggcggtgccacgtgttgccaagtcagatgaaacgcgtcggttgagaaagagaatctcgccggagataaagcgtagagcaacgtggagtgagaggatcgagcaacggagacgtgttcgacgggagatgatgcggtgttgagctcgatccaggcctcggacttgggatcataagccatcgccatcgtcgccatggtgtacggcggagaatttctctggttgtagacgaacaaccacggcatggttttaaggcggcggagggagtaaaagacggcgcggttccatgatttggagacttggcaagcggaatcgaggtctaggagtggtaaataggagaggattgactcgagtatgtctccgtcaatggaactttcttcttctccgaaatctcctccattgttgttgttcttcttcttctccattttttggataatgcacaaagtctaaaggagggaaagtctttatatatagagagagtgacacagcgaagttggtgatcgactcttattattgcacatggaattaatattattttattttcttgtaggttaatatgtgacattcatatacagtaattattattgttagtaacttgagattgggactaaattagatttggatggtattcttaagcattcaagttaacagagttaactcaatatgtatggagtattaaagttttcaattaacaatccgattattggttatgaataaaatgacatatgtcattattttagtttttttattcaacttgctcaaattaggaaccaattatttacaattggttcaaatgatgatgctacaaggattttaccataaaagaggtgacaaaacacaactactccactacactgtatattttcgagtcaagtcaatgaaacgatagtactatctcaataataagcaagcaataaaatttgcaaagaagcaacaacacaaaaattcaggtttgtgtttatatagcatactaataatagagagcacatggtttgtgatatttctataccaattgattacacaaccaaatcattagaatttagaaaataaactaattcaagattattaaccttttaacttttaagtttaaactcccaactttctttcacccaatagactcaaagttaagtcaaagtaagcagaaattatatatatatacatcatatacatctatatatcttatccaaacggataatcttatctatccaccaactcaaatcataaatgtagactgaccaacgcaccagctacttataatgacttttgtgtcccggtatcaattgaattcgagcaggacgatgaccttagttcagacaggagccagatcaatgtcactcatcttgatacccattactaagttcatgctcacaagcctaatcatgttaatcttgcaatattagagacagttatacaatgcttaattattattatgtaatagtatatagaagaacctgcttgcttctaatcttacgttttcatatccgaaggaattaatgaattaaataacacaacctgaagataaatatcaaagccaggaccatttgcaacttcccccaaggaccatatcctactctcactctgtggctccaaattctctatttaacgtacagataaggagatataaagaacaatgtgtataaaccacaaatgactagaggagaaagatatttacgcaaaaagaaaaataacagtaaaataatatttgattagacctataatctactcataacctactacgacgtgataaggcttgagaatgagatgtgagatgtcatcaacacgttgaattttcatgcccaatgaaatttacaacatattacaagactacttaaagttgatgacggttctgcaattcaaggccatttttaacgaaaactaaagcattctggggttttctctagaagtacttcgttatggcacttgggtttttagtatgtatgtttacaacatttacacaaaacaatgatgagaatacagtaacacttttgctctattttagtctttccctcaacttcctaactatcttgtcaacgggtaaagatcccactggaccaaccggatctagcgactcatcatcggaacactcgtcatcaaagtcatcgtctatgtcactataatactcttcggaccggtccttttcatccacgtaatcctctgctgcaccatcagtatttgacaagaccatagctgtgtaagtgtgttctgcagccagtgaagtgccttctaactcttccaccttcttcaatagatcgtctggaccgaggtcaagctcttcaagaatcacagccttcgacgattccaacgctcgttgccagagcgagatcattttggggcttgagatcgttgtacttggattagccacagtttgttcttcactaggtttgtctgaaaagaaaagaacaggtaaaaggtatatgagaagcattcttttgatattattagcattggtcagtggttgtccttaacttcagatagaacgatgtttgaaaactggaaacacgtaagaggtttctgagtatgcaagagttaataataataatacctgagggatcaagttcgttcgttgtgttggtctcagaaaggcttggaattagaggattgtctacaaaccgcgacttccattctcgtcctctccacatgagtatttgctcatcatcgaaagacagaagcacacaaggaactaactcctgcaaaaagataagaaatgaagagaaagctttttagatatatggagaaatgttggatgatgtaaccttggaaactgaatatgaacaccaaatgagagagagaacatgaatcttcctaacaagcaacgctcgaagcaaattaactctagaactaagtcaaggatatttcaaattgtttattactaaaatgcttcgaatttcaacatttgagattgaccttaagtgattgcaatggagatacaaaaaataaagaaaacctgaaggattaatagaccttgagcttagcgccaattttcttataatcacttggttcaagccctgggcagtcgactttcaccaatgaactcagttcaaaggcatccctcacatctttgactagcgacacgtaaactccatttttagctgcaatgcaaaaccaagacaataataataaataacagccaagtgtctcacctcttctagcacactatgttccaatttacttcagtgaatgccgaacctaacacaaaacaggaaaaagtagaactaagccaaagataagatacacttacacaacttgcatataggcctaagagactttcccttcaccctgaactcatgagcttcctctttcgtcaatccttcaggaacttcttgaataagctttggataaacaggagctgctggtttccacaacatcaatgggtactgcggacgtgtacggtaattgtaattcctacccctgaaaaggtacaccacacctccaactctatgaatgatctctcctcctgtcttttcctatataagagcaaaaagttacaaaagctggaagagtcaaccatcactactacaataatctaacagttcaaaagtaactacttctcatgtcaccaaacatctatcaaaacaaaccctctacaggttctgatatttcattcaagtttcctctatatctccacttaaacaaagtatctagtaaaacagatacctcaagaacacgacacacgttattcatatccacagtaggaactcctttacatcgaactttacaaacacgtcgtctcttccaatgcgaatgtatcaattccaacatattatgtgtaaatccatctctacctataaaacacacaaacatcaaatccaaatccaaatcaaaactcctaagtgaagacaagtacaacaacaatactcacccaaattaacctgacgattatcatgcatatgaggcttaatcaacattcctttctcccatctcttcaatggctctcctaaaacctcttctctattcattccttcctttggatacctcccaaacggtaacggcccaggcatttctacatacttaactccagattttcccgccggcggtggattaaaagaatcaaacaatggaatcttcttcttcgatttcttcaacggtgctttcccagtccacggtctcggcatcgtcggtggagcaaacggcataaaagccggttcacgaatcccaaccggtttaactttcggtgtctcagaatagctgaattgaaactcgaacggtgcaccgggaagctgatacgagacgccggaatcgccgattaagattgtgcggtcaccgtctgaggagataactccttccttaaccggtttgtagtatctggttcggtgatgcggaagcttaagagctggatttgattgtggtttcttcgggtttgtatcggtttgatgattagttttctgattacgatttctattggatggtgcgtatttgggaatcggtatcggcggagctggccggaatgttcctgatgatgaatccgccattggaggcgttgaaggaagtgaagagaagagattaatatctcttagtgatgctacaatcgccattgatactcagagaagaagaagatgagagttttagtagttttcaaactttatcctgtagacgacatcgtttaatcattacgggctttacttattaaattgggccctaaggccaggcccataatctatggacttgtaaccctaatttccttgatataaaagctattgttttcactctctgcgttttttctcaaacaagaaaatgcagatcttcgtgaaaaccctaacggggaagacaataaccttagaggtagaatcatcagacacaatcgacaatgtgaaagcgaagatccaagacaaggaaggaatcccaccggatcagcaacggttgatcttcgccggaaaacaattggaagatggaagaacactagctgattacaacatccagaaagagtcgacgcttcatttggttctacgtctgagaggaggtgcgaagaagaggaagaagaagacgtacacgaaacctaagaagattaagcatacgcacaagaaagtgaagctagcagttctgcagttttacaaggttgatggaagtgggaaagttcagaggttgaagaaagagtgtccttctgttagttgtggtcctggaactttcatggcgagtcatttcgataggcattattgtgggaaatgtggaactacttacgtgttcaagaaggctgatgaagagtaggttatgtctttttgcttttggaatttagattgttttttttttaattcagatattttgagatggttttatactattgagggatggtttaattgttgcataatacattatattatctttgattagaaatttgatcaattttttttttgtttcattatgctttgactgatgtggaaatgttgaattgtggctgtagaattaggacgttgtgttggaacaattctttgcgacattgttttagttttaacctggattagtgcaaggcaaaatttagccattatgttgattctgatcatattcttacaccaatgtcttgaagttttgttgttgttggctctgataacttgtttgctaagataagtttaaattctctcagatattgattatgtgtttgacattaacgtgcgtttgtctttgcacattttatcgtcatttcacagcttctatttatgttaacagtgagatttgaccaatctataagctgtcatgtaaaagtttgagactagaaatgagatgtatatcagtatatatggagtaaaagactgttaaaccagaagccataactatgattacaatgtataattttaacctctaatctctcaaatcacaaatgtgtacctcctactcaattactcatcaataggcttatgaaaatggatcgaaacttattaatgggtcggtaaattatgtgatctctcaaaatgggtcgaaacttgttcactccggggttgggtcattgcattggattccacccacacaaaaattacaaatgtgtaggaaattgagtaaatattagtattatgtttagtctttttcttgtggttgaacacaaaataggagatgagagtaagtgagagagagagaaagcaataaagagagggacagtagaaataacatgacacagagagaaagcactgaaacttgaagaaatagagagagagagagagagaagagtttgggtaaaatggtcaagaaacagttagcaaaaatgtgagagaagaaagacaaaatcctaagattccgagttactaaaagtgatgagtctcctagaaacacccgcactagtctcaactcactgcactttcattttcagtctcacttcaaccaaaactccaaaagactgttgagttttgtgagagattcattaaatcccatttaaagagacaactacacatgagacaaagaggcatttctttctcaacctcacttgtttttttctttctttctaacttgcaaaccaaaccacaccaccacatcacatcatttattaaccccagctctcttcgatgtctatctatctcctcttgtgcaacgtgcctttccattttcacatgttcatttttaatactcatactctttaccatcgatttttatctcttgttatttttttgtttaacctagtgttatcttacaataacacatattatcttgtatgcttatttatcagaaaaatcctgaaatggtttttgaagggagcttatatattttctgtttataggttattaagtgttttaaattgttttgacaacaaaaaatgtctcctctaatggtaaacgctcaaacgttatgtatcatttgtcatatatattttgtgagtgtgacataacataaaaatcttataacaatgcttttgtataacgaaaattcttaattaaactccatcatcaacaaaagtattatatacatcattttattttattttattttagagaagaaaatgtagtttgaatattaaggagttaggaatgtgattaatagaaagaatgagaatcatttactgcttacagctcatagagactatgaagattccaattattacaagtgagatagagacgtacataagttgaattgtattgtgcattttagcatataaccaaagcattccacatgaaagatataaatataattacatatttgcattaatgaatattaacaaaacctatctctctgtctatatatacacacacacacacacacatatatctcctatcattcatcgtacacacacactctctatgacaaagctccccaacatgacgacaacactcaaccatctatttgatctgccggggcagatttgccatgtccagtgtggtttttgcaccactattttgctggtataccttaacttcttctcttattctctcccttcctttctcccttcctctctttatatatatgatcatgagtttaatgagtgtaaatgtgttgcaggtgagtgtaccgtttacaagcttgtcaatggtggtgactgtgagatgtgggcattgcacaagccttctctctgtcaatttgatgaaggcttccttcattcctctccatctccttgcttctctctcccatcttgatgaggtttccataacatctatacatagacaaacacacaccatctaaatatgaccaatatatatatatatatacttacttttgattatatgtaaatatatgtgcagaccgggaaagaggaggttgcagctacagatggtgtggaagaagaagcatggaaggtgaatcaggagaaggagaacagtccaacgactttggtttcatcttcagacaatgaagatgaagatgtgtctcgtgtttaccaagttgtcaataaacgtacgtttgagtataaattcaacttaaactttagttttgcgatttctcctttcatcagtcgtctaattatgttttgagtttgtatatatatagcacctgagaagcgacaaagagctccttcagcttacaattgcttcatcaagtaagaaataaattcaacacattacatgtgtatgtatattatatatattcttacaaatttaaccacttaaggttttgagtttgtaaaatggttcttctttgggggttgtattggagcagggaagagatcaggaggttaaaggctcagaatccaagcatggctcacaaggaagctttcagcttagctgccaaaaatgtacttaagcttaattagtcttaagatttaaaagaaaaccctaatatagttttcatctttttgttagcttaattgacagatcgagttagctaataacattttatgatttcaattttttgatttggggatggcgaagtgggcccattttcctccagctcacaacaagagagctgcttcagatcaatgtttttgtgaggaagataacaatgcgatactaccatgcaatgtttttgaggtaatcctcagcaaccatttatattttttaatcactttcgcttcaaaatcaattaccatattcttgacaagtaaactccacaacaagtgtcattttccaaagcaaaccaaataattaaagcattaactagatccaaatagcatcgctctcagtcaaaatttcagaaccctagctagactaattatataaagagaaatcatttactaattattagagtgaaagcaaggagaagggtaagtgagattgtgagaatatatcattgatcttcaactactacaatgtgtgaaatttatgacctaaacccttttatagtattgaagcttacactgcacacagtttacttttatagaaacccattcaactaatttaaaacattgaagctgaatatgtatagttttcaattaatataccaaataattgttgaaatgtttgtgatgcaggaccatgaagaaagcaataatgggttccgagagagaaaggctcagaggcattccatttggggaaaatctccatttgagtaataacaatttgggatatgaaaatttaacaaaaaaataaataatggcgtatgacatgtgatggtgactcttttcttctagggtttgattatgttggtttagggtttctgttgttggagagagatagagagaagaagaatctgaaacggaagtaggatttgtgtgtgttcgagaagagtccttgggaatgagcgagtttgttcagtaatttcgtagtacttgtcaactttgaacttaatttgaagagacatgcattgactctataaaaaaaattctacttttgcattcatgactactcttattccatgaatgttttaacattccatgaaacagtactttagtaagaatctttgttaacctatcataataaagatccttcttgacttcgcgcgctcaatgcttttgtacgtacgatggagaaaaacacttactaaaaaaaaaacactttttgttttgacatttgacctttctaagttactttttttttttgtcgtctgaaaatttattatagagattccggtgaaatacaaaagtgaaatataaagccggcggttaacaagtaacaccagaaaactaagccgacgattaaaaggatagtcttggaagcaaaacccaaaggaaagggagacaacaaggcaaaacaaaccttacaaacaaagcaaagttgcgaaactgaaacaaagaagcagaccaaaacaaccaaaattttaaacacaacatctcgtcaaccacattaccagacaaaggaaaggcagagctttacaacaagccactccgtaggagacaaggaactcccaaccaaacggacagcggtgccacctattacgatgaagactaccttacatagaagagttccaaggaatccataccggcgagaagaactaggccaaagacgacaagtcacacctacactcccggaatcggcgaattaaagaatatgattgtttagcgcctcgaaggaaaccagccaatgaacagatgagatctcgatcagatctttagagtagagacaaggagagaaccaaatcaattcggaccacaccgaaaaagaaaaacgggaggagatcgaaccggacagaaacgaaagcaaccaccaagcctggtaagaggctaaacgagaagaaggctaaaacatgaccggatcaagaggcgctactagcaacatagaccaacccacaaaaacaacataagccatctaagaaccattcgaaaatccctacaccacaacgcacataaactaagtaaaagcaacataaactttacaacagagcaagagacgcatagctccggcgctatggaagccaccaaagccagccaacgcaaactgagatctagatctacttttagagagaatgaagaggttttagagtcctccattctttacacaaattattattaatttgatctttctaagttactagtatataaaatatataaccatcaatattcacgaaacaagaaagctaaagaaatcaatttccatgattgaagttactttgacagtataaattacttcatcctaaactatattaacatgcacttttttcttttagcttaaaaaaccagagcaagtctgatcttgcaaatgcatgaaaatcaagagttggatctatcggaatcctttattatatcattgactttttttgcagtaaactgccagtggatctcatgaatctaaagaaaccatagttaaaacttaaacctgaaccgatcaaaaattaaactcgttagtcttttgtcacggcgaggggataataagaagaaaaaaattatatcagaagagtgttttttttcggataaagaactaatatacttgtcaatgagcttaatttgtttttgtttgctttacactacggacggctctgaccgtacgaacaaaattattaaggaaaatcataattaagaggttgacattgcattttagatattggtgtaaattatttgttatatatactttattcaaaattctctatgtatgtacatgttaacgatcctttactggaaaacttaaacatcttccatgccatgtttaaatttgttttcacgtttttttattttgagctaaactgatatttctttgtgtattctgaaatatttttggattttggtattggttaaggttataattttccagctgaaaaggatgaattctctaaaagttttcaaagatagggtatcatttcaaaatacattttttaaaaaggtttgcttctcctaatttcatattatctttttgacgtcaccactcaccactattgaaaaagcatttcttaattttctttaacaaatggagttagtagaatattattatctgcacgttttccctatctaataacaggggtaatttcgtaaatcccccttcaacaactaattaatgtgccggaatcgcaacttcttaaacttctaccaataacaatacgccacgtcatcattcttccctgtcatcgattacctcagacggtgtcggagacgtttcattctccggcctttagtggcattttctcgtaaataaattcataatctgtgggcgaacctttggcgtcgtgtttataataaagtccaccgcgaaatctctattattcgccacaacaacaacaacaacaacaacccaaaacccaattttgttacctcttctttcctcaatcctaaagtcaaaacaaacaaaaagcttccattttttttctttgattatcttcaatcggaatttcaggtaacgaaaaaaaaaatccgatctttaatcatcaaatcacctaactgggtcaactatttgatcaaatcgataactgatggattgatttggttttgcttatcgtaacttttgattttcaggtgtgagagatgggttctgaaggaccaaaagcaataacgattcatgtgactggtttcaagaaatttcttggggtttcagagaatcctactgagaagatagctaatggtttgaaatcgtatgtggagaaacgaggtttgccttctggattgtgtcttggtagctgtagtgttcttgacactgctggggaaggtgcaaaatctaagctttatgaggttttggagtctagtgttgtctctggagataagaacaacaatggaactgttgtctgggtaagcctcttacttatttcttgatcatcattgttataatctgtctcagtcttaactggttatagactttagagttatagcttaagtttaagtctaacttggatttacagtttcctcttttttagtttgggtattgtattttcatatatatatatatatatatatatatatatatatatatatatatatagagtcgaagctcttgttggtgatcatcattcaaaaagttaagagagcttttagtgcaatcggtttcagcgagaaagagagttatctctttgggagcttcgcttgattaaatggtttggattttgaattgtgtttgacttgcaaccaatagtctataagagatgacatcaacagtaactgcacgaacagagggacgttctgatgcgttagagacgaaccaagaagatactaaaaacacatctgctacactccttgagttaccacttttagatttgagaagctttgatatgccaaacataatggaattc

SEQ ID NO: 53 - DNA, 80469 bp, Arabidopsis thaliana
gaattcacaatcatcaaatgcaaatcaatagcatcaccttcaatccacctaaacaacacattcataaaatctcagttttaactctttcccaagaaatgttagaacaaaaaaaacaacaagcatgattttaccagtgagctcactctatacacttgtaacaagaccttgctttaagactctgtctagttgctgcaacagctagttgttcagatgagaaatccaagcccatcacctataataatattaccaagttatcagaacaacaattttacaatcaagccaagctacacatttctaagaacataaaccttgccagttgaaccaactttctcagataagagaaacgctaaatcaccacttccacaacacaaatcaagaacgtaatctcctttttttgctctaattgtcaaatcaaaacaaaccaaaatcagaaaatagagataatcaaaacacagaacatagactgagatgtaatactcttacccactccatgagacagccatgtttttccaaattcgatgctggcctaagcttaagagatcattcaactacaaaagcatataagaagacgatgatttttgtagtcgggacaagttagaggaaaggagataagagagagagaagagattgatgtcaaacattatcgtaaactggagcaatgcggttgaagagaatccggcgttcgttcgagcattttactaccgttctccgtcgcgatcgggaatttaccgggtgctttccggtgaaagtcacaggagagacgataccgagtagagccgccattttttggccgttggttcacacgatcatgttgttttgttccgattactcggattggataaaagtctggtttcagtttaatattgggccgattttaggcccaataaggataatttgaaacccaccccaaaatttaaacagagatggttggattatgggcacaaggttccaattgctagatagctaaacttttggctacaattagcaaaatgtacatgatgattaaactgtcaataaaagaatgtgtttaatttagtgtgatttacacaaataacaagatattttataattatttttgaaaaacacatagttaataaacaaatctaacctatctaagtattttgtttgttcaacgttttgccaataagagggtaaaagctatatcacgagaggtccggagaagacaaaagaggttatttttattcaccgataataatagttacaaagcattttgacttgttccttctactacatgtgagtgagtgtaagatccatttcatgtgtcgtccatgcttcactctttctttctttttttcctttgtcggcaaagcaaggcagaattatacatccatcttttaatcaacgttaaataagtaccataaataaattcattcctcggtaaagaatgatccactagaatcatccatcatagcgaaaggcatattctctgatggcttccaatgacgtttcctttggtttataaaccaattgttgatttgtttttggtctaaccccgttgcatcagctaatgctatcttatctccttcctgtgtacacacacattcataccacccatttatatataagtgtagtggttagttatgtcggaaaacatgcaagtgttgcttttgcttacagtagggtaaggccacttataatggagattccaccaatcaagaagagcttgtcttgcttctcttggtaactttcctttcttcttcttctttgagaactcaagctttaaagtactaatacggcttccaaatttgcgtagcaacctatctttgaggtcccggtcttcacatctttgtctcccatcctctgctacctcatgatcacctccactcagttcctcgtcagatgatattacaccatcctctgttacaccaaattcacaagaattatcactatacaaagacatcaaagacagagaatggttataggttatagcaagtaaatgtaacagaattatcactattcactaccatgaaaaagtttaaatgggctttctcggctaaaacggctaagtggctaaagagggcaaaaaagggaaagaagaaagagtggtaaggggtagagaatatcgaggacgcacacgattgagtgcagcagtcaaaaaaccgccgcagtgaatagttacctccattgtcatttgtcaggagaggactaatagtcttgtccccatgaggagacatccccccttaggcctactaattacccaatctcaatatgacacgtgtaaataccatttagaggttgtgtgaacccccggaaataacgctacacctctcatttatgttctccacgataccccaaaactcaatttccttttctctctctctttctttaatgtatttggacatttatatatatgccccaacgactctactgacccacttacccagcttctctgacaccaaaactcaacccaaagacgattcaagaacattacctgattttacaatagttttgcctatgtgacagaatatatagtcggaccaagcaaccgtgcttagtcaaaatatttagtcagtcacacaaaatactggactacataatatatacacgcaatttcagtcagtttataaacatatattaaaaaaagttaaaagatttctacaacagccaaggtaatttcagtcaatttataattcacgcaattcagtcagttttataaacatattataaaagttaaaagatttctacagcagccacagtaattatgaaggaaatagagatgttaaataggccaataaaaatatactaaaatgcataaaacatgaactgatcatatattatagagaccattacgttcacattacacacatatgagtagttagggtaacagtttaatggcaaaaaacgatagtttgtatggttgggattattatttacattttcagcaatgcattgactgctttgaaaatagggttcactgaagaaggtaacatgcaagtagacacgtgctagtagcgtgcctcagagagacataatacgacccaccaagggaacaacgcaaccagagggcatggcaaaagagttgagaaagatagagaagaagcatagtcgcagtcttatagatgatttgattgtggtgtgtagagaaccctatgtctccttttttttttaataaccaaatcaaaaataaaatcttaggagagaaagttggtggggtcattagcggaatccacgggagtcccatgtgacttttccaccttttactttataacaaaaaccaaaagaacctctaattcaagctaatcatgcactatgttcctattcttctcgttgcagtattcttatcttctagatcaaatatgcaaacatgtaacattgatgatattgcatgcaacaagacaaatgttgactataaaagtcaataagagaccatccactctaagtagcaagataaccacgcattagaagaaaagaatgtgttgcttttttagctagtccaaagaagggctttcgctaagttgcattaccgtatcacaacaaccaagaagtgagaaatcaaaagtctatgtgatcaacttgtattactaaatcagatcaacatgaaagaaaccaagcatgtgattgaactgagaaactagtagataacatcgcatcccatgtgaatattgtctaacaattgtaagcttcttttttctttattagtttatgatttcattcaggtgaaagaaaaagatggttaaataaagcacacaaccaaagaaaaaaaaaacagatgagatcattcaaaaaggcaagttgtactttgaacaaattttaaaattattaatcataaacattcgtccattatggaaaacctgcatcgatctattttcaacttttccagttgatactctatgctaactctcgattagtttataaagataagctgatatgtttttatatatcagcagcttttttccccaataaacaatattaccaaagtacaagtggaacctgcatttgagatcgaccacgataatggaaaactcctgcaaagctgaaaaaaagtctaccaatctatggagtttcatttctttacagctaactctttcagctggagtttttcttctattttattgtattaaaaaaaaaactcctaaggatcagtatttctagctaacctgatcggttgatttgttatggccacaatgtttttgctagttgtagtacaatatgtggtctaaagagataatatcagtaaaccacaaagaaagtcacttatttgaagcatttcattcatgtataagcataaaacctagacttttaaatcgcttcaaaattgagtcagttttggtttattacttacatataagtccaacaagactccaacaagaacatgcagataagagtggccacttggcaatgatactatttccgatgatcaacaaaaatctccctactcttgttctcagatcattgaaacttgaaatagaccaaagttacgttcttcataataaatgtcgaattcaggattaaatttttatttcacaaagaatgtcgttttgtagacttctatattaaatttaaaatacaattttaactttattgttttaacctatttaattagatagaaaaattatatggtgtgttattaagatataacagaaatttaatcgtaaaattatctaaacacgcttattaattccgatccagagaatctgtgaatgagcttaaagaggaattacagctaataactcttatggcttattggttattaataatcatctgaccaaaagaagttgaagtcttagaaaaactggtaacctaataaggttgttacccataaacaagagtgaagcgacttatgagttatgactagtacttatacttacttattgttaaacgagaagtgaagcaaaagaagctcatgaaaaatcaactacacatattgttaaaaagttatgactaggtttttctgtcaattggtttttcactagaaaaaagcaacaagttgaaaaaacattcagtacgcaacaagcctctgaaacgtcaaaatcagaatctctaccacaaaagtttattgctttctacaccattttctttctgacagagaaagaagagaaaaagatataaagtaaaatttgtatgattagcacaaagatcaacaacaagaagaagaggaaatccccaccacactccaacaccctaatcccatggctaaaacattaaatgaacgagtaaaataattgcacaacaccttaaacagatctttgtctccagagtttcaacgtgcccaaaagaaaagcacacacaaaacaaaacccatcaagggaaaaatagctatggaaatgaaacttgtagctagggtttatcttcttttttttcattttttatctattttgctttctgatcacttcaaaagcctagggttattctatcaacaagctaccaatcatttttcagaaactggtcatatgaatcaaaaccctatggaaatatcgaggaaaggatattattaatgaaaaaccacggaaaagatcaaaagaaatcattcagaactaaccacaaaatagaaccactaaaagaccgaaccagagagggataatttaagacataccagaaactcccctggcagactcgacaccagtacataggttccgtagctgcatctcaatcttgttcaagaaacacgttgcctcgtcaaacggtcttgctagatccgatttgtatttcactaatatatcgcagtacgtttcctgataataaattatcttcttaagtacaaaaatttccaaaaaaaaatattttaacaaaaataaaaatccgaaaaaaaatcgagggaaaaaaagagagagaccataaattcatcaagctcaggatcagctccaaagcaagaagaaggaacaacctcttgcttataaacatcactctcccgttgaatctcctctagtaaacacgctatctccggtggtgctccgacctgtttctaaattatgaaattgttaaaccataaaattataaaaaaaacaatcaaatatcaaagcttctcaatcttatctttatctttaaaaagtaaaacctagattttatctaagtgataaaaaaagaaagagttaacgatcaccttttggcaatcgatgtaagcttgaagtaagcgaggatacgaaggatgacaagcgattttagctttgatgacagttagagaaacgttatcatcatttcttcggatctccggagcgatcgaagccgcctccgacgacaaagcggagacggctactgagagtagctcgtcggatccgaaaacatcagagacacgattttcaccggcggaggaacatagcaaagcttggtaatcggaaggaaacatgagactctccggtgacatcatcagaaccgacttatctgaataatcaccggccgaatggaaattgtacattccatccataagtataagatctccggtaagaactcctccgtcttctaaatcgctttcttgaattgtcttcttgcaaaatcaagaatcgatgaagaagaataatatgaaaccgcttataacaaactttttggttcttgaaaatatttatttctatgggagtgtgtagagagagagagaggctcgagggatcttaatttattttcttttggaagaaaaaagatatgaaagttaacggagaagaaaaataaaatgataattacgaaaaaggacatatgctaaaaggctcaatggagcttcaggcttcataggtcgagataaggccttcctaacatatatatctaagaaaggtccaaggctgtgttatgatagaatttgcatgatcatgagatttttaatatcaatgaaacatggcgagaaacaaaattatatattattgaaaacgaaatggaaaaaacggaaaaagtgtgattatttaccagcatactatgtcagtttatttgaactcttttttttctcatcgacaatacacttagatggtaacataactactagtacatataaccactaaactacacgcaacttatttgaaagctctgtgtaattttcttttcaaaaagtatagttgatgacttgatgtatatattataggacctatagaaacaaattgagcatctaacataatgatttgtatcagtatcggcattgtatcgttatcttcattcaaatatgataatatgcatgtgtgagctgtagacagttaaaaaaataatccccaatgtatatatattttcgaaaaactttgtagaaaatatatttttattatgatcctaagaacatatatagatacacctacataaatcgtttatttgattgcaaatagtgaaacaaggtgaaaatgttaaacaacaagtggaaaaccgaacagaagaaagaaaacaaatgaagtcgcatatcagaagataatatagtactaatgatattgaatcgagtcaattagaaatagatattagttcagtatatgagagatgttttgggtatgttgaatcgaatatatcaaactggaaaaacaagaactggttacaaacaactagtgagctgatacatacatatatatagttaaagagcggtattattttaatacttgtcactgtaaatttgttgctagatacagaacaaaattatcgaacacgactactaacaaaatgataatcaacacatatatattcaaatgatggtatgaaataaatcaaatgtgaagaatatatggatatgataagtgattcttagtacctactacgtagtaagaaattttttaccaactcggatgttggacacttcgattgtacgggatgaaatgggtttcgagaagcgaaggtccgttcctagatagtagataagaaggccctaatggaaaatcgtctaattaagattaaattagtatatagtatcagctagtgtttactttagaatagttctgtataaagcaagtttgtggataaaactaagaataaaataaacgctggtctaggcgtataggagctgcaaaatcaatggtcttagctaatttatgatttatgaaatttatgccaaaattgatgatgctgatattcatgatgactttagcttatgaaaatgaactatgtaatttattcacaaaaatagacataagcataatttggtatatttaatgattttacatatgtattaagtttgaaattatgaaattggccgtaatttaaagagagtatcaagaaaaaaacgagcactttaaccaaaaagaaaatagaacgagagcatctataatatttcgaatggaactattcttttagttttgtcgacagctttttacgtctatcatataattttcaatcaagaaagtggcatgttctttcatactactttaatataaactttgtttctgtttttattttttttctcaaagactagagaaagtcattttcatcttaaaggtacttgcaaactattggttgctctaaatcacctaacgtatcataaataatcaaggggaaattaagttaaagaaaggagacttgaaattagataaatatgaagtcacaaaagcgaaaacaatatatatatcacaaacgagtttgccttcttattattggcaaagatcagacgaaaatatgttatttatttatttaacatattatttgttcacatatgcatattcttggtgagaaaaaacaatacaaattttttctggagacacaatcaaaatgttcaatattttctttctctggttatccatgcgatgcgccacttggatgctgatgttgagtattgagctcaggaaactacgtgcgatgttatattcattttccatcaacatatctaggctttgtgatttgatagattcttttcatttttctgtacctatctccctacctatctatataattgcaataatctatcaccaaataatgtaagacgacataaatatatgtaacccaattataaagttcgtctacgtattatacatgcagctaaagtactgaatttataattcggctcgtggtccattctaattgtgacctaggatccaacaaataaattattgaggaaatttactaagcctctcaaccattttttaataactatggaatttttccaaactaatctccaacgttcatagtgaccagccatgattttttagccaatatttatagatttgcaaccatatttaatgagtttagtgcttcgaaaccttgtttccataatgtaaatcatcaacggaaaaacaataacaagatttataaaccaatattttatcaaatatgttcctctattttctctattaaaaaaaagtgttaaaagggtcttttcgttgatggacaggttgattgacccatccattttcgggccatgtttgttcgaaaattatctgacacaaagttacggtttcgtatgaatccatataaaaaacaaacacagctttggtccctccatcccattcccttggatcccgaccgttgatcctcacccaacttttataaaatgttaggattactagtttatacccataccatcatcagcttgaaccacttgttagttgttacacttttaatatttgaattgatagttatatctggttataggtttatagccgagtagccgactagtcaagtgttttacatcaaataaaggagtgatctaggttaggtatatcggtatttaacctgttaattttagaatttttatatttatgtgggtattgttttgcaaaaacccttgatatcttagttttggaatatgatgcataacaaataatcgatattattccagcaatgtttgtaagatatataattgatatgattcgagcaatggttgtatatgcccattcataactaataagaatctgtttttttttttttttgttgataaaactataagaatcatttgaaaatcttttggtataaaagttcggaatcagtgttaatatcataaagagaaattgcgggtttatttgaaagaattatataataccacttggacatgattgagcataacagagtaataattgatctcatttatgttaggagaaaaaaacctcccactcaacaaagttgttaaatgtgaacatacctgctattataggaagggacaaagtaacccagaatagatatatctgtggtctgtggaccaaaaatcttctggattagaaatctgattagagcaccaaatgtctcggtctttgttgttcataatcaagccttatatacaccatcacctcctgatggacgtaagccaaaatttgtttctaactatatttaaataaatattcaaccaatgtgtaaagtatcaactttagccaatccaaacgtgacaagaaaaaaccaatccaaatgcggtacgtggacaatctgacaaacaatatgaatacattttctttgtggttttattagctcgaaaaagataaataaatagtatgtaattcatgagtgactaatgacatatcttttcatggaatatatgggggaataaatctagtgaaatgcagcttaagtagcacgaaccataatgttatgcgtattgagttatagtaaccttatgctttttgggtcaagataggatattagtatattactaatagttttacttcttcttcaagatttcagtgatgtaaaatgttcaatattaattaagtcgagatccggtctaaatatagagcatataaacaattgagatacaaaaggaaatctctttttaatataaaaataaataaggaaagtttagaatatgtaacaaactaacaaatgcacataggtgttgttttaaattatataataaaaactgcatcagcactgttatagtgttatgcccactgcggtcggagaatatatgcgtcccatattttttagtcagaaattggcttttcactttactattgtacgttcataatcactattactactctattaaccgatcgagttttattaatttgatgtatactactaatatttttctttctgacgaaaataccacgtgcatgtttatgtataaagtataaaccccaacaaatctggtgatgttgtgggcatgtattgaaacagaaagaagatcgaaacatcatcgtcatgatcatatgatgcaaagtgttaaatggttgttgagttaataatattctcttttgttggaagtggtccttagtttttgtgtctgtggtccatcaaaatgatatacaaactttgtctttaattttgttacataatcttaaaattgactcgaaagttaactaattaaggtttcgatccaacagaaacaagaaagttgtctctgaatcattccttcacattatttctttccttgtgtggtccttcttgctttaccaaaatgatgaaacaaagaataagaaaacgttaagagaaagataggagagaaccaaaaccggccaacaacttttattgaagaggaaaactctcttgcagttcatgtgggcctgacccggttcaaagcttcgacttaggcgaatccttgttggtgcaaattttaccaaataattgaacatataaaaaaaactaccaatttttttttgacaaaatatcttcaaacactacatataaataatttttatctaaatatatccctccatttaaacgtggcctaattgagatcgtggtttgtgagctcccgctatgcaaagtcaaatattattctattttcttggtatgaaaaattaggtttttttcatctagttcatcatttgttgatcaaaaagttcggtgcatataaaaaataaatataagtaagtagtcaaactctaaattaagtgaattatatagcgacatgttaatcaacgttgatttgtcgtttaagggaaaatatcgttccattagtgcaagctaattaaatagccaaatgactttccaaatggcgacgggcgagtgctctatctttgacttatcgagacaccattattttctgagttccagtaatagtggcatccataatttctcatgtatgtaacatctctaattaataggaaatcgagtaatttgtaccaaaatgagatagcatacaaataaattttaacatataatcttgaaaaacagtttatgggctcttattagtgaaagctgattcacaacatttctaatcttattatcgtaatcaaactagctctaggtttcaaaaataacctcttcagcgtgtatatttttgaaccatttaaccgtacattcatcttcaacgtacttgtacatcaatccaagtaacttcgatgcgtgatggtaatttacaacaaaataaaggaatttgattagatacctttgtattttatttttgtttaaaagtgaaagctaaatgggcccgtatcagcccatataacctgtactttttataatgtcaaaagcgaaagctttcaaatattccattttccattttcgacaaagatatcattctttttttttttatatgaataaaatgtggttttctctgagattaaattcgagaaaaagggtagtttaaaaacattctagtgaacatgatgctatctttcatgacttattaatcaattaattaattatgttgtatcgaatttaaaaatggattgcgacgatctttgcctcactcactctttggttttgtaaggaaataattaatttagtaacccgacaaacatttgtacgcattacaaaatattcatttatcttacgaagaatatcataattcgacttttgactcttccactgccacggactagtcctaatataagttttataataacgtatataagaagaaagatacttccacatgcttgtttccaacacacctcatgtaatcgtttaaagtccaaatcacaaatgtctatcaaggttctaatataatatttattcaaatacaatcaaattctatcaagatatatgataaatcgacctaattttaggtgtttggatgatattaaaagaacaacatatacatagtgtaaagggaaccaaagaaggtgcatgaagtttcttaccttttgaagtgttaccctttaaccaatccattctattttccaatccatatgaaatatttaatgggccaaattttccggcctgtttaaggtgagtggtattaaaaatgtttcgtttacgtagtaacgtagcttatttccaacaaaaagaaaaattgcgtccatgcatcattaatgggctacaattttgggccctatgggctaatttatgtaataccttcaagaacacgtcacactcacttagagacacgtcaacagcagacaaacacttcacctaacaaaagtatctctcgatagcttccctaaaccctttttacgcctctaattctttggattattatccacgtaatccacttcaaactatcaaattattacatcctctaaaatccatctcacaatagctttacaataaagtttcgttgaaaaaagctaacacgaaattgccaaagtgactagaagctttgaatttaacggacacgattaaattcaatattttgacgttgagagaaaactcaaattattcctaaacgcaagtttcaaatcgctaaaaccaacgtttgaacacgcaacgattactctctcagccgcgtgactttttttccaagtagcgtctgcgtttggcaaagtcctccacttacaaagctttcctccttcaatctccgccgcaacaatctctccgccgttctccgccgcaccatgtacataaaccatatctcccaccgcgttcaacactatcgacgttaacggccaatcagaattaatccctcttagtttctccaaatacgtctcaggcatagatccgatcgactcgaatttcaaatgcgattcgtcagaatctataacttcccacagttcgattcccgtcggattatattcatctccgatgatcccagccataattaaacgattaacggagaatccaatcgaacgtgagtataagctacactcgccgggacagagatcgagaagcttcgtccacgatctagttactggattgaaactacacgtaacgcctgatctcttctccgtcacgtacatcttctccgaactcaccgctacggaaagccacgtggacgacgcggattcgtagagaaaatctggcatcgattcgcatctctcccacgctccgtctccggattcgatgtcgaacagctccacggcgaatctatcctcctcgaaatcgcacacacctccggctataatcaggctccgtccgactacagccacgattggatcgatcctccaaactctcggcggtgccacgtgttgccaagtcagatgaaacgcgtcggttgagaaagagaatctcgccggagataaagcgtagagcaacgtggagtgagaggatcgagcaacggagacgtgttcgacgggagatgatgcggtgttgagctcgatccaggcctcggacttgggatcataagccatcgccatcgtcgccatggtgtacggcggagaatttctctggttgtagacgaacaaccacggcatggttttaaggcggcggagggagtaaaagacggcgcggttccatgatttggagacttggcaagcggaatcgaggtctaggagtggtaaataggagaggattgactcgagtatgtctccgtcaatggaactttcttcttctccgaaatctcctccattgttgttgttcttcttcttctccattttttggataatgcacaaagtctaaaggagggaaagtctttatatatagagagagtgacacagcgaagttggtgatcgactcttattattgcacatggaattaatattattttattttcttgtaggttaatatgtgacattcatatacagtaattattattgttagtaacttgagattgggactaaattagatttggatggtattcttaagcattcaagttaacagagttaactcaatatgtatggagtattaaagttttcaattaacaatccgattattggttatgaataaaatgacatatgtcattattttagtttttttattcaacttgctcaaattaggaaccaattatttacaattggttcaaatgatgatgctacaaggattttaccataaaagaggtgacaaaacacaactactccactacactgtatattttcgagtcaagtcaatgaaacgatagtactatctcaataataagcaagcaataaaatttgcaaagaagcaacaacacaaaaattcaggtttgtgtttatatagcatactaataatagagagcacatggtttgtgatatttctataccaattgattacacaaccaaatcattagaatttagaaaataaactaattcaagattattaaccttttaacttttaagtttaaactcccaactttctttcacccaatagactcaaagttaagtcaaagtaagcagaaattatatatatatacatcatatacatctatatatcttatccaaacggataatcttatctatccaccaactcaaatcataaatgtagactgaccaacgcaccagctacttataatgacttttgtgtcccggtatcaattgaattcgagcaggacgatgaccttagttcagacaggagccagatcaatgtcactcatcttgatacccattactaagttcatgctcacaagcctaatcatgttaatcttgcaatattagagacagttatacaatgcttaattattattatgtaatagtatatagaagaacctgcttgcttctaatcttacgttttcatatccgaaggaattaatgaattaaataacacaacctgaagataaatatcaaagccaggaccatttgcaacttcccccaaggaccatatcctactctcactctgtggctccaaattctctatttaacgtacagataaggagatataaagaacaatgtgtataaaccacaaatgactagaggagaaagatatttacgcaaaaagaaaaataacagtaaaataatatttgattagacctataatctactcataacctactacgacgtgataaggcttgagaatgagatgtgagatgtcatcaacacgttgaattttcatgcccaatgaaatttacaacatattacaagactacttaaagttgatgacggttctgcaattcaaggccatttttaacgaaaactaaagcattctggggttttctctagaagtacttcgttatggcacttgggtttttagtatgtatgtttacaacatttacacaaaacaatgatgagaatacagtaacacttttgctctattttagtctttccctcaacttcctaactatcttgtcaacgggtaaagatcccactggaccaaccggatctagcgactcatcatcggaacactcgtcatcaaagtcatcgtctatgtcactataatactcttcggaccggtccttttcatccacgtaatcctctgctgcaccatcagtatttgacaagaccatagctgtgtaagtgtgttctgcagccagtgaagtgccttctaactcttccaccttcttcaatagatcgtctggaccgaggtcaagctcttcaagaatcacagccttcgacgattccaacgctcgttgccagagcgagatcattttggggcttgagatcgttgtacttggattagccacagtttgttcttcactaggtttgtctgaaaagaaaagaacaggtaaaaggtatatgagaagcattcttttgatattattagcattggtcagtggttgtccttaacttcagatagaacgatgtttgaaaactggaaacacgtaagaggtttctgagtatgcaagagttaataataataatacctgagggatcaagttcgttcgttgtgttggtctcagaaaggcttggaattagaggattgtctacaaaccgcgacttccattctcgtcctctccacatgagtatttgctcatcatcgaaagacagaagcacacaaggaactaactcctgcaaaaagataagaaatgaagagaaagctttttagatatatggagaaatgttggatgatgtaaccttggaaactgaatatgaacaccaaatgagagagagaacatgaatcttcctaacaagcaacgctcgaagcaaattaactctagaactaagtcaaggatatttcaaattgtttattactaaaatgcttcgaatttcaacatttgagattgaccttaagtgattgcaatggagatacaaaaaataaagaaaacctgaaggattaatagaccttgagcttagcgccaattttcttataatcacttggttcaagccctgggcagtcgactttcaccaatgaactcagttcaaaggcatccctcacatctttgactagcgacacgtaaactccatttttagctgcaatgcaaaaccaagacaataataataaataacagccaagtgtctcacctcttctagcacactatgttccaatttacttcagtgaatgccgaacctaacacaaaacaggaaaaagtagaactaagccaaagataagatacacttacacaacttgcatataggcctaagagactttcccttcaccctgaactcatgagcttcctctttcgtcaatccttcaggaacttcttgaataagctttggataaacaggagctgctggtttccacaacatcaatgggtactgcggacgtgtacggtaattgtaattcctacccctgaaaaggtacaccacacctccaactctatgaatgatctctcctcctgtcttttcctatataagagcaaaaagttacaaaagctggaagagtcaaccatcactactacaataatctaacagttcaaaagtaactacttctcatgtcaccaaacatctatcaaaacaaaccctctacaggttctgatatttcattcaagtttcctctatatctccacttaaacaaagtatctagtaaaacagatacctcaagaacacgacacacgttattcatatccacagtaggaactcctttacatcgaactttacaaacacgtcgtctcttccaatgcgaatgtatcaattccaacatattatgtgtaaatccatctctacctataaaacacacaaacatcaaatccaaatccaaatcaaaactcctaagtgaagacaagtacaacaacaatactcacccaaattaacctgacgattatcatgcatatgaggcttaatcaacattcctttctcccatctcttcaatggctctcctaaaacctcttctctattcattccttcctttggatacctcccaaacggtaacggcccaggcatttctacatacttaactccagattttcccgccggcggtggattaaaagaatcaaacaatggaatcttcttcttcgatttcttcaacggtgctttcccagtccacggtctcggcatcgtcggtggagcaaacggcataaaagccggttcacgaatcccaaccggtttaactttcggtgtctcagaatagctgaattgaaactcgaacggtgcaccgggaagctgatacgagacgccggaatcgccgattaagattgtgcggtcaccgtctgaggagataactccttccttaaccggtttgtagtatctggttcggtgatgcggaagcttaagagctggatttgattgtggtttcttcgggtttgtatcggtttgatgattagttttctgattacgatttctattggatggtgcgtatttgggaatcggtatcggcggagctggccggaatgttcctgatgatgaatccgccattggaggcgttgaaggaagtgaagagaagagattaatatctcttagtgatgctacaatcgccattgatactcagagaagaagaagatgagagttttagtagttttcaaactttatcctgtagacgacatcgtttaatcattacgggctttacttattaaattgggccctaaggccaggcccataatctatggacttgtaaccctaatttccttgatataaaagctattgttttcactctctgcgttttttctcaaacaagaaaatgcagatcttcgtgaaaaccctaacggggaagacaataaccttagaggtagaatcatcagacacaatcgacaatgtgaaagcgaagatccaagacaaggaaggaatcccaccggatcagcaacggttgatcttcgccggaaaacaattggaagatggaagaacactagctgattacaacatccagaaagagtcgacgcttcatttggttctacgtctgagaggaggtgcgaagaagaggaagaagaagacgtacacgaaacctaagaagattaagcatacgcacaagaaagtgaagctagcagttctgcagttttacaaggttgatggaagtgggaaagttcagaggttgaagaaagagtgtccttctgttagttgtggtcctggaactttcatggcgagtcatttcgataggcattattgtgggaaatgtggaactacttacgtgttcaagaaggctgatgaagagtaggttatgtctttttgcttttggaatttagattgttttttttttaattcagatattttgagatggttttatactattgagggatggtttaattgttgcataatacattatattatctttgattagaaatttgatcaattttttttttgtttcattatgctttgactgatgtggaaatgttgaattgtggctgtagaattaggacgttgtgttggaacaattctttgcgacattgttttagttttaacctggattagtgcaaggcaaaatttagccattatgttgattctgatcatattcttacaccaatgtcttgaagttttgttgttgttggctctgataacttgtttgctaagataagtttaaattctctcagatattgattatgtgtttgacattaacgtgcgtttgtctttgcacattttatcgtcatttcacagcttctatttatgttaacagtgagatttgaccaatctataagctgtcatgtaaaagtttgagactagaaatgagatgtatatcagtatatatggagtaaaagactgttaaaccagaagccataactatgattacaatgtataattttaacctctaatctctcaaatcacaaatgtgtacctcctactcaattactcatcaataggcttatgaaaatggatcgaaacttattaatgggtcggtaaattatgtgatctctcaaaatgggtcgaaacttgttcactccggggttgggtcattgcattggattccacccacacaaaaattacaaatgtgtaggaaattgagtaaatattagtattatgtttagtctttttcttgtggttgaacacaaaataggagatgagagtaagtgagagagagagaaagcaataaagagagggacagtagaaataacatgacacagagagaaagcactgaaacttgaagaaatagagagagagagagagagaagagtttgggtaaaatggtcaagaaacagttagcaaaaatgtgagagaagaaagacaaaatcctaagattccgagttactaaaagtgatgagtctcctagaaacacccgcactagtctcaactcactgcactttcattttcagtctcacttcaaccaaaactccaaaagactgttgagttttgtgagagattcattaaatcccatttaaagagacaactacacatgagacaaagaggcatttctttctcaacctcacttgtttttttctttctttctaacttgcaaaccaaaccacaccaccacatcacatcatttattaaccccagctctcttcgatgtctatctatctcctcttgtgcaacgtgcctttccattttcacatgttcatttttaatactcatactctttaccatcgatttttatctcttgttatttttttgtttaacctagtgttatcttacaataacacatattatcttgtatgcttatttatcagaaaaatcctgaaatggtttttgaagggagcttatatattttctgtttataggttattaagtgttttaaattgttttgacaacaaaaaatgtctcctctaatggtaaacgctcaaacgttatgtatcatttgtcatatatattttgtgagtgtgacataacataaaaatcttataacaatgcttttgtataacgaaaattcttaattaaactccatcatcaacaaaagtattatatacatcattttattttattttattttagagaagaaaatgtagtttgaatattaaggagttaggaatgtgattaatagaaagaatgagaatcatttactgcttacagctcatagagactatgaagattccaattattacaagtgagatagagacgtacataagttgaattgtattgtgcattttagcatataaccaaagcattccacatgaaagatataaatataattacatatttgcattaatgaatattaacaaaacctatctctctgtctatatatacacacacacacacacacatatatctcctatcattcatcgtacacacacactctctatgacaaagctccccaacatgacgacaacactcaaccatctatttgatctgccggggcagatttgccatgtccagtgtggtttttgcaccactattttgctggtataccttaacttcttctcttattctctcccttcctttctcccttcctctctttatatatatgatcatgagtttaatgagtgtaaatgtgttgcaggtgagtgtaccgtttacaagcttgtcaatggtggtgactgtgagatgtgggcattgcacaagccttctctctgtcaatttgatgaaggcttccttcattcctctccatctccttgcttctctctcccatcttgatgaggtttccataacatctatacatagacaaacacacaccatctaaatatgaccaatatatatatatatatacttacttttgattatatgtaaatatatgtgcagaccgggaaagaggaggttgcagctacagatggtgtggaagaagaagcatggaaggtgaatcaggagaaggagaacagtccaacgactttggtttcatcttcagacaatgaagatgaagatgtgtctcgtgtttaccaagttgtcaataaacgtacgtttgagtataaattcaacttaaactttagttttgcgatttctcctttcatcagtcgtctaattatgttttgagtttgtatatatatagcacctgagaagcgacaaagagctccttcagcttacaattgcttcatcaagtaagaaataaattcaacacattacatgtgtatgtatattatatatattcttacaaatttaaccacttaaggttttgagtttgtaaaatggttcttctttgggggttgtattggagcagggaagagatcaggaggttaaaggctcagaatccaagcatggctcacaaggaagctttcagcttagctgccaaaaatgtacttaagcttaattagtcttaagatttaaaagaaaaccctaatatagttttcatctttttgttagcttaattgacagatcgagttagctaataacattttatgatttcaattttttgatttggggatggcgaagtgggcccattttcctccagctcacaacaagagagctgcttcagatcaatgtttttgtgaggaagataacaatgcgatactaccatgcaatgtttttgaggtaatcctcagcaaccatttatattttttaatcactttcgcttcaaaatcaattaccatattcttgacaagtaaactccacaacaagtgtcattttccaaagcaaaccaaataattaaagcattaactagatccaaatagcatcgctctcagtcaaaatttcagaaccctagctagactaattatataaagagaaatcatttactaattattagagtgaaagcaaggagaagggtaagtgagattgtgagaatatatcattgatcttcaactactacaatgtgtgaaatttatgacctaaacccttttatagtattgaagcttacactgcacacagtttacttttatagaaacccattcaactaatttaaaacattgaagctgaatatgtatagttttcaattaatataccaaataattgttgaaatgtttgtgatgcaggaccatgaagaaagcaataatgggttccgagagagaaaggctcagaggcattccatttggggaaaatctccatttgagtaataacaatttgggatatgaaaatttaacaaaaaaataaataatggcgtatgacatgtgatggtgactcttttcttctagggtttgattatgttggtttagggtttctgttgttggagagagatagagagaagaagaatctgaaacggaagtaggatttgtgtgtgttcgagaagagtccttgggaatgagcgagtttgttcagtaatttcgtagtacttgtcaactttgaacttaatttgaagagacatgcattgactctataaaaaaaattctacttttgcattcatgactactcttattccatgaatgttttaacattccatgaaacagtactttagtaagaatctttggtaacctatcataataaagatccttcttgacttcgcgcgctcaatgcttttgtacgtacgatggagaaaaacacttactaaaaaaaaaacactttttgttttgacatttgacctttctaagttactttttttttttgtcgtctgaaaatttattatagagattccggtgaaatacaaaagtgaaatataaagccggcggttaacaagtaacaccagaaaactaagccgacgattaaaaggatagtcttggaagcaaaacccaaaggaaagggagacaacaaggcaaaacaaaccttacaaacaaagcaaagttgcgaaactgaaacaaagaagcagaccaaaacaaccaaaattttaaacacaacatctcgtcaaccacattaccagacaaaggaaaggcagagctttacaacaagccactccgtaggagacaaggaactcccaaccaaacggacagcggtgccacctattacgatgaagactaccttacatagaagagttccaaggaatccataccggcgagaagaactaggccaaagacgacaagtcacacctacactcccggaatcggcgaattaaagaatatgattgtttagcgcctcgaaggaaaccagccaatgaacagatgagatctcgatcagatctttagagtagagacaaggagagaaccaaatcaattcggaccacaccgaaaaagaaaaacgggaggagatcgaaccggacagaaacgaaagcaaccaccaagcctggtaagaggctaaacgagaagaaggctaaaacatgaccggatcaagaggcgctactagcaacatagaccaacccacaaaaacaacataagccatctaagaaccattcgaaaatccctacaccacaacgcacataaactaagtaaaagcaacataaactttacaacagagcaagagacgcatagctccggcgctatggaagccaccaaagccagccaacgcaaactgagatctagatctacttttagagagaatgaagaggttttagagtcctccattctttacacaaattattattaatttgatctttctaagttactagtatataaaatatataaccatcaatattcacgaaacaagaaagctaaagaaatcaatttccatgattgaagttactttgacagtataaattacttcatcctaaactatattaacatgcacttttttcttttagcttaaaaaaccagagcaagtctgatcttgcaaatgcatgaaaatcaagagttggatctatcggaatcctttattatatcattgactttttttgcagtaaactgccagtggatctcatgaatctaaagaaaccatagttaaaacttaaacctgaaccgatcaaaaattaaactcgttagtcttttgtcacggcgaggggataataagaagaaaaaaattatatcagaagagtgttttttttcggataaagaactaatatacttgtcaatgagcttaatttgtttttgtttgctttacactacggacggctctgaccgtacgaacaaaattattaaggaaaatcataattaagaggttgacattgcattttagatattggtgtaaattatttgttatatatactttattcaaaattctctatgtatgtacatgttaacgatcctttactggaaaacttaaacatcttccatgccatgtttaaatttgttttcacgtttttttattttgagctaaactgatatttctttgtgtattctgaaatatttttggattttggtattggttaaggttataattttccagctgaaaaggatgaattctctaaaagttttcaaagatagggtatcatttcaaaatacattttttaaaaaggtttgcttctcctaatttcatattatctttttgacgtcaccactcaccactattgaaaaagcatttcttaattttctttaacaaatggagttagtagaatattattatctgcacgttttccctatctaataacaggggtaatttcgtaaatcccccttcaacaactaattaatgtgccggaatcgcaacttcttaaacttctaccaataacaatacgccacgtcatcattcttccctgtcatcgattacctcagacggtgtcggagacgtttcattctccggcctttagtggcattttctcgtaaataaattcataatctgtgggcgaacctttggcgtcgtgtttataataaagtccaccgcgaaatctctattattcgccacaacaacaacaacaacaacaacccaaaacccaattttgttacctcttctttcctcaatcctaaagtcaaaacaaacaaaaagcttccattttttttctttgattatcttcaatcggaatttcaggtaacgaaaaaaaaaatccgatctttaatcatcaaatcacctaactgggtcaactatttgatcaaatcgataactgatggattgatttggttttgcttatcgtaacttttgattttcaggtgtgagagatgggttctgaaggaccaaaagcaataacgattcatgtgactggtttcaagaaatttcttggggtttcagagaatcctactgagaagatagctaatggtttgaaatcgtatgtggagaaacgaggtttgccttctggattgtgtcttggtagctgtagtgttcttgacactgctggggaaggtgcaaaatctaagctttatgaggttttggagtctagtgttgtctctggagataagaacaacaatggaactgttgtctgggtaagcctcttacttatttcttgatcatcattgttataatctgtctcagtcttaactggttatagactttagagttatagcttaagtttaagtctaacttggatttacagtttcctcttttttagtttgggtattgtattttcatatatatatatatatatatatatatatatatatatatatatatatagagtcgaagctcttgttggtgatcatcattcaaaaagttaagagagcttttagtgcaatcggtttcagcgagaaagagagttatctctttgggagcttcgcttgattaaatggtttggattttgaattgtgtttgacttgcaaccaatagtctataagagatgacatcaacagtaactgcacgaacagagggacgttctgatgcgttagagacgaaccaagaagatactaaaaacacatctgctacactccttgagttaccacttttagatttgagaagctttgatatgccaaacataatggaattcaaaggaacagtggatggacatgaagtcgttattatagtggatagtggagcaagtaagaacttcgtagcttcttggctgagtgataagcttgacagacctattgaaccaacaccccgttttcgtgctcttttagctgatggacgtattgaatctttccaagggaagtactccaatttgcctatcacaattggatcagaaactctctatgttgattgtttcttatttacattgggaggaggcgacatcatctttggtggtcaatggttggcttccctcgagatgtgattgcaaactggaaaaccatgtttttaagcttcactcgagatggccgcaatatacgattgaatggtgacccttcgttagcttgctcagaaatctcagctcgtggacctgaaaagttgcatgaagatcattgtgcttggttatggacggtgtgagacaaattatagacttagaacgttgatagagtgtgattcagctgtgtttctttttccatcttcagtaatgagtcggtatttgtttttgttttggagttgtgtttatatactaaagagaaaagactagactaagggttgatttggttttttcttttgggttacatttagcagttaaggtcttaggaagtttaggttttgtaagaactttttacttagaaataaaaatacttgttttcttcttgtgatttgagtgttcttgtgatggtttaaagatctaaaaatacgaaagtttctcttgattctggtgcttgtttagcttcatctcggggtgaatagcggagcgacaaaattcgccattgaaagacaggcagtgaacgaagctcatttccgttgtcctgatgaattgggctggcaaccgcaggtaaaccactagtaatttgcttatgaattcactccattatgatccgctatgcaatccgagaaataagctaactgcgcctttctttaacgttttctttacacagcggcttcccatagttgttgaagatggaggcatttcaaaggcaaaagaggtaacatacatataatatacatgcttcaccacaaaacctggatttgaatattgtttttttggatgtcttgaagacttcatgctcgacggagtccattttccagttattaaagaagaaaggctttgaggttgttcaatcagacgatgctggacgttttgtatgcaactacgtgtactatcactctctaaggttcgcagagcaaaagggacacaagtctctgttcgttcacgttcctctcttctccaaaatcgatgaagatactcaaatgcagttcgtggcttcactcttggaggcaattgcagctacttgctagtgtttataagaatccactaaagccaaatattgtaagtatacaatgtatatgatccatttgtctttctatgaagctctttgtgttcttttgttggaaggtttggggatataaaaagacgattgcttttggttctcaaagatcctttgtgattgtctctgactctctgtaataaaagaagtctctctctattcataatgttaaaaaggttggatttttatggtatgtttctcctaatttggttttggtttgaccaaaaaaatatcaattttggttaaactttgatacgtttcagttcattttggtaatttcgatttagtttagcataaatttcgataattttgttgaaatattggtaatttcggtttaatctttgtaattgcagattaatttagcgtatatctttttgtaatttcggttcggttactgaatttcgttgcttcctattgccgatcagtttttcggtttagttcggccaattctgttcggtctggatgccaaggctttgtataaaccggtttcttgtgaagacactgtatcagtgatacttgttgggcaaggagcagaaaaagcattcaatttttgtcttttaagctttgattcaaatgcgaactagggctttgagagagattactttctttatacttttgtattgtaagcttgattcaaagtgtgagagacatgcgaggggctcaagctttatactttcttcgtagaacaacgactttagctcaacatttgtgttctcttacaccgtttattgcgacgcctcgtatggattttagttcgtttcttgaagagaaccctagcgaccttgtttatacccataaccgtagaattgatgaattgattaaatccgggaacttgttatctgcacatgaagcgttcgatgaaatgtctgtacgagatgttgttacttataatcttcttatttctgggaatagtagatatgggtgttctttaagagctatagaactctacgcggagatggtctcttgtggtcttagagaaagtgcttccacgtttccttcggttctgagtgtatgtagtgatgaattgttctgtagagaagggattcaagttcattgtagggtaatttctcttgggtttggatgtaatatgtttgttaggtctgcacttgtgggtctttatgcgtgtttgaggcttgttgatgttgctttgaagttgtttgatgaaatgcttgacagaaatttagctgtttgcaatttgctgttgcgatgtttttgccagactggagagtccaagcgattgtttgaagtgtaccttaggatggaacttgaaggtgtagcaaaaaatgggttaacgtattgttatatgatccgtggttgctctcatgatcggttggtatatgaagggaagcaattgcattccttagtggttaaatctggatggaacatttctaatatatttgtggctaatgtgcttgtggactattactctgcttgtggtgatttatccggttctatgagatcattcaatgctgtcccagaaaaggatgtaatatcgtggaactcgattgtttctgtgtgtgcagattacggatctgtgcttgattctctcgatttgtttagcaagatgcagttctgggggaagagaccttctatacggccattcatgtcatttctgaatttctgtagcagaaacagtgatattcagtccgggaagcagatccattgctatgttctcaaaatgggtttcgatgtttcaagtcttcatgtacagtctgctctcattgacatgtatgggaaatgcaatgggattgagaattctgtctgctttaccagagtttgccttgcctgaatctggagtgttgtaactcgctgatgacttctctgatgcactgtgggatcacgaaagatatcatcgagatgtttggtttgatgattgatgaaggaactggaatcgacgaagttactctttctactgtcctcaaggctttatcactctctttaccagaaagtttacatagctgcacgcttgtacattgctgtgccatcaaatctggttatgcagctgatgttgcagtctcgtgctctcttattgatgcgtatacaaagagtggtcagaatgaagtatctcggaaggtgtttgatgagcttgatacacctaacatcttctgcttgacttcgatcatcaatggctatgctagaaatggcatgggaacagactgtgttaaaatgctgagagagatggatcgaatgaatctcataccagacgaagttacaatattgtctgtactatcagggtgcagtcattctgggcttgttgaagaaggcgagctgatttttgactcattggaatcgaagtacggaatttcgccaggaaggaaactctatgcatgcatggtggatttgctagggcgtgctggtttggtggaaaaagctgaaaggctgcttcttcaggcacgaggagatgcagactgcgttgcatggagctcattactgcagagctgcaggatccatagaaacgaaacaataggaagaagagcagcggaagtcttgatgaatcttgaacctgagaatttcgctgtttacattcaggtttcaaaattttactttgagatcggtgattttgaaatctccagacaaatcagagagatcgctgcttcacgagagctcatgagggagattggttacagttcagtcgttgtgaaaaactaagaaggcaacatttgcaggacagtgtttttgcttcagcttcatgaaaaagaaaagcgaatccaattgcaaagttcacttcttttttctacatatctgaaatgggttctttcgcttgaagccagaccacatgattgacactctacagagacaacacaagaggaatatgagattctttatttgtcaggttggtgcaacaaactcattgacctcttctattttatgtcttttaatatactaatagaatatagaatgtctgttcgtcgttattcaacaccgcatcatgtctaaaattctaaaaatagcatcttgaggtagaaaagctgagagattttctgggacttctttcttttttttttttttttttttttaatttcaaatctcatgggacatcattttgatcatgaacaagttgaccacaaaggttttgtgtagaggttttggagtaaagcaaagaagtgaaaaagcacatgacttgtgctttaagcatagatgtatagaaaaacaaggccttatcttcatgtacttttaagccaagccaataaaccccacaaaccccattaattactctgcatataaattcaacccgaaaccaatcatctctaccaaagaaataaggaatctcattagtaggcactggatttaataatcaacaggaatcttctcttggcgttttgattgaagcatatgatggataagctcttcattctttctcttctaggtctgttattggtaactgcttatggagctgcagggaagatggtgtacacagatcttgacattcttgacgagcttgagaactttgatgtactggtagatgatgatgatgatacaaagctcttggattggccatcattcacaagccggcattctggtaaaaatctggtgaatgttgatacattcggtgcagctggagatggagtttctgatgatactcaggtttgcttattccataaaaatgacaggttatctagatacctaaaacgctatcagttctatgtctggaatgaaacaaatccccaaacttgaaatcatggggaaaatttctaaacaaattgtttgcattgtagacttggcctatagatatttacggaggtctagttagatatttttctgcatctgatctgtgcaatgctcttcccaaatcaggcattcgtaagcgcatggagcaaagcctgcagtacatcaaaatctgtgtttctggttccagaaggacgtcgatatttagtaaacgcaacaaagttcaatggtccatgtgaacaaaagttgatcattcaggtcaagttatcttcagtaggaaaacagaaactagaccataactatatatacaagtatgtcttatacaattcagaaacttgtctttgtttacagattgacggaacaatagtggcaccagatgagcccagcaattgggactcaaagttccagagaatttggctcgagttttcaaagctcaaaggggtcgtgtttcaagggaaaggagttatagatggttcaggcagcaaatggtgggctgcttcttgcaagaaaaacaagtctaatgtaaaatcttctatacccaaatctatctttctttatcacaaaagataagtgcctcgagttttcgaatagaatcttacacatctttcttgctcttttacagccttgcaaaagcgcaccaactgtaagaaaccattaccttcatcatttaccagttattattccttacaaatggctgcttatttggtttcgttcaacaatctgtttttgttttcccctgcaggcactaactatagaatctagttcaggtgtgaaagtaagtggcttgacaatccagaacagccagcagatgaatttcatcatagcaaggtcagattcagttcgagtctccaaggttatggtctcttctccaggagatagtcccaacactgatggaatccatatcactggatctaccaatgttatccttcaagactgtaaaatcggcacaggttttttttcttttgaccaaacctttatgcaaatgaaacattttacacttcgactacggttgtaataatcccttaagactggattaaacaggggatgattgtgtctcgattgtgaatgccagctcgaatataaagatgaagaacatctattgtggacctggacatggaatcaggtacatcatcaaatttctagattacatctgttccaaatcaaattataattagttggaatttcttgcagtattggaagtcttgggaaggataatacgacaggcattgtaacacaagttgtgttggacactgccttattgagagaaacaactaatggactcagaataaaaacatatcaggtacacaaaaaaaaaaaagcttcactatttagtaaaaacttcgatttggctagatccacaacaattttatttcattgtttctcattcgaacagggaggttctggttacgttcagggtattcgattcacaaacgtagagatgcaagacgtcgcaaacccgatactcattgatcagttctactgtgattctccaactacatgtcaaaaccaggtttccttataatacaacctcgtgattgagattattcaatcaaaatgaaactcaaagatgaaaactcagatatgtttttgttcttttttttggtataaatgcagacctcggcggttaaaatcagccagataatgtaccggaacataaccgggacaaccaaaagtgcgaaagccatcaaatttgcgtgcagcgacacagtcccttgcagccacatagtcctcaacaatgtgaatcttgaaggcaacgacggtcaagtcgaagcttactgtaattcagccgaaggttttgggtatggagtgattcatccatcagcggactgtctctactcgcacgacgacaagggcttggaccagactcacaagtcggaggaagccgagactggccacgacgagctttgatggtgatgttcaaactgttgttgtagtgagagatgatatgtaatatagttttctgaagcatatgatacagtaaaaaatgatattgtttttgtgtttataatcaaccatagttaaggttgttgttaacagcatttgtccaccttttacatcaaatgattttttttttcttttcatagaaagtcatatgcttcatctattgagcaatggccatcactttgaaaacttacgcttataccataaaccgggttctatacgtaaccaaatttcaatttctgatgggttaataataaaccgggtttataaattgggttatgattacacagtataccagaagctaacaaaaagctcaacgattcgtctcaaagtttcacactttcgtgaaattcttgttctcgaatctcgtttcatttgatacatttgaagaaatcggcaatgacgtcgccgtcatcgtctttctggaacacagcttcacgagaagccatgaaaagcggcatgtttgtcgcgaaagtctactgctttcttcatgtaacaacaaactatctcggattcatggcttatgtgagtcaatcgaaatctctcttcttttttccgttaatcgagaattatccataaagatgatgtctttatgagcaggcttatggtccgagcatgattccgacgcttcatccttcgggaaatatgttattagctgagagaatctcgaagcggtatcagaaaccgagtcgtggagatatagttgtgatacgatctccagagaaccctaataagactccgattaagagagttgttggtgttgaaggtgattgtataagctttgtgattgatccagtgaagagtgatgaatctcaaaccattgtggtatgttttgttacttaaccttccttgttgacttcacttcactttggttttgcttatgaatcagattttgaatgtagtaatttagagtagtactgagtttgaagaaagtagatacattgttgagaaattgagtgatcagagttgaaacaagttgttaatcagtattgagctcgatttagcttattgcaattcatggaattttttgaatctttagcaatgtttagtgttattggtgtacattacaatttactttagattgtttagtttcgattcgatattataagttgttaagtttgttggattaatggcgaattgatctttccacgttctattggttttaggttcctaaaggacatgtctttgttcaaggtgactatactcataactcgagagactcaagaaactttggtcctgtaccttatggtcttattcaaggcagagtgctatggagggtataagctttttgtcattaacatacaaatatagtcggattaactaatttcggaacttctaatgcgttatttgcatttgtgttgatctatatggctaatcttggatatgtataatgatgtgtaggtttggccatttcaagattttggaccacttggaccaaccccaacttagcatatgagttagcttggtcattaggccgatgagatcaccgaggcatattggtagtgtggttaatcgctgttgccgagtgagtctggctcttgattgactatgagatgcaggatcatcataccatccacaaagatgggagaatctaaacgctcaggaaaagtgagtatatggtttagactttagagcaagtaacattatgtattttggtctgtcactctatctgagagtggcctctgtatcaaaaagttaaaacaaagatctattgtggacctggacatggaatcggtatatcatcaaattcctagataatatccttttcaaaccaaattataattctctttttgcaaaatctttggaatgatcgcagcattgaaagtcttgggaaggataacacgacaggcattgtaacacaagttgtcttggacactgcgttgttgagagagacaactaatggactcagaatcaaaacataccaggtaaacaactaaaagcttgatcaaatctttaataaaacttcgatttggtttgatccgcatcaattttttctcttacgagcagggaggttctggttacgttcagggtattcgattcacaaacgtagagatgcaagatgttgcaaaccctatactcatcgatcagttctactgtgattcttcaactacatgttaaaaccaggtttccttataatatacaatacaaacttgtaattgtgattcttatatcgaaccaatactcagttatgttctcttcccttttttggtataaatgcagacctccgcggttaaaatcagccatataatgtaccggaacataaccaaaagtgcgaaagccatcaaatttgcgtgcagcgacacagtcccttgcagccacattgtcctcaacaatgtgaatcttgaaggcaaagacggtcaagtcgaagcgtactgtaattcagctgaaggatttgggtatggagtctactcgcacaacgacaaaggcttggaccagactcacaagtcagaggaagccgagactggccacgatgagctttgatggtgatgttcaaagtgttgttgtagtgagggatgataggtaaaatagtttaatgaagcatatggtacagtaaaatgatcttatgtttgtgttcataatcaaccataactaaggttgttgttaacagcatttgtccaccttttgtatcaaatatttttctttccccatacaaattcatgtgcaagtattttttcaacataaatttttgaacttggaagtttattgtttatgaaactgaaatacgtattgatatcggaaactaagttatatagtagatgtttagataagttagttaattgtcttagactttgggattagaggaacaagaacaacacatcacatggggactccaaaggtcgcaattgatatgaattgtttgatatgtctgtcacgtgtgaaaaactcttcctttcttcacaattatcattttctatatatatatatatatatatttgtcaaacaattattttctaattaatattcccaatttgtgtgtagctgtaaacatcaatgaccaatgccaacccattttatttactctttcaataacaactcaacaactacatcacctaagaataagatatagtcttggcttgcaatttgcctgtaatgtgaaatcaaatgatcgattatatggtataataatataatgataacatattaattccctcatatggtatgaatagtgaattggttttgtctatatccataagaatgaaaataaagaaataatttccttaaaacaaagaaataaccaaactatatgctataatggacccggagaatctaagtcgtgcgagaataatgattttgtttaccattaaaaacaaataattgttcatgctcattccatttccaaattattctgaacaaacaagatagagagagtgcaagttgtaagaagcagattttttttggtttttctctaaaaccaaactaaggagatctctaagttgtggcagagaagaaagcttctaaggtaaaatcacaaactctccactttttccaatatcttattgactcatattgcatttgctttcaagttctgataaatctctaaaaggtttatgacttttagaattactctttttgatatttaaacacattgttcatatgactatgcagatccagatcattgttttttttccagcttttgaaactaaacattcacaaatccaaccctacatcatattccttgtgacaacattgttgtttttttgttgtctatatgtttttcaagtaatacaagtatagaaaaagctttatctacaatattttcatcctgaaaagaagccaaaagcaaatttgttacaacattcttgataaaataacacgtcattagagaattaacaaagttttgaagcagagggaggaatgttcaatactagaaaattaagaccaaaaagtcaacatcacttttataagagaaaaaaacgagtacaactgtaacatttacttcgactttatctacgagagtattgaacaagtgggatgcaattgacaacctaaatcatggctcatagttacaaattatatatgactaatcattttccttttctcttaaagttgtttatagtttagacaataataataggagatgaagagaatgtgatgctactaactcttatttaaatgaggaatataaacaagatctggtcctgacattgttatgaatcttcaaactcaggacacaaaccaagatctcgtgtagaggaaaaaaaacctttcctccatgtttaagttttgagcttctggttggtttcaagtcctgtggagaaaaatgtcaccatttttgaagttctttctctttctctatgattatctttcaccttcctctttctttctggtaaatcatttcatctctctctgttttacatactcttgatgattcttgatttcacaatttatttaatcctttttttttcttggttttgtggggtttaaggtccaaagaaataccttaggagcatcattagatactacagatggggttgtgagaagtggcataattggagagattatatacatttggaagcagacaagaatctttgtctttataccaatcttgaaatgcttagtgacaatatgtttggtaatgtcccttttgttgttcatagaaagagtttatatgagcatagtagtagtgtttgtgaaattacttagacgaacacctgagaaagtacacaagtgggaacctataaacgatgatgaccttgagcttgccaatacaaactacccaatggttctcattcagatcccaatgtacaatgaaaaagaggtaattatgattttgttgtaaccaagattttttttaatgaatatacatatattatacaatactaatgaaggaatcaaattcttgttgttgtcacaggtttgtcagttatctataggagcagcctgtagactttcttggccattggatcgaatgatagttcaagtacttgatgattccacagatccagctagtaaggtcctttgttcaatttttttccccccaaaaatctttggtttatatgtatgattggttcctcaactatatatggaacgtttttgacatatgaaatgatttggaaaagacaggaattggtgaatgcggaatgtgataaatgggcgaggaaaggtataaacataatgtcagagattagagacaacagaattggatacaaagcaggagcattaaaggcaggaatgatgcacaactatgtgaaacaatgcgaattcgtcgccattttcgatgctgattttcagcctgatcctgactttcttgaacgaaccattccttttcttattcacaaccatgaaatctctcttgttcaatgccgttggaagtttggtaaagtcatatcttttttgaaaaataatagttattattttgttaagtcaaattggctaatggagagaatgtgttacatgtagtgaatgcaaacgagtgcttaatgacaagaatgcaagagatgtcactaaactaccattttgtggctgagcaagaatctggatcttcaatacatgctttctttggattcaatggaaccgcgggtgtatggagaatcgcagctttaaacgaagctggaggatggaaagatcgaacaaccgtagaagatatggatttagcagtaagagcttgtcttcatggttggaaatttgtctatgtccatgacgtcgaggtactactactataacccttttaaactcaagcaaaacataacaagatttcattcaagacattattaagtaatctaacatttcaggtgaaaaatgaattgccaagtacattcaaagcatacaggtttcagcaacatagatggtcttgtggaccagctaatctatggaggaagatgacaatggaaatcttacagaacaagaaagtgtcggcctggaagaaattgtatctcatatacaatttcttcttcataaggaagattgtagtacacatcttcacatttgtcttctactgtctgatattaccaacaactgtgctattccctgagctccaagttcctaaatgggcaactgtttattttcctactacaatcactatccttaacgcaatcgctacacctcggtaacaacatctctactgttcaagtaaaactctgttttctcatttcctagtatgataaaaagtttgacatatattgtctactgcagatcactccatcttcttgtcttttggatcttattcgagaatgtaatgtcgatgcatcgcacaaaagcgacattcatcgggttactagaggcaggacgggttaacgaatgggttgttactgaaaaattaggtgacactctcaagtctaagttaataggtaaagctacaactaagctttataccagatttggacaaaggtactcttaacttaaaaacacacacacaattacaatttttaagcattttgaaatgttgtaactaattttagttaacattttgcagactcaactggagagaactcgttgttggattatatatattcttctgcggatgttacgatttcgcatatggaggatcatacttttatgtttatctgtttttacagtcttgtgcattttttgttgctggagttggttatattggcacatttgttccaactgtttagattagacttttgtatttgagagcaaatgtgtttttgctatttgattagaccaaattagagattggatcttggttacttaaaccaagttaactcttccaatattcatactcaaaatgtaattttttaaatggtgttatgatcttaaaatttggttatcgatcatattcatacgtaacattttatgaatttgtatttgccaattgtgttctagaaagaaaattgagagaaacatacaaaaaaaacaagtcaacgtcaatgatttaagatgttgaaaatgacatggcggttttggattggttagatgcaatccacggccaatgacccatcacgcatgtaaaccgcgtaagcacaaggcccctccacgaaaacattcgtcgaggggtattctaggtattaccggtgataatttatgtgaattgacgtttttatcctttgcctctataaagatcttcttccgtttttgcaattacggcgtcgcgcatttagcgttgttttgaagctctctctttcaaattctgttcgtctctcgcgatctctctctctctctcagatagctccgaaactttcacgcagaggtattattgatctagatctgagctaaggcattctcaattttgattgtttcagtgtgttcttaggttgggaattgaatattcttgcttcgatttaggatttttcttatgatgatccgttgtatctttgggtaatgctttggatttcgatgtttttggttgaaaattctgatttcgatctgctgctgcatcgtttcaagtctggatctatgaacattatcttcgatttcacctttttctcgttgtaattgcttcaattagattctgaattccgcaagatctatacgatgaggttttgtaaacgttgttgcatctgtttcgatctgcgttattctaatgatttatagtcaacatttggagttctcgctggtgatctctctttatgtgatattgatactctgtttctgtgtgttagttaagtgaagcaggatgggattgtcattcgccaagctttttagcaggctttttgccaagaaggagatgagaattctgatggttggtcttgatgctgctggtaagaccaccattttgtacaagctcaagctcggagagattgtaaccaccattcccactattggtaagcttaaacatcatttcataattcagtgtttcaaaagcttagttccatcaactttgttcataccattcatacaaaattttgtcttccacctgccgtgatgattaaactactacaaactgtggacagggttcaatgtggagactgtggagtacaagaacatcagtttcacagtgtgggatgtcggcggtcaggataaggtataagattatccaactctaaagcattaagaattcttttttttttgcatcactacctggggatctttttcctactgtgtcttggtattattgttgatgaacatagaattacacaaactcacatgtcgcaaaacctccacttcttgttgtcagatccgtcccttgtggaggcattacttccagaacacccaaggtcttatctttgtggtggacagcaatgacagagaccgtgttgttgaggctagagatgaattgcaccgaatgttgaatgaggtctgtatcaagtgttatatctttgcctgttgtattgaattcttcatgtttagatgattcagtaaactgtttgtcggggttttacaggacgagctgcgtgatgctgttctgctcgtatttgctaacaagcaggatctcccaaatgctatgaatgcagctgagatcacggataagcttggtctccactctctccgtcagcgtcactggtaaataaaaacattataatctcccctgcttccctcatgttgatttgttctcctgcacataacgtttcttatgatatagttccaaagatttatcacctctctgattgattttatgtctacgaactctctccaggtacatccagagcacatgtgccacttcaggcgaggggctttacgaaggtcttgactggttgtccaacaacattgccggcaaggtaaattatcacaaacaacaattttgatttgtggatcagtattttgaagcaaatcgtgattcttgtttctgtgttcttgttactggttgtgcaggcgtagagggaaagttcgtggtggagttgatttgctgagcaaatctggatgcaggggcaaacattatctgaattttttttttggtttccgttttcgttattgttctgcttttttttttgggatatgtcgatggattttgtgattgtacgtagaacttagaaaaaaactaccttttatatagttttggtaaaactgtaatcgaagatttcacctactgctttcgtggttttggtcacattttacttgtgcactttgattcatatgttggaatgcggtttcgttggcacctgctacacgaaacttgatgattttgctagtatttgtcatatgaatcaagtagaggaaagccatgaccagtaggcgaaatgctagagtgtggcagaagaggaatgagtagacaatttaatcataaatccacttgtttgaaaaaaaagttaacattcaaaattctttgctggcatcctctaatccctttaatatttccaaattctcgcactttttgaacaccacattcatttttgtcagaatattgcgttcttaatttgtctagaataagcacactaaaactaataattatcttaacaaccatggaataacataaattatctgtttttctttataatatttttgtagaattgtaggttaatgaaatgtataaattgtgattctaagagtatatatgaatagtacaattgtacggttggaactattttgcggattactgttcaaaattaatgtgtttaaaggtcactgatttactttcttattctgccagccattaagggaacgttaatcatcattttgactagagtgatagttgcaaggacgatattaaatacagtatttgataagcaattaaggaaaataaaagaaacagaaacagaaacagaagatttgagtttattgaagaaggaatttagagtgattggagttttaataagttttgagatgattttggtgaattttggtgaattaggaaatttgtcactaaaatttcctcaaatctcacctaaaaccatgagatttatatgtttgaattttaaactaagaaaattccctataatctcacctaaagtcactcaaatcacttcaaattatcaaagattaattcattggatttgatttgttttccaaaattaaacaagataccaattattaaaaaataaagatcccgttgattttggatgtacaacttttccgaactagtcgtatataaatactagcttctttgacgtcgactatagcagcttttcatttgatatacaaatattcatcaatatatacatagacaccaaaaaacatgaatttttctttactttctacaatgctaatggcattgtcttctgtttgcttgttttttgttggttatgcgcagcaattttcaggaagtgtagcagtttcagcacttttcgctttcggagactcgatactcgataccggcaataacaacaatctaaacactctttccaaatgcaatttctttccgtatggtagaaattttataggcggaaaagctactggaagatttggaaatggaagagttttctcggatatgattggtatatctatcaacgttaacatctactatatctttatacacctcgacacaactatataatgttactgatttacctaatatttatgatttgatattagtcttttttgtgcagccgaaggtttgaatgtaaaaaaactcttacccgcttaccgcgatcccaacctttcgaagaatgatcttccaaccggtgtttgttttgcatccggtggatctggacttgatgaacgcactgccagatcacaagtaaaaattacttgtgttgcttagagtttacattgtaatcattcttgattatcttttataatatgttctcttgttgatgtatagggagttatatgggtgcctgatcaggtgaaagatttcaaagaatatatcatgaaactaaacggcgtcgtacgagataaaagaaaagtaaacgcgattatatcaaacgctgtttatctaatctcagctggaaataacgatcttgcaatcacctatcctactctaatggcacaatatactgtttcaacctacactgatcttttggtcacttggactgataatcttttaaaggtacactattttaaaatatttgtgataaaacataattgtatgattggtctttttcgaaatctattaattttgttttttggttatttgaagagtctatatgcaatgggtgcaagaaagtttgcggttcttggaacacttccgttaggttgcttgccaggagcaagacatacaggtggaaattttgggaatatatgcttagtccctataaatcaagtggctgctatattcaaccaaaaattatctgcaaaacttaacaatcttcacacaatacttcccggcgccaaatttgtctatgtagacatgtataatcctctccttaatctcatcaacaatcctcgggcttcaggtaatggcctaacttaatgaaaaattagatatatacgtcaaaaatataatatgttattcttcttcgttgatggctattatagggttcattgatgtggctgatggatgttgttgtatgccgacatcgccggttccgtgccctgatgcatctcagtatgtgttttgggattttgcccacccgagcgagaagtcatatatgacgattgcgccaaagattatagaaggaatcaagaagaatcttgcatgatcgtttcctctatgttttaacttcgttagacatattttacacaatgttctattttcattttttgttttgttttaaatgttctgttttcatatttattaagaaaaagtattaaaacaaaaaaaaagtgtataccacacaccatatgcaaatatatgatattaaaaaatatgaaaagacacaaattgactatgtataatcgtctaattaagaactattggttagaaacattttctatacatttaatttgatgttataaagtgaccataagaacatacacttctaaagtcatatgtaatattctgctatttaaatttataaaaagtgattttataactttatttgatgttctatcaatttgtagcggatttgggacgtttcaaatacctcggatcatggcacttgtaatttgaagatcttcgatcagagttttcatggtcttgatggttatccgacgaacgtaccaagaaatcggtggcagattaaaaataaaagaaggcttaaacatctggtccaatgtcactttcgacccaatccttccttgtccgcggctacatctttcgtattcttctgtactcttcggcttcttttgtttgcacaagcgttctgaatctacgtatagcggctccactttatactgacaaacatgtttatgaacatcttattctttaccgtatattgtacctgtcaaaaataagcaagagaaacccaaattaaatcttttccaagattgaaaaaaatggattgattctcatgagggaagtttttacggtaaggacttgtcggtgttcgataaaatttgcaattatcgggatagttccagataaccaaaggaagttccaggccacagctttcttggtgtccacaagctgccctttcccggtatccggcgacacaacttttcttgatatgttttcctttcataagaagaaaactatgacacactctcaaatcttgttatcattattttatttgaatcaatgaaatgataagttaaaagaagaaaccaaaagttggcgtcctttgatgattctgaagtatggttggttgtctggattagttaaaacgttgtaagctgcttgaggaggcaatcctaatgtaaattgcatttctatagttgacataccccattctagatcatttcttctttccaccttcaaacattacaaaagaaaagatctttattcttaattctatataccattttgaaaggcaaagaatcaaaaatattgtctttgttagctgatttttatttattttaactgatttggtctttaccttcacattaggaggagcatcattccattgttccttcttctctgtatctctccaaagttttaattgctgtttcatttcatctctcgcctcatgagtgtttgtctctgactttgacttaaatttcgcattctcagatctctcggactctgcctacaacaacaaacataatcattatctattgattgtttatttgttttgagttctcgggttgtataattgatggaaatgaaactgaccttgtgaggaagctgttgagtgttttgattgatccagctaccaaatccaggaaatacacccatgttctctcttaaactttagtccacaaagagaaaatgacgatccaaagatagatggatggatgtatgtagagacaaacagagagttgacttacagaggaaaagaagtcaacggcacaatttaaggtttcagggaccttagataaaaaagatggattcagatttagacaaaaatgtaatatgaaattgagagaataccgaaggtggattgtaccatacgttaccataaaaaaaaaggagaaacagggcagctcatgtctcgtgacttctttcttgtcgtacaagcgacaggtacatgaggaatgtttctgctgtgtcctacgtgaaatccgagttcatgaacttatatccgtaattacaagaagaatgaaaagtatgtatagtccacgtgaattttcccaaactatttttgactggtgttaaaaaatatgttcattgaccttttaatatcatatgagagaaaattgcaaaactcaaatccaaaatgtagcagtttcataaataattgtgagggtttctaaaaaaacgtttgattaaaatttgagtataacagatttaaaaatgtttgcgaatcacgtttactttacacatatgtttgcgaattaatagctttaggtgttttttacttttcatttttagaatatgcttaattaccagttcaaatttaatcagatttttttagttgaaacgactataggtttagatttttattttgcagatgtcccttcaaaagatgctaaaataatacagtttttttttcccaatatttacttgttaatattaacatttaacacgatactcattttttttattcggtataaagaatacacttgttaagatgaatgaagtgattataaagattagtatttgtcctcttcggatttatactatagtgatttagaaacctatcgaatgtttgagggcatttcaaacgcctcggagcttggcgcccatatcttgaagatcttgtatcagagccttagtaatcttgatggtgatatcacggatgtaccaagaaagcggtggcagattaaaaggaaaagaaggctgaaaggtctggttcattttcaccttcgacgcaatctttccttgtccaccactacatttatggtattcttctcgactttttggcttcatttgcttgcacaaacgttttgaatctacgtatattggctccactttccaactaccctcaaaacttttcatgaacatcattttccttttcatatatactgcctacgacaacaagcacgagattaatttttccaataattaataatgaacaaaaagattgattatattctcttgatagatagaaataagttccttacagaaagattcttacggttttcgacgaaatctagacttatcgggatagttcccgaccatgaaagaaacttccaggccacagctttctctgcctccaccgtctggctcgatccattatccgtcaacacatttcttgatacgttatccttcgtaagaaaaaaatatcacattctcaaaaattgttaatataataatactcttatactcatttgaatcatacaatgataagaacataaaagaaaaaccagaagttcgtggcgttggttaattattcttgagtatgattggttgtcgggattagtcaaaacgtcgtaggctgcttgaggaggcaatcctaatgtaaataccatgtccacatggcaaagaccatcttctgtttccaccttcaccttagcagggacatcttcccattgttctttcttctctgcatgtctccaaagttttagttgctccttcatctcatttctctcttcgtgatcagtattttttatttctgaccttgacttagatttcacattctcagcctacaacaacaaacatatataattatgcattatctaataatctctaaaattgaccgatattgtattcgtacttatatttaacttcctagagttctcatattgatggaaatgaaactgaccttaggaggctcttgagtgttatggttgatcaagccaccaaatccaggaaatatacccattccactcttaaaatttagtcgatagagagaaaatgacgatccaaagagagtgtccgagagaaagatgatatagagacaaagagatagttgacttaaggagggaaatatgccaaaagacaaagagatggtttcagggaccgtagataaaagttggattaagatttagacaaaatatagtaagaaactgaaataataagcgaaggtgaagtgtgtagggtacgtttacttacggcagagaaaaaaaaaactaggaagctcaattcttgtgacttctttcttgacgtacaagcaagagctacatgaggaatgttaatggacctataagcccactaggattagtgagggaatgaaagattttcttaaaagaaaaaaaatcctttgcggctagcgttgatatagatactgtagatagaaggcacaatttagtgaagggaaaaaaaagataaatcaaaatcaaccacaggtaacattcaactatttaaagagacacagtttagtgaaagaaaacaaaaatggcatgaaaagaacacaaaaatgtgcgttactatttactaatccctatccctacgttgtttaaaactttaaaccaatttttttattttttgtcaatgaactttaaaccatataattagaacgtattgtgtgtaaaacagtgagtaatgggaatataaaggagtcaatgattggtaaagcccactccataaatcttttgaattttattgggaaagagtaaattgtacaaaatcccactttattccagatttttgttccaaagttcaactctcttccttgcacttacacatcacaaagaatatctttagtgttctttctttataaaaagaaaagaaagaaaaacaacaaagaatgttctctcaattttaaaaatcttggtttcagacgcattagtcttttattccttgcattacctgtcgcttttgtatgatacaatattaaatagtaacttcttcaaaccaaaaattctactaataatgcattacccctaatctcacatggaatgaagcatattcacatttcttgtttcacaagtaccttctgagtaaccctccttgatctctactcaaggaactccacaaaaattaaaatctcacaactccaacatcttcttataacacgtcttgatttatctttaagaaccaaacaaaaaaccaaaacctagaagagaaaatgggagatcaaggagtacaacaaatgcaacagcctattgttgtgtatccaaacgcttacaataaacagtatccagacccttctacaaaaccttcttcttcctctggctcaagcggaaactttgggacggtcttcatagtcctagccgtgatctttgtcttgtcggctcttgcttgtgtctttggaaggctatgtaaccgtgaaagccgcgcggctaagcagcaacatagcaagcatccgaagcatgagaaagcttcttccaagaagagccgtgagattcggcctgtggagcgtgagccgagggagagaggtgatatggattttggtttcgatatgaaacggcctgaaccaattgagaaaccttctggaagagacggaggagaggacatagaattcgggtttgataacaagagaggtgaaagaggccgcgaaggcggaggcggaggaggaccacctccaccgaatatcaaacatgcagtgaggttcaagctaccggaaaatggagatcatcattctaaaggagagatcagacgtggaggtccttccttcgagttccgaccaggacactaatgatcttaatttgtttaagaacaaatcacttgatatgtctttattacttcctcactttcatttcttttgtgctttttttcttttctggttgattcttcttatgggtatggaacttagtgctgaagctatcaaacttcttattagtctcttggtgtgatgtataaagtcgtctctctacatatcaaaggtactaaataaaatccataatatttctgagtatattttgtaagaatcatggttaaagaatcaacaaatttataagaagaacgttttttatcagaatacagagttcttcactatcctcttcactcaaacaaaaattaagaacacagaacggagatacaaataactctttcacaacttatctaggttctatttctttcttttttctgagggaacttcgccattagagggcaaaaactaaaggcacctaccaataaatgtaatatacgaaaagaatggctttagaacgaggaggcagaggtatctgttactttcacctattgtatgatcagaaccgtcggttgttgaaaggccgagtctcagattcattccctgagaaatctgaagagcttttggcagagtagtttccactgtacaatcctgactctacgctgttatcaccaccaaacgccattttcctgaatttcataatgtcttcattgtattgccctgagtcataagttgtgctttgcccaattttgattccgttgctaatatctcccgagtctccgtcgcagtccaatgctctcacaaccttatttcgaagagtagataagttttcagatgtgagaaatcacttgttactatatatgggagctttggacttttggttagtcagaattacctgaaccatgcgtgggcgttttggaccagaatgtctaacacatgcagcggctgtctcgatcattctgaagacttcatgctccacataacgcttttcaagccgtgtatcaatcagttcgcttaaatctccggtctcaatggctttgagaagcagcgggcgcgcctgtgagttcatttataagtactatataagtatactagggccaatcttactattattgaagaatgtttgaaagttggattcttacccattcaaccaaactctcttctcctagaggctgagtctggtcaactggtttccgtccagttacaagctctaagagaacaaccccgaatgagaatacatcggatctatcagtcaattttccacttgatgcatattccggcgctaggtaccttaacacaaaacatgtcatgcagccatacgatcaataaagattcaggtttgatccaatttgttgcctcaagccatatataacaaacttttcatcaggcattggatcaataaggtccagttttggagtagagtttgtgatgaatgtttgcttacccgaaggttcccataacccgagttgaaacatgagtttgtgttgtatcattgagtctagcaagtccaaaatcagcaacctaaacatccaaaaaacagaacaagtctcattaactaaaactttacagtcataagatagatttaacgaaaaggaggatttcattattgcctgagcttcatattcatcatctagaagaatatttgctgactttatatctctgtgaatgattttcggatgacctgtaaaataaaacaaggatatgatttttggcttctgtttaaactatgaagtgcataaccaaagcacacaactaagaaaatgtgaaggcattacttacagtcttcgtgaagatatgccaaccctttggctgatcctatagcgatccggactctcttagaccactctaaaactggcaaaccctttcctaaagcgtaaagcgagtcagtctaacacgtaaagctaaaaaaaagtcttatctataacgaaaatggtaacaagtcactcaccatgcaaatgatgctccaaggtttgattagaaacatactcatagataagcaatctatgctggtctgaaatgcagtaaccaaccagagagaccaaatggcgatgatgaacgcggctgatgatctcaacctctgctttgaattcacggtcaccttgtccacttccagctttaagctgcttaaccgcaacaactttaccatcctgcaatgtacctttatagacacatccaaatccgccttctccaagaatgtttttgcgagcaaagccttgtgttatctcagcaagctcttcgtaactgaaatgagtctggccacttccgagtatagcagagtcaggtgtgccacttgattgcatttgatgatgaggataaccaccaccagctgtaccataactgtttcccatagaggattgttgttgctgtgaattgttatacattgaaccattaggaccagaggagtatcctttacctggatcttgaccgtataagaatccatctacatcaaaagcaaagatagtcagagagatgattcaagcacatagaagatgatcagagagagataaaggtgagatttttaaacctgatttaacagagaaattgggatgtggcaagtactgtgagtgattatagctatcaatgtttctctttttctttcttctcactaagaacacaacgcctataagcgccatgattgcgaaaccggctacagccataccaaccatagtcttcccttgatagccgccaccaccgccaccgccatctccattgccttggtttggagtaggagttcctttactaggggatgtgagagatggagacaccacaggtccactagaaggagttttgggtggtactgtggggaatgggctcggcggagcgttgggattagccggaggagaagtggctggtcctgatggttgtattgggggaggattggtagggtctaatggtgaagctggcggtgaatttgtaggatctgatgctggtggagctggaggagattgtaacggtggtgattccgggtttgtgggtcctacattcggcgacggcgacgatggaggaggcgattgaagatcttgagacggaggagggttgttgtcattggattcatttggtggagcaggtggtgtttcggaatcttctggaggagaaggagattcgtttgacgtcggtggcggcggagaaggggttgaatcaacgggtggagaagaatcggaaggtggaggtggagaatctgttagcggaggaagaatcgaaggtaaaggaggaagctgtgaatctggaggaggagtggatggttctgacagcggcggtgttgatgatgaatcagctggtggactaggaggagaggaatcaacaggtggaagagctgagttttctgatggagtctctggtggaggagcggtatcagctggtggtgctggtggtgaagaactcggcgactcgcctaagtctgacatttttttttttctaaggaaaaaactagcttagtttaatttaatttaatgatggattttttctaaggcaaaaactagggtttataaaattcccaggaccttgagaaacaaggtggagagagaggagaaaatgtacagactttaatttctaaaggtctcttctctctccctcaaactttccttttcccaggaaaaataaaataaaaacgaatctaacaaaaaatcgccatgatcatagatgatgatgatgataatagtcgaaggcacgtcgtcgtcgtctctgttttttttttttttcctcatcgtattgtttcttttgggacgacacaccttgattctcgggttaccgcgtaaattcaacgaaatcttttaaagtttaatcggaccttttgcgacccgacccgggtaatctcattgaagaactttctaccacgatgatgtgaaatctagatgggcctttattaaggacatgataataaagcccattacaatggaatagatggacctttatcaagggcgtgtactactgttccgattttatgatatttttcctatcaaagaagtaaaacaaaactttagccacccgagcaaggcatagctttaaatggaacacctatcacatttaccaaatttaatacctaaaattgctatatttatctgatcatcctatctttctttttcttcttctccaatcaaattcaaccatgtatttatattaattttccatatcgtaaatgttcattacgaagatattttgttttcaatctataagcttaaaaacaaactaatcctcaattagatgacacgtcgttaaaaatgataacaacaacgccaagccataatttccttagcgtggcaagtaacgtgatcttagtataggggtaatatagtcatttaagaagaaaacaaaaatcttgtcgtgcaagcagaaaagtaacggcaccgcttaacaaaaaccgtttatacggagaacgacgattctgaccctttttctttcacctgtaaaaaaaaagaacacttgctttcttcttcattctccactttttttttttccttctccccaagaatacttctctttctctctcgcactttcttctagactctgttttttcttttttgggggtgataatggcggcgcaggtcgaaattgaggaccaaacgtccgtcaccaaccttgataatggcgaaatattcgattcaatctccgacgatgctgattcttctgtttctcacgccggatcttctttctcttcctcttcactgatccttctcggcgaaggaaacccagagcacgacgttatcaagacgtgtttactctcgggaatgggtgttgtttctagcgacacgacgatcgttacgattagtaaaaactcttcggaacgaggaatcacgacgagagccaagtttttggcgtttaggattttcactgacgctgttgcgaggaaacacggcggagatgctaatgtgaaatatggttggtacgctggttctagagatgagattcaaagaatcatctcttacggatttagcaatcgtgatgttggaaaatttgaaaatgatggtggttctcatggaattggaatccatttggttccttccaagtgttctctacttgcgtaagcctgagatctctctactgattttcgtcgtaattttgagctaataactcggattatagctagtttctgagaaattttgaattgattttgatttataatcaacatgagtttaactaggtttgtttttcttattgtgtgtggtggtgatgatgtaacagtgaaagctatttttgcagggcttcagctacagagcaagatgaagaaggtttacgatatcttctgttatgccgtgtaatcttagggaaacctgagataatcatctccggctctaaacaatcgtatccgagttctgctgagtttgattctggtgtggatgatttacacaatcctagaaactatgtgatttggagttgtaacatgaattcgtgtattcttccgagttatatcgtcagttttaggtctcctagactgagaggttataaacactttctttctttaaggtctcttggtattggtgattacatagtgctaaaggattggttggtgtatttttttcagtgagtagaggtggttttgcttcgagaccaagctcgccgtgggttagttttgcttccttgatgtcaatgttgtctacatcaatggatccttcaagaatgaacttgatcatccgaacttacgatgattttcgggtatgtaatccagtttccttactgtatgttctgttctattattcttgaagttcgttggttaagattcaatgtgggtttattttgcagaaacggaagattaggagagaccaattggtaaggaagatgagagaagtggctggagataatcttttggctgagataatcaagaatcacaaaaacagaaacaaggtcacgaattaaaaaaaaaaaaaaaaacatgaggtaagcaagagtctttatttattctcaactaatcaatttaatgtaaagtggaagttcttattcttacttatggagcaaggattgttaaacttttatttgggtatatatatgaaaagtgacctttttaattgtcaaacaccacatcagattatatacctttagacgtgtgttgattgttgatccaactcatgcaatgtttcagtccattcatttgcttttgttacatattgaatattaagaaatgtctttgactttctggaatattattgaccttttttttcttcttctattacttgcagagaagttccacacgtgtgaaaggtgagaagaaaaaaatcaatagaagatcacacacgtatataggacaagcttcaatcaaaacgtggaaggaactatatgagagatttgatgcattttttttttctattggaaggtgtagtttccgttagtggtaaaaacagaggatcccttttgggaaacttgtaaagagcttgaacattacaaatctccagaataatcaagaaattctagaatcacagtctcttcaattacattgacctagcagttgtaaatctcctccgtttacttctcctatgtgatctccatctttccttaatgtcatcagctttgctcttttcggttaccacattgttttctccttgatcatcaatatagcctcctccttttcctccccgaagtctagtagcttcagcgaaaagatcttcgatcatactctctgtggttttaatggtgatcccacgtatgtaccaagaaagtggcgggggagtaagaagagctgaaggctgaaacatttgatccattgtcacctttgatccgatccttcctcgtccgttgctacagctatggtaatctttttgagattttggctttgagcggtcacacaaatgttcgtctataaacaatggctccactttccaacaaccctcaaacactttcatgaacattgttgtctcttgcttatattttgactggcctcaagataaaaaaacaatttgagtttgtgaagatagagtaaaaggattgattcttgcggtagaaaatatatcttacagtgagatttttccggttttcttcgacaatgagatgtataggacaagttccatcccaccaaaggaacttccaggccgcggcttgcttcacttccacggtctgctttggcccttcgtcgatcaaaacttttcttgatatgttttcctatttaggattaagacctatatctcaaatatttgctgtaatactcaattcaaatcaaacaaaacaagaccatgcacaagcaccttgatgtttttgaagtatcttttgttgtctggatgagtgaaaatgttgtatactaattcaggaggcaatcctacgtctgcttcaatgtttaaatggcaaaacaaaccattttgtgatttcacctgcaaacaagaaaatttgaagaatcatatttttttttctaaattctaccaaatctaagtttaaatttatttttggttctaatcttaccaccactttaggaggctgatctatccatgagggattatctctccaagcttgtaattgcttctctaacttctcttcatctctatgctcctcataagcagtctctatctttgacactgacttcaaacttagctctttcacattccttaatcttttgaactcagcctacaacaacaacaagaatcataatctaactaaatttctatattttaaataagcttcttgaggggttcttgagatggaaatgaaagtttgaccttaagaggctcttgaattgtttgattcatccataccaaaaatccaggaaacacaacgttattttcaaacaatttaacgaaacctataccgctcttctcctctgatcttgaaatttcagatacacccattttgtttctgtaaaattaggtcacaaaaacagaacaagatgacaatgagagatccaagtcaacgatgtggtttgagggaaaaacacatagagaaaggtttgattaatcaaaggttataaatgaaattgatgcttaatggtaataataacaagaatcagttaggtggagattgagtgtaccttacgcacctagaactaaaaatctgggacaagttccattctcgtgagttctctctttcgacgttaaagcatgtgcgtaaaatcggccggacattgcttacacaacttgtgtttcatttgtagcaatcgaacctgtgaaactctgacctgtgtctcctctaccacaaaatcaaatatcgactctggtttgcaattcatatccaagaattgatcttttatttattttttcccacttccaagcttctctagtttatattatccgtatagttttagtttatttttatgaaaaagtaaatgcgcaaagtcaaaatctgctaatgtctttgttgaactagaacttttttttgtcggtgttgaataaacaacaaatacgaatacaacaattttattattgttttctttaattggaaaaggtgcccgaagacttgatatccaagtatcatggacttaagatatgtaattaatgggccaattagcagattatggacagtgtttattttgaaaaagatagaggcctataactagaaatactatttaatgtacaagtaaaatttttgtgtgtaaaatgtttaggtggatctgcacacagccacacaatgtcaccatgcatggcgcgcatgacgtgatagaatagattaagtctaataaagagcaagtgtataaaatgaaatgagggaatagaacataatttgtaaatatgaaattaggaaatttatatgtggaagaatatattaaatttacaacatgctactatatctatgtatattcatttagcctagtgttttcaatgtttgttgtttttcttttttttcttggtgatattgttacgtttccatatttgtctgttgaagtcactgcacctggatttcgaaggtttataccccaagtttgaagtgttttcagcgcagttttggtgttcttgatggtgacctttcgaatgtaccaagatagtggcggcagattaaaaggaggatatggcttaaagtattggttcattgtcacctttgatgcaatccttccttgtccaccgctacatcttttgtattctgccggactcttcggctccatgttattgcacaagcgttctgaatctacatatagtggctccactctatagctaccttcgaaaactttcatcaagatcattttctttttcttatattttgcctgtcgacagtcaccaagagaaaccggagttaagtgtcacaccaatacaaaacaaaaagttttgattattgtgagggggtatagagaaacttcttactgtaagatcttttctgttttcatcgacaattagacttatggggacagcaaaagacgacccaaggaatttccagtccacggttttcttcaccttcgcgatctgcctcggtccatcctccattaaaacctttcttgatttgctttccttcataaaaaaaaatagagtacactctcaagtcttgctacaattaataccacatctgaataatacaatgaatgataagaaaaaagaggtggggagagaaaaaatggtccgttggatggattagtaaaaaatccgaagactttatctggagaaaatcccaatgtcaattctatgttcatatgacaaagaccattttttgttgtcacctacaaacatcaaaaatatattaaaaaaatagtaagatatttattcttattcctttaaaggcaaacaaatctaagtagtgcgattatatatgtttgatgatttgttatcattaccttcacctttggaggggcatcattccatggatgcatcttctctgcatctatccaaacttgatcttgtttcttcctctcatcttcgtcataatatttcttcatcttatcatggttattattattatccaccatttctgactctgacttagattcaacattttcagtttttttgggcttggcctacaacaacacacataatcataatctagtttctacattaatggattttttctgatttatggaaatgaaactgacctttcgaggctgtttattgttttgactgacccagccaccaaatccagtaaataccatttttatttgaaagattagtccacaagctaaattacgaattgtcgacaatagaaaatgatgatacaaagcttgtatatgatatggtttaaagaatcttagctatagagcttgtatatgatatggtttaaagaatcttagctataatcttgagagaatgatgtacgttaagttttacgcacggctaaaaaatgaagtgggcagctcaattctcgtgagtgattgacgtataggagagacctacctgaggaaagaggagatcaaaggtttgataagtttgcggattacgctccttctcatttttttctatgtgatcccttttggtgtaactccgcataattagtaatttagtatagtaatatgaacgtgatctaggaacttcaacaccataaacatatctttcgcgttatgtttacgttaacatgacaaccatagatctttgttaattcaaagcattaaacaaactaaacacaaacttttcatatgaattcattcattgaagggtttgcgacatggtatcatttcatggtactctaggaacttggaagtttctcgtattgtactaacttgatagattcccaaacggaataacacaccaatccattccctattgataagaaaacgacctcaaaacgctttctcatcgccgttgcatcgttggagagttgctcgaacccggctcccttcgagttcgagccattgctactaagagatgaagagaaattgcgggttcgctctaccttattttatgtttcatagaaatacaacttttgttttgaaaattgaaatacaagcttattaagaagatttattcattttttatatggaagcaagatgaaaattctatttttggctttgtgccaaaatattctaaattctagcatcaatatcttgcaaaataataatatggaaaaagacatgagcgattatattttttactatctctctcccaaaaatataataaaagaaattaatttttgtttcatcaatatgttccaaaaacttaaatggttaatggcattgatcgtaaataattatgttactgcaatgtgtttttgatagtaaataatcgacttttataagattgattctaacttctaagcactcgaaatcaaaaatgactttccgattactgtttaggagaaacttctgtttttccatgtttgttggttgacatgattacacccggatttcgaatactgaaactccaactttgaagtctctctagcacactcttggtattcttgatggtgatatcacgaatgaaccaagaaaatggcggtagattaaaaggaggatatggctgaaaatattggtccattgtcactttcgatgcaatctttccttgtccgccactacatttcttgtattcatctacactcttcggcttcttgttcttgcataagcgtactgaatctacgtatacaggctccactttatagctaccctcgaatactttcatgaacatcattttctcttttttatatttcgcctgtccacaataagcaagaaaaaccgaagttaaattttgcctatacaaaacaaaagatcttgattattgttaggggttatagagaagcttcttactgtaagatctcttctgttttcatcgacaattagacttatggggatagcaatagacctcccactgaagttccaggccacagctttcttcaccttcgcgatctgcctcggtccatcgtccttcaaaacctttcttgatttgcttttcttcataattaacaaaaagagtacactttcaagtattgctacaattaataccacatttgaatcattcaatgataagaaataaaaccagaagtggttcggtgtttggtccgttatgtggattagtgaaaagttcgaagactccatcaggaggcaaccccaatgtcaattctatgtgcatatggcatatacccttttttgttgtcaccttcaatcaaacaaaaaaaaggtgttttgtcaatcttattttgaattctacaaattccttaaaatgttcttgagattttgttagctgattttgctattactaccttaaccttaggaggggcatctttccatggatgcttcttctctgcagctgtccaaagtttatcttgcctctcccactcatcttcgtcatagtattttttcatcttagcaggaccattatccatctctgatgccgacttagattcaacatgctcagagctcttgggatcttcctacaataacaaagagaatcatatatgatttagtttatacgatggggtaataatattttttttaattgatttgacctcaagaggctgttgagaattctgattgatccatgctccaaacgcaggaaatacacccattatttctctatcaaattttatatagtccacaaatgataatgacaatgcaattgtatataatatgatttgaagaatatttagctaaaatgtctgcaattttgagagaatggtgtacgttaagttttacgtacggccaaacaatgcagcgggcagctcaattctcgtgagttatttacgtacagacgagacctaccttagctaggaaaaaataaaatagcaactttaataccataaaccgaaatagagatacaaaaccgtataaccatatataattcttgcgttggaaacttggaaacgaggaattacaaattgaccaacgtttcagaattgtgccaaaatggcataatatggatttggcccccatttttattaatgtacaattttgtgttgaattcgaagaaacctgatgtagagcatatcattacatttttcatataaatttattgatttacatagagacaaacattatagtcattttggtatagattttatacaaactaaaaaacgaagaaaagtatatccaaactttatatacacatacgaaaactaaatctagaaacgacgacaaagacaaccgtaacaattaggaacaaatctcctaattcacccttgtgctaattagaactttcgtacgggtctactcgcatcttggcacccatatcttgaagcattttgagcagagtcgtggtggtcttgatggtggtcctacgaatgtaccaagaacggcggcaaattaaaaataggatatggctgaaaatatttggtccattgtcacttttgatgcaatctttccttgcccaccgctacattttttgtattcttctggactctttggctccttctgattgcacaagcgctcgaaatctacataaattggctccactttatagctaccctcgaacactttcatgaacttcattttctgtttcttatattttccctatccacaacatgcaagagaaacccaagttaagtttcaacaatacaaaacaaaaacattgatttttgcgaaggatacagagaagcttcttaccctaagatctttctcattttcaaccgcatttatatttatcggcatacctccagaccaccacaggaaatcccaggccacaactttatctacctccactatctgccttggtccatccctcttcaaaaccttcctttttttgtttaccttcataaaacaaaaaagagtacacttccaagtcttgctatgtaagaataatatgcatataccacatttaattcacacaatgatatgagaaaaagaaaaccagaagttggcgccaagacttgtcactgacgagtggtaagttgtctggattagtgaaaagctcgaagactgatcgtggaggcaatccaaatgtcaattctatgtacatatggcaaagacccttttttgttgtcaccttcaaccataaaaattataagaaattttttgggatctttatcttataactcaagtaattcctctaataagagagaaaatattgttagcaatttggtcttaccttgactttaggaggggcatcataccatggatatttcttctctgcatctctccaaagttttccttgctccatcacctcatcgtcgacattattagtattcatctctgacactgacttagatctattattctcagatttcttgaactcggcctacaacaacaaacatatacatatatactctaatttctatatttagtccatgacatttaataagatatattaaccatataatttagcttatatttgacttttgggctctttgattgatggaaatgaaactgaccttaggagactgttgcatattttgattaaatccagccactaatccagaattacactcatttctctctgaaatttttagtccatgaacgatacttacctaatcagaacaagagctaatgactgtccattcttgtatatattatagtttgaggaatatgagattgaaacttgtttatggaatcgagaaaatatcgagaggttagtgatgggggtagtgtacgttatgtttacctaccgcgaaatgaagtgggcagctcggattttgtgagttcttgacgtacaggcaaaaactaatatagaaagaaggcaccgtaggtattatctcgtgagaacttttccatttttttataccatgaaataaagatcctttaatgcatatccgtcagaattaggaggacagttattcatttgttccacacattgaactttgtctattagtgttgcagattgaggtcagacgagcaaaaatatgagattccaaaaatataagaatacatttctctgatttaatggtaagcacaaagttagcttaaatattcgtatgtcacaaagttcaaatttagtaggaaatgaagtaatctttgatttatttgacccgcatgcaacgcatgtcatcatgtatggcatggactggactatggaaataggatggaacgtgatagaatatacaaagaccatcgagtttgttctaactcctaagtatacggtatctctcgcagtatggtggccctatcttgaagcattttgagcagagttttggtggtcttgatggtgatgttacgaatataccaagaaaacggcggcagatttaaaagaggatatggctgaaaatattggtccatagtcacttttggtgcaatttttccttgtccgccactacattttttgtattcttctcgactcttaggtttcatgttcttgcataagcgatctgcatctacatatagtggttctattttccagctaccttcgaacactttcatgaacatcattttttctttcttatattttacctgttgacaataagaaagagaaacccaagttaagtttcaccaatacaagacaaaacgttcattagttttaggggtgtagagaagcttcttacttcaaggtcttttttgttttcgttgacaattaaattaatggggagagatccagagaaccaaaggaagtcccatgccacagctttcttcaccttcacggtctgcctaggtccatctttcttcaaaatctttcttgatttgtttgcctttataagaaacaaatcacactctcaagtattgctataattaataccacatttgaatcatacaatgataggaagaaaaccagaagttgtcgccctgacttgtctataacaaagaatggtatgttggttggattgatgaaaagttcgtatgctccatcaggaggcactcctaatgtcaattctatgttcatatggcaaagaccctttttcattgtcaccttcaaacgcaaaaatagaaattttttatagacctttcatctctactcttattcttaaatctaaaagtattgagattttgttagctgatttgctattattaccttcacttttggagggggatcataccatggatgcttcttctctgcatcactccaaagatttagttgcttaatctcctcatcatcttcggtattattagtatccatatccgtattcgagttagatttaacgttctcagatctcttggactcgccctacaattaaccgatataagtagtttatatagattgactttttgggttctctggttgatggaaatgaaactaacctttgggggctgttgattgttctgattgatccagccaccaaatccaggaaacacattcatttcactatgaaagcttggtccacaaatgatacttatctaatcaaagaaaattgaggaatttgagattacagcttggttatgaaattgaaagaacattgagctagggagtggtggtgggggagtgtacgttaaatttacgtagcaagaaaaaaataaagtggacagttcgatttctgtgagtcttgacgtacaagcgagagctacataaaggaaaaagacttcgaaggtgttattatctcatgagcattatgctgttttccaacttctcaaatctttgtaaatatttccatttttttcacagcatggactaaatatcctttattgacgaaaaaataattttcatcattgaacttatttttccaatcgacttatttttcaggaataggagagtcgagttggacatacatttgtatataagtagatagtattggttatgtctgttttattttgttcattcaaatgaatgtaattagttgttttatttttttcctatctggattcatatgcaaaataatgagacttttcatttttatgtgtttttacaaaaaaaatctaatcaagtggtaacatcacttttgtggatcatgataacatattttctaagatcttctagcaacattttggtgattttgatggtgatcccacggatgatccaagaaaccggtggcagattaagaagggtagaaggctaaaagataagctccattgtcaccatcgatgcaattcttcctcgtccgccgctacattttttgtactcttcttgactattcaccgacctagacctgcaaaagcgttcctgatctacgtatagtggctcgactttccagctaccctcaaacactttcatgaacttcattttctctttcatgaacttcatgcagtggcttagactttacatccccaggttccatagctgtagtctacaacaagaaacataatctaatttctatatttaaccgatatagtattttttatattttttgctgatatatttgctcttaccttaccaggttcatcataccaaggttttagattagtgtctttctctgacactggactagatttaacattctcagatctcccagattcagcctacaacaacaaaaataatttataagattcaggttctttgaatattgatggaatgaaactgacctcaggacgttgttgaatattctgattgatccagccaccaaatccaggaaatacactcataattctctttgatatattaagtccacagacgaaacttaacctaatctaatcaaaggaaaatgacgacacaaagctggtatctatggaagttttaggaatcttagataaaggcttgattcatatttaggcgaaatataatacaacatgtaactgaaaaaatggtgtacgtatatgtgtttacttaccgtgcaacaaagaagtgcacaactccattatcgtgagttcttgacgtataagaaagaagatttgaggagaatatccggtgatttggattcaaagtcattttagatttgtgcaagatgaattcttcttattctcctcacaccagcctcaaaatcttgatgagaacgtgggtgctataactgcgggtcttcttactaatgtccctcatgcctacgagttcaatggtcttgtcaatggcgtgttctgtcttttaggtctgccgccagtgtccacatttgttatatataacccgaggaccagagaatccatcactttacccaaaataaagacgaagaatcagaagattatgctgactacaatattgtgagaaacatgatcataagacttcagatccaaggaatggaagaaggttaacggtaagcgatgttatatctttctaaaccatgtagagaacattaagcttaagcattttagtacttaacaacttattagggttggaggcagtgagatgagcattctcttttggatttattactgttcagcaaaacatagttgccttttttttttttttgaaatttaaactatattttcctgatctcatatctgatttttattggaatatcaacttattgttaataatattaattctagacttatgtcggttagatcatcaaaagttttgttcaacaaaggacgagagagtttttccatggggtatctttattactggtaggctggtaacgtttaggtagtgaaatacttcattcaacacattttgttatgcaaggcatggagtatggaatggagagcatcgcgttagacctaaggtaattcaggtcctaaagtcaactggaattaaaaaaaaaaaaaattaagatgcttatgcctatatgcgtattcgttgatcaaacaaaaaaaagatacatatgcgtattcaagttatagttttccatgtttcttgcttgtaagtctttataaagtcgttatctagacttagtctcgcaacacgacactcgcatgttgaagcattttgagcagggttatggtggtcctgatggttatatcacggatgaaccaagaaaatggtggtagatttaaaaggaggatatggctgaaagtattggtccattgttactttcgatgcaatccttccttgtccgccactacatgttttgtattcttgaaaactctttggctccttattattgcacaagcgtactgaatctacatatagtggctccactttatagttaccttcgaatactttcatgaacatcattttctcttttttatattttgcctgtccacaacaagcaagaaaaacgcaatttaaactttatcaatacaaaacaaaattagtaatgcttatatatcaaagataattgtgaagggtcgagaaaagcttcttcttactgtaaattctttttggttttcatccacaattagttctatcgggatagctccagaccaccaaaggaagtcccatgccaaagcttgctccaccttcacgatctgcctccgtccatctttctttaaaacctttcttgatttgtattccttcatcagaaaaatatcacactctcaaggactactatcaataataccacattcgaaacatacaatgatagggaacaaaatccagaagttgacgcccatgcttgttcatatcgaagaagagtgggccatcatttggattagtgaaaagttcgaagactccattaggattccagcctaatgtcagttctatgttcatatggcatagtcccttttttgttgtcaccttcaaaataaacaaaacaaattaagattgttgttctttagaaaagagctttcgtcaagcctaggtagtttccttgccaatttctttttttttttcaaaaacaaggccatctaaagtgcagttgatttctcagaccctttcaagccaaatatacataaaatccgagaatcctttcctccgtttttttttttttgcgagaattgtttctcggatgttgaatctaccaattcgttttaggaatcctagctagtaaaaaaaagaaaagaaattgaactcattttcttagggaagttaacatattttcgaggtcactcctagtattatctcttgtgttaatactattaacatacatcaataaactcaatactttcaagttcacaatattggcatggttttagagccaagtttaaccctagagaatatgctaacttccgtaataagataagtaaattttcttttctttttttttactaggattctcctagtaattctttctaaaataagtattgagatgttgttaggctatttgcttttgttaccttgaccttcggaggggcatcataccatggatgcttcttctctgaagcactccaaagttcatattgcttcttcatttcctctttgtcatagactagttcttgattattactatctttctctgactctgaattagtattaacatccacaaatcttttggactcaccctacaataacgaacataatttataatagtttatactaatttgacttgtcgagttctaagaatgatggaaatgaaactgaccttaggaggttcttgaatgttctgatttatccagccatcaaatccagaaaataccctcattttgctctgaagttttggtccacaaacgatgtttacctaatcagacagaacaagagcataaaatagtacgtttgtatatattgtggattgagtaataaaagtttggttcaaatttagaaaatttcaatataaaactgaaataatggtgtacgttaggttttacgtgtggagaaacaaagtagtaggcagcttcattctcgtgagttttacgtattgaataaacaaagaagttatttcccttattttgtatgtatttagtagtcgagaggtcgataaattgaagactgatgcgtgccctcgcggaatcaggattagtcaacttgacttactagtcggattgctttgatcggaatttctttttctaaagatgatccgtcgggatcaaatatggaccgctccactctgcttaatattccggttaatttaggtattgactgctttaaatttaattacctggcggtgggtactagtttgtgttgtatttgccatgttagctgcttgagatctttatgatattgtttgagtatattgaatgacgagtgtcaagtatccacattagctgtcccaaaggcttgttcagtttattttattagtttaatggtaacctttttaccaaaaaaacaacaaaaatattcacataaacaagatacctaaaaatatacttgatatggttttgtagtactaaaaaattatgaattttatattttcccctattagaattcccttttgaataaactgtttaccgagataagttttatattgttttgtttatttcgattttggggcttttcaaacttctcgtaaagtggtacccgcttttctaagatcttcgagcagaatcttggtggttctgatggtgatcccacgaatgatccaagaaaccggtggtcgattaagaagagaagaaggctcaaaaatctgctccattgtaacttttgacccaacttttccttgtccaccgctacatattttgtattcttctcgactttttggcgaccttgacttgcacaagcgttcctgatctacgtaatctggctcaactttccagctacccttgaacactttcattaacatcattttctttgtcgtatattttgcctatatgcaagatttattgatcaaacactagttaatacatccaaaactgaacaaattaaacaactgattttcttagaggatatctgtaagctttcttactgttagattcttatggttttcgtgaattataagatgtattgggatatctactgaacacccaagaaagttccaggacaaagctttttccacctccgtggtctgccttggtccatccttcttcaaaacctttgttgatttgttttccttcattagaaaaaagaccacactctcaattcttgcttcaattaactaatactcagtttacaactatattaaaatgacataccaaacgttggcgcccggccttatcctctttgaagaaaggaaagttgtttggattagtgaacatctcatagactgcttcaggaggcaatcccaatttgaattctatgttcaaatggcaaagacacttttttgttgtcaccttaaaacatccaaaaatgtaacaaactttttagatattttctcttaatgttagtaactcctcttaaaggcaataaaaaactaaaaggtattgagattttgtttgcaaatttggtctttaccttcaccttagctggagcatcataccatggatgttttttctcagcagctctccaaagtcttgattccttctttacctcagctaagtcataatatttaggatctaccgcccacacagaattagatgcagggctcttggactcgacctacaacaacaaacactattctacatttgatttgacttccttgagttctgtgattatagaaatgaaactgacctcatgaggctcttcaacatgaggattgatcgacccactaaatctaggagttacactcattttgtttctcaaagtttagtccaaaactatattatcctaatcagagtaatagaaaatgaaagagaactcgaaagaaacgtataagaaggcacaagggaaaactaaaacgtgcagctcaaattttatgagtttctgacgtacagggctcctacatgaatcctaaattctaaattttcctcttgtcccttcaagtcaaattatttcacaatttagaaaaattaaatggaatcatttattttcaatattcagaagatttaaaaacttatttccgtctactcacaaaagaagctatcatcccatgattgaagttacctttaaaaaattttgacttttttttttttttggacatcactacaattggtttataggttataggtttttgggttatttagaattcttcgttgtttttgaactctatttatttttatttatttgggaattaagagttttgtccttaatttcagttggttttatttgagtatatagagatcaaagggtgttgagatgaaacatttttgtgatcattaaaaacatgcttttgacaagaagcagtttccgtaccattcacgtcgtgactcattcacgtcgtgactcattcacgtcgtgactcattcacgtcgcgactcatccggttgaaccgtttacatgctttgacgttgtataagatatattggtaaagagctttgttagaacttacaacatacttatgtgtgaccatttaggttagcgtttttcatctttgttgcttgatgtctttataacatcgttatctagagactcactctcgtagtacaacactcgcatgttgaagcattttgagcagggtttttgtggtcctgatggtgatatcacgaatgaaccaagaaattggtggcagattaaaaggaggatatggctgaaaatattggtccattgttactttcgatccaacccttccttgtccgccactacattttttgtattcttgtagactcttcggctccctttgcttgcacaaacgtactgaatctacatatagtggctctatcttccagttaccttcgaaaactttcatgaacatcattttctcttttttatattttgcctgtcctcaacaagcaaaacatatctaagttaaattttaccaatacaaaataaagatagtgatgtttatcagaacaaacatacagaaatattgattattgtcaggggttagagaagcttcttactgtaagatcttttttgtttacatcgacaattagatttatcggaaattctccagaccaccatagaaagtcccatgccacagctttcttcaatctcacaatctgcctcggtccatccttcttcaaaacctttcttgatttggttgccttcatcagaaaatatcacactctcaagtactactataaataacaccacattcaaaacatacaatgatataggaaaaaaccagaagcgggcggccattcatgtccataaaagttcgtagactccatcaggagtcaagcccaatgtcatttctatgttcatatgacaaagacccttttttgttgtaaccttgaaacatcaaaaatataagaaaaattttaagctcttttcttcaccaattccttaaaagatccaagtattgagattttgttatctgatttgctattgttaccttcaccttaggaggtgcatcataccatggatgcttcttctctgcagctttccatagttcattttgcctcttggtttcctcttcgtcataatttagtccttcctcattattagtatctttctctgacactgaattagatttaacattcttagatctcctggactcagcctacaacaacaaacagagtttattttgttatattttcaggttctctgatatattgatggaaatgaaagtgaccttaggaggctgttggatgttctgattgatccagccaccaaatccaggaaatacactcatttctttctgaatttcgttaccacaaacggatactcactcacctgatcagagcaaatgcaaatgaggatcaaaacagtatctattaatctattatggttcgatgaatcttagattaaagcttgattctgatttagaaagaaaaaaaaaatcaagatgaaactgagataatggtgcatgtacgttatgttttacgtaaggagaaacaaaagaaatggccatgcagctccattctcgtgagttttacgtattgaagaaacaaagaagttatttcacttatttcttatggatttagtggtcaagaggttgatagattagagtctggcgcatgctttcatggaatcagaatatgtcaactcgactcattagtcgctttgatagatttttttttttctcttcaagttgattcgcatatggtcaaattgatttttatttatttaactatagaataaatactaaatagtttcgtgaatgctgataaaatatacatttgcttaatatttcgtcccgaagttccatacttccatcagtaccaaacttaaagcctcctattttcctgatatttcaatcattggctaccttggatttaattagcttgccgtgggaaccagtttgtagttttcttgcaatgtttgttgcttgaaatatttatgagttttgtttgagtaatgaatgacgaaaatgtcactatttagagaattaattgaactatacctaactcgaatgtaaaatattatgacggtcaagacctcgtcctttctttctttccattgcgtttgagagggtgtagcggggaattactgtgatcgatgaatgcctctcccctcatcccacctaactcgcacacttgacaaacaaacccgaaacagaatatcctctatccatggattggctggtgatagaagatatgcaggctgtatggccgtctggtttggttcaaaataattattagtctcttattctttctttatatttgtaaattaatctcaaaaactgatcaaacacaagttgcactagatgtaaaacagtttttttccgaataattttacataatattcaaaaaaaaaaagaatgtaaaatattcgcattatctgtcccaaaggcttggttcaatatttttgcttttgttttgtaagattcaaaattttcgatggagaaacattttatccatttagaatcctttaccaaaaataaaatccaaattagagatacctaacaatatatttgatttcgtttatgtaaatttctatttttccagtttcactgtttcgattccctttataatgtgtttatcacagaatataaccggtccattccaaatttggggattttcaaactgttcgtaaagtggtacctgcttttcgaatatcttcgagcagaatcttggtggttttgatggtaatcccacggattatccaagaaaccggtggcagattaagaagaggagaaggcttaaagatctgctccatggtcaccttggacccaacctttccttgtccaccactacatcttttgtattcttctcgacttttcggcaaccttgacttgcacaagcgttcctgatctacaaagtctggcaccactttccagctaccctccaacactttcaaaaacatcatattctttgtcctatattttgcctaagcaagagaaagccaaacacaaattaatttaccctaaactggacaaaattaccaatttatttttaagagatatacaaagacttttactgtgagattcttatgattttcatcgataactagatgtatcgggattgctctggatatgaaaaggaagttccagtacaaatctttttccatctccgtggtctgcctcggtccatttttcttcaaaacttttcttgatttgttttccttcataggggaaaaacccacactcccaatcatttctgtatagtcaatactcaatttgaaacattactcaatgaaaagaaagaaaaaaacaccagacgttggcgcccggccttgtcctttttgaagactggatagttgtttggattagtgaacatctcgtagactccttcaggaggtaatcccagtttaaattctatgttcatatggcaaagaccattttttgttgtcaccttcaaacataaaaaatgtaatgaattaagatatgttttcaaaaacaaaactctagcaattcttcttaaaggcaaaacaaatctaatgagactttgtttgttggtctggtcttaccttcaccttagcaggagcatcataccatggatgcttttcctctgcagctctccaaatttctccttctctcctcacttcatctaagtcgtaatatttagtatctaccgcccacacagcttcagatttagggcttttggactcggcctacaacaaaaaacagtattctatattgattttacttactcggtttccctgattaatggacttgcaactgacctcaggaggctcttcaacattctgattgatccagctaccaaatccaggaagcacactcattttgtataatcgtttagtccataaacgatactaccctaattagagccaggcaagagaaaatgacgatccaactaaggtaaaagcttgatttagatttagacaatatacaataggaaatagaaactgaaagaaaacgcacgtaaaaatgtttatgatttacgtacaaggcaaaacaaagtggacggctcgattttcatgagttgttgacgtacatgcaacatctacatgaatcctaactcatcctcttgtcccttcgtttcaatcctttgatgtatatagttcgctttaatttacaaccacaacaatttttcacaagaaaaaataagaaaatacttttttcacagttgacaagatttgaacgttctgttcctatataaagttgaggcattagtatatactcacaaaagaatctattatgcatgcataataattaattaacttctaaatattttgggtagacttgcttaaattcttgggttttttaccaattagtattccgatgttcggaattatataaagtgattctttctttcttcttgacagaacgtgaaattgtttttacagtattccaatatttgaggttaatgtttgtataaaaatggtataactagcaaatatcggattggaaagagtttcaaacgcttctgataacggcggcctgaatttgaagatcttcgattagagccttggtggtcttgacggtggccctacggatgtaccaagaaagtggtggcaggttaagataagaagaaggctgaaaatactggtccaatgtcactctcgagccaatcaatccttttccaccggtacattgtctatattcttctcgattctttgggagcctcggcttgcaaaagcgcatgttatctacgtaccatggctctatttgccacttaccatagaacgttttcatgaacatcacgttctttttaggaatcatatatagtgtctgtccacagtaagcaacataaacaaaattaaaaaaaaaattatacttgatatgcgcataaatatctttagaaacttttatttttgtggtatatatagagaaaaattcttacgctgaaatctttccggctctcattgaaagttagatgtaccgggatagatccagaccaccaaaggaacctccagggagcagctttttccaccctcacgtgcttctctgtcggtccaagatcgctaaaaactttacttgatacgtgttccttcataagaaatatcacattcgcaagtacggctattattagttcgcaaatcaaacaatacaataataggaagtaagaaataaataccagagtttggcgctttttcatcattgtgaagtatgatgggttctcataagtagtgagtatatcgaagactgcttcaggaggtaatcctattgtaaatttcatgttcaaatggtaaagatccttttcgtttgtcaccttcaaacataaaagatataagaaatttgtttagaatttatttttttatctagttccaccaattttgacaggaagttcccatagttttcatttcatgtaactataatcaatattaagaaatcaattcgtttattttaaggattcccgtagaccacctaaccaaaaaaaaaaaaaaagaaatctcatagaccatagtaatcaactaatcataatcatcagcattttaggtattttcaaaaatctatatcattttatttgcagcttctagaaatttacacaaacaaatgattagatcactcatcatcgtgcttgtattttaagtcgtcaacgtaacgggctttcacaataaactaggatttaacccgcggtttaccgcgggcaatcggtttatttggttcttatactaaatatttgaatgaatttgatatcttaaatttataaatataaactttttaatcaaacataactaaataataattgggatttttttggttgttatttagtgataagagaaatgtgttaaaatgtgtttaaaaatgtgtatgtaattttagtgaaagtaaaatatttacaaaaatgtaagattcacaaaattggtataaaattgtttatgattataagtgtttttttaactatttgacaggttatacacttttttggcaaaataaagactatattaattatgttatttataattatatgtctttaaagtaaagataaaaaaataacattatttcacttatttttgttgaacggtttagattgaagggaattaattttattgaacggtttagattcaatcagatcatataaagtttagaagattgttaagaccaaattacccttaatgattttgaataccacagaacaaaatccaaaattaaaatcaaaattgaggccaaattagacaaaatttcaatttgtacttcccttttaataataaggggataattgactctcttaacaacaaaaaaataaaagaaattattctgaatcaaagattttattgtcatggtagtaagaaataaacgttcagatggaggcttctttatttttttctatttattatatatttatattgtgtcttgtgtttattgctgttagtacaaaattaacggcatttccaattatgttaacgtctgtaaaatcgagaatgtaagttacaagcactatgatgagtctgaaaaacgcatgtgttcttataaaataaaaagtaaaaattaatattatgcatttcacaataatatggccacaccacatgtttttcatggatcaaccgtaacgccaggttaagaaatgagaatttctcgttggtttgtgatcttaccttaactttaggaggataatcataccatggagatttcttatctgaagctctccaaagttttaattgcttctttaattcttctctgttctctggataagtctcagacactgacttagttttaacattcctagatctcttggactcgacctacaacaacaaatagaaacataactttaaatattgatttgtcctcctagggtcctctggttgatggaaataaaactgacctctggaggctgttgtgtgttctgattgatcaagccagggaatatacccatttctctctgaaaatgtagtctacaaatgatgcttacctgataaaaacaagagcaaacgaataaccaaagcttgtatatgtgaggaatattgtaatataaagttgttatagattgagataatgtactagctgaggaggtaatggtggaggagtagtgtacgtatacagcgaaacaagaagtgagcagcatgattttagtgagttcttgacgtcgagctaagacctacctaaagaaagaggagaataaaggtattacctcgtgagcagtctgctgttctaacttgtaaaatcataaaacttttcccatttttcacagcacgaaacaaaaatcccttgatcgatttgacagattttaacagaaaatttctctgttttcatcagtaaagtttgtctattagttttgcatgtagagctccgaccaaaatactactgtgagttgatgttttaaagtcaaaaccctttatctaattcgatggtaagcacttacgaacatgtaatttcggaatcaatatttgatgtaaaataacatgacataatataatgttgttgacaaaaatatatatatgtatacagtcgctattacagaatgaatgtagagctaagaattacaaataataatattaaccaatagaatcggttattgtattgttgtttggtacaatgtaaaccggttactaaaccggaatactctactatataaagagtgtttcatgtaacagaacaatttaagaagaataacaaacttttttcatcttcttcatttcttctgaattc

SEQ ID NO: 54 - DNA, 99923 bp, Arabidopsis thaliana
gaattctgtcttgctttaccagagtttgccttgcctgaatctggagtgttgtaactcgctgatgacttctctgatgcactgtgggatcacgaaagatatcatcgagatgtttggtttgatgattgatgaaggaactggaatcgacgaagttactctttctactgtcctcaaggctttatcactctctttaccagaaagtttacatagctgcacgcttgtacattgctgtgccatcaaatctggttatgcagctgatgttgcagtctcgtgctctcttattgatgcgtatacaaagagtggtcagaatgaagtatctcggaaggtgtttgatgagcttgatacacctaacatcttctgcttgacttcgatcatcaatggctatgctagaaatggcatgggaacagactgtgttaaaatgctgagagagatggatcgaatgaatctcataccagacgaagttacaatattgtctgtactatcagggtgcagtcattctgggcttgttgaagaaggcgagctgatttttgactcattggaatcgaagtacggaatttcgccaggaaggaaactctatgcatgcatggtggatttgctagggcgtgctggtttggtggaaaaagctgaaaggctgcttcttcaggcacgaggagatgcagactgcgttgcatggagctcattactgcagagctgcaggatccatagaaacgaaacaataggaagaagagcagcggaagtcttgatgaatcttgaacctgagaatttcgctgtttacattcaggtttcaaaattttactttgagatcggtgattttgaaatctccagacaaatcagagagatcgctgcttcacgagagctcatgagggagattggttacagttcagtcgttgtgaaaaactaagaaggcaacatttgcaggacagtgtttttgcttcagcttcatgaaaaagaaaagcgaatccaattgcaaagttcacttcttttttctacatatctgaaatgggttctttcgcttgaagccagaccacatgattgacactctacagagacaacacaagaggaatatgagattctttatttgtcaggttggtgcaacaaactcattgacctcttctattttatgtcttttaatatactaatagaatatagaatgtctgttcgtcgttattcaacaccgcatcatgtctaaaattctaaaaatagcatcttgaggtagaaaagctgagagattttctgggacttctttcttttttttttttttttttttttaatttcaaatctcatgggacatcattttgatcatgaacaagttgaccacaaaggttttgtgtagaggttttggagtaaagcaaagaagtgaaaaagcacatgacttgtgctttaagcatagatgtatagaaaaacaaggccttatcttcatgtacttttaagccaagccaataaaccccacaaaccccattaattactctgcatataaattcaacccgaaaccaatcatctctaccaaagaaataaggaatctcattagtaggcactggatttaataatcaacaggaatcttctcttggcgttttgattgaagcatatgatggataagctcttcattctttctcttctaggtctgttattggtaactgcttatggagctgcagggaagatggtgtacacagatcttgacattcttgacgagcttgagaactttgatgtactggtagatgatgatgatgatacaaagctcttggattggccatcattcacaagccggcattctggtaaaaatctggtgaatgttgatacattcggtgcagctggagatggagtttctgatgatactcaggtttgcttattccataaaaatgacaggttatctagatacctaaaacgctatcagttctatgtctggaatgaaacaaatccccaaacttgaaatcatggggaaaatttctaaacaaattgtttgcattgtagacttggcctatagatatttacggaggtctagttagatatttttctgcatctgatctgtgcaatgctcttcccaaatcaggcattcgtaagcgcatggagcaaagcctgcagtacatcaaaatctgtgtttctggttccagaaggacgtcgatatttagtaaacgcaacaaagttcaatggtccatgtgaacaaaagttgatcattcaggtcaagttatcttcagtaggaaaacagaaactagaccataactatatatacaagtatgtcttatacaattcagaaacttgtctttgtttacagattgacggaacaatagtggcaccagatgagcccagcaattgggactcaaagttccagagaatttggctcgagttttcaaagctcaaaggggtcgtgtttcaagggaaaggagttatagatggttcaggcagcaaatggtgggctgcttcttgcaagaaaaacaagtctaatgtaaaatcttctatacccaaatctatctttctttatcacaaaagataagtgcctcgagttttcgaatagaatcttacacatctttcttgctcttttacagccttgcaaaagcgcaccaactgtaagaaaccattaccttcatcatttaccagttattattccttacaaatggctgcttatttggtttcgttcaacaatctgtttttgttttcccctgcaggcactaactatagaatctagttcaggtgtgaaagtaagtggcttgacaatccagaacagccagcagatgaatttcatcatagcaaggtcagattcagttcgagtctccaaggttatggtctcttctccaggagatagtcccaacactgatggaatccatatcactggatctaccaatgttatccttcaagactgtaaaatcggcacaggttttttttcttttgaccaaacctttatgcaaatgaaacattttacacttcgactacggttgtaataatcccttaagactggattaaacaggggatgattgtgtctcgattgtgaatgccagctcgaatataaagatgaagaacatctattgtggacctggacatggaatcaggtacatcatcaaatttctagattacatctgttccaaatcaaattataattagttggaatttcttgcagtattggaagtcttgggaaggataatacgacaggcattgtaacacaagttgtgttggacactgccttattgagagaaacaactaatggactcagaataaaaacatatcaggtacacaaaaaaaaaaaagcttcactatttagtaaaaacttcgatttggctagatccacaacaattttatttcattgtttctcattcgaacagggaggttctggttacgttcagggtattcgattcacaaacgtagagatgcaagacgtcgcaaacccgatactcattgatcagttctactgtgattctccaactacatgtcaaaaccaggtttccttataatacaacctcgtgattgagattattcaatcaaaatgaaactcaaagatgaaaactcagatatgtttttgttcttttttttggtataaatgcagacctcggcggttaaaatcagccagataatgtaccggaacataaccgggacaaccaaaagtgcgaaagccatcaaatttgcgtgcagcgacacagtcccttgcagccacatagtcctcaacaatgtgaatcttgaaggcaacgacggtcaagtcgaagcttactgtaattcagccgaaggttttgggtatggagtgattcatccatcagcggactgtctctactcgcacgacgacaagggcttggaccagactcacaagtcggaggaagccgagactggccacgacgagctttgatggtgatgttcaaactgttgttgtagtgagagatgatatgtaatatagttttctgaagcatatgatacagtaaaaaatgatattgtttttgtgtttataatcaaccatagttaaggttgttgttaacagcatttgtccaccttttacatcaaatgattttttttttcttttcatagaaagtcatatgcttcatctattgagcaatggccatcactttgaaaacttacgcttataccataaaccgggttctatacgtaaccaaatttcaatttctgatgggttaataataaaccgggtttataaattgggttatgattacacagtataccagaagctaacaaaaagctcaacgattcgtctcaaagtttcacactttcgtgaaattcttgttctcgaatctcgtttcatttgatacatttgaagaaatcggcaatgacgtcgccgtcatcgtctttctggaacacagcttcacgagaagccatgaaaagcggcatgtttgtcgcgaaagtctactgctttcttcatgtaacaacaaactatctcggattcatggcttatgtgagtcaatcgaaatctctcttcttttttccgttaatcgagaattatccataaagatgatgtctttatgagcaggcttatggtccgagcatgattccgacgcttcatccttcgggaaatatgttattagctgagagaatctcgaagcggtatcagaaaccgagtcgtggagatatagttgtgatacgatctccagagaaccctaataagactccgattaagagagttgttggtgttgaaggtgattgtataagctttgtgattgatccagtgaagagtgatgaatctcaaaccattgtggtatgttttgttacttaaccttccttgttgacttcacttcactttggttttgcttatgaatcagattttgaatgtagtaatttagagtagtactgagtttgaagaaagtagatacattgttgagaaattgagtgatcagagttgaaacaagttgttaatcagtattgagctcgatttagcttattgcaattcatggaattttttgaatctttagcaatgtttagtgttattggtgtacattacaatttactttagattgtttagtttcgattcgatattataagttgttaagtttgttggattaatggcgaattgatctttccacgttctattggttttaggttcctaaaggacatgtctttgttcaaggtgactatactcataactcgagagactcaagaaactttggtcctgtaccttatggtcttattcaaggcagagtgctatggagggtataagctttttgtcattaacatacaaatatagtcggattaactaatttcggaacttctaatgcgttatttgcatttgtgttgatctatatggctaatcttggatatgtataatgatgtgtaggtttggccatttcaagattttggaccacttggaccaaccccaacttagcatatgagttagcttggtcattaggccgatgagatcaccgaggcatattggtagtgtggttaatcgctgttgccgagtgagtctggctcttgattgactatgagatgcaggatcatcataccatccacaaagatgggagaatctaaacgctcaggaaaagtgagtatatggtttagactttagagcaagtaacattatgtattttggtctgtcactctatctgagagtggcctctgtatcaaaaagttaaaacaaagatctattgtggacctggacatggaatcggtatatcatcaaattcctagataatatccttttcaaaccaaattataattctctttttgcaaaatctttggaatgatcgcagcattgaaagtcttgggaaggataacacgacaggcattgtaacacaagttgtcttggacactgcgttgttgagagagacaactaatggactcagaatcaaaacataccaggtaaacaactaaaagcttgatcaaatctttaataaaacttcgatttggtttgatccgcatcaattttttctcttacgagcagggaggttctggttacgttcagggtattcgattcacaaacgtagagatgcaagatgttgcaaaccctatactcatcgatcagttctactgtgattcttcaactacatgttaaaaccaggtttccttataatatacaatacaaacttgtaattgtgattcttatatcgaaccaatactcagttatgttctcttcccttttttggtataaatgcagacctccgcggttaaaatcagccatataatgtaccggaacataaccaaaagtgcgaaagccatcaaatttgcgtgcagcgacacagtcccttgcagccacattgtcctcaacaatgtgaatcttgaaggcaaagacggtcaagtcgaagcgtactgtaattcagctgaaggatttgggtatggagtctactcgcacaacgacaaaggcttggaccagactcacaagtcagaggaagccgagactggccacgatgagctttgatggtgatgttcaaagtgttgttgtagtgagggatgataggtaaaatagtttaatgaagcatatggtacagtaaaatgatcttatgtttgtgttcataatcaaccataactaaggttgttgttaacagcatttgtccaccttttgtatcaaatatttttctttccccatacaaattcatgtgcaagtattttttcaacataaatttttgaacttggaagtttattgtttatgaaactgaaatacgtattgatatcggaaactaagttatatagtagatgtttagataagttagttaattgtcttagactttgggattagaggaacaagaacaacacatcacatggggactccaaaggtcgcaattgatatgaattgtttgatatgtctgtcacgtgtgaaaaactcttcctttcttcacaattatcattttctatatatatatatatatatatttgtcaaacaattattttctaattaatattcccaatttgtgtgtagctgtaaacatcaatgaccaatgccaacccattttatttactctttcaataacaactcaacaactacatcacctaagaataagatatagtcttggcttgcaatttgcctgtaatgtgaaatcaaatgatcgattatatggtataataatataatgataacatattaattccctcatatggtatgaatagtgaattggttttgtctatatccataagaatgaaaataaagaaataatttccttaaaacaaagaaataaccaaactatatgctataatggacccggagaatctaagtcgtgcgagaataatgattttgtttaccattaaaaacaaataattgttcatgctcattccatttccaaattattctgaacaaacaagatagagagagtgcaagttgtaagaagcagattttttttggtttttctctaaaaccaaactaaggagatctctaagttgtggcagagaagaaagcttctaaggtaaaatcacaaactctccactttttccaatatcttattgactcatattgcatttgctttcaagttctgataaatctctaaaaggtttatgacttttagaattactctttttgatatttaaacacattgttcatatgactatgcagatccagatcattgttttttttccagcttttgaaactaaacattcacaaatccaaccctacatcatattccttgtgacaacattgttgtttttttgttgtctatatgtttttcaagtaatacaagtatagaaaaagctttatctacaatattttcatcctgaaaagaagccaaaagcaaatttgttacaacattcttgataaaataacacgtcattagagaattaacaaagttttgaagcagagggaggaatgttcaatactagaaaattaagaccaaaaagtcaacatcacttttataagagaaaaaaacgagtacaactgtaacatttacttcgactttatctacgagagtattgaacaagtgggatgcaattgacaacctaaatcatggctcatagttacaaattatatatgactaatcattttccttttctcttaaagttgtttatagtttagacaataataataggagatgaagagaatgtgatgctactaactcttatttaaatgaggaatataaacaagatctggtcctgacattgttatgaatcttcaaactcaggacacaaaccaagatctcgtgtagaggaaaaaaaacctttcctccatgtttaagttttgagcttctggttggtttcaagtcctgtggagaaaaatgtcaccatttttgaagttctttctctttctctatgattatctttcaccttcctctttctttctggtaaatcatttcatctctctctgttttacatactcttgatgattcttgatttcacaatttatttaatcctttttttttcttggttttgtggggtttaaggtccaaagaaataccttaggagcatcattagatactacagatggggttgtgagaagtggcataattggagagattatatacatttggaagcagacaagaatctttgtctttataccaatcttgaaatgcttagtgacaatatgtttggtaatgtcccttttgttgttcatagaaagagtttatatgagcatagtagtagtgtttgtgaaattacttagacgaacacctgagaaagtacacaagtgggaacctataaacgatgatgaccttgagcttgccaatacaaactacccaatggttctcattcagatcccaatgtacaatgaaaaagaggtaattatgattttgttgtaaccaagattttttttaatgaatatacatatattatacaatactaatgaaggaatcaaattcttgttgttgtcacaggtttgtcagttatctataggagcagcctgtagactttcttggccattggatcgaatgatagttcaagtacttgatgattccacagatccagctagtaaggtcctttgttcaatttttttccccccaaaaatctttggtttatatgtatgattggttcctcaactatatatggaacgtttttgacatatgaaatgatttggaaaagacaggaattggtgaatgcggaatgtgataaatgggcgaggaaaggtataaacataatgtcagagattagagacaacagaattggatacaaagcaggagcattaaaggcaggaatgatgcacaactatgtgaaacaatgcgaattcgtcgccattttcgatgctgattttcagcctgatcctgactttcttgaacgaaccattccttttcttattcacaaccatgaaatctctcttgttcaatgccgttggaagtttggtaaagtcatatcttttttgaaaaataatagttattattttgttaagtcaaattggctaatggagagaatgtgttacatgtagtgaatgcaaacgagtgcttaatgacaagaatgcaagagatgtcactaaactaccattttgtggctgagcaagaatctggatcttcaatacatgctttctttggattcaatggaaccgcgggtgtatggagaatcgcagctttaaacgaagctggaggatggaaagatcgaacaaccgtagaagatatggatttagcagtaagagcttgtcttcatggttggaaatttgtctatgtccatgacgtcgaggtactactactataacccttttaaactcaagcaaaacataacaagatttcattcaagacattattaagtaatctaacatttcaggtgaaaaatgaattgccaagtacattcaaagcatacaggtttcagcaacatagatggtcttgtggaccagctaatctatggaggaagatgacaatggaaatcttacagaacaagaaagtgtcggcctggaagaaattgtatctcatatacaatttcttcttcataaggaagattgtagtacacatcttcacatttgtcttctactgtctgatattaccaacaactgtgctattccctgagctccaagttcctaaatgggcaactgtttattttcctactacaatcactatccttaacgcaatcgctacacctcggtaacaacatctctactgttcaagtaaaactctgttttctcatttcctagtatgataaaaagtttgacatatattgtctactgcagatcactccatcttcttgtcttttggatcttattcgagaatgtaatgtcgatgcatcgcacaaaagcgacattcatcgggttactagaggcaggacgggttaacgaatgggttgttactgaaaaattaggtgacactctcaagtctaagttaataggtaaagctacaactaagctttataccagatttggacaaaggtactcttaacttaaaaacacacacacaattacaatttttaagcattttgaaatgttgtaactaattttagttaacattttgcagactcaactggagagaactcgttgttggattatatatattcttctgcggatgttacgatttcgcatatggaggatcatacttttatgtttatctgtttttacagtcttgtgcattttttgttgctggagttggttatattggcacatttgttccaactgtttagattagacttttgtatttgagagcaaatgtgtttttgctatttgattagaccaaattagagattggatcttggttacttaaaccaagttaactcttccaatattcatactcaaaatgtaattttttaaatggtgttatgatcttaaaatttggttatcgatcatattcatacgtaacattttatgaatttgtatttgccaattgtgttctagaaagaaaattgagagaaacatacaaaaaaaacaagtcaacgtcaatgatttaagatgttgaaaatgacatggcggttttggattggttagatgcaatccacggccaatgacccatcacgcatgtaaaccgcgtaagcacaaggcccctccacgaaaacattcgtcgaggggtattctaggtattaccggtgataatttatgtgaattgacgtttttatcctttgcctctataaagatcttcttccgtttttgcaattacggcgtcgcgcatttagcgttgttttgaagctctctctttcaaattctgttcgtctctcgcgatctctctctctctctcagatagctccgaaactttcacgcagaggtattattgatctagatctgagctaaggcattctcaattttgattgtttcagtgtgttcttaggttgggaattgaatattcttgcttcgatttaggatttttcttatgatgatccgttgtatctttgggtaatgctttggatttcgatgtttttggttgaaaattctgatttcgatctgctgctgcatcgtttcaagtctggatctatgaacattatcttcgatttcacctttttctcgttgtaattgcttcaattagattctgaattccgcaagatctatacgatgaggttttgtaaacgttgttgcatctgtttcgatctgcgttattctaatgatttatagtcaacatttggagttctcgctggtgatctctctttatgtgatattgatactctgtttctgtgtgttagttaagtgaagcaggatgggattgtcattcgccaagctttttagcaggctttttgccaagaaggagatgagaattctgatggttggtcttgatgctgctggtaagaccaccattttgtacaagctcaagctcggagagattgtaaccaccattcccactattggtaagcttaaacatcatttcataattcagtgtttcaaaagcttagttccatcaactttgttcataccattcatacaaaattttgtcttccacctgccgtgatgattaaactactacaaactgtggacagggttcaatgtggagactgtggagtacaagaacatcagtttcacagtgtgggatgtcggcggtcaggataaggtataagattatccaactctaaagcattaagaattcttttttttttgcatcactacctggggatctttttcctactgtgtcttggtattattgttgatgaacatagaattacacaaactcacatgtcgcaaaacctccacttcttgttgtcagatccgtcccttgtggaggcattacttccagaacacccaaggtcttatctttgtggtggacagcaatgacagagaccgtgttgttgaggctagagatgaattgcaccgaatgttgaatgaggtctgtatcaagtgttatatctttgcctgttgtattgaattcttcatgtttagatgattcagtaaactgtttgtcggggttttacaggacgagctgcgtgatgctgttctgctcgtatttgctaacaagcaggatctcccaaatgctatgaatgcagctgagatcacggataagcttggtctccactctctccgtcagcgtcactggtaaataaaaacattataatctcccctgcttccctcatgttgatttgttctcctgcacataacgtttcttatgatatagttccaaagatttatcacctctctgattgattttatgtctacgaactctctccaggtacatccagagcacatgtgccacttcaggcgaggggctttacgaaggtcttgactggttgtccaacaacattgccggcaaggtaaattatcacaaacaacaattttgatttgtggatcagtattttgaagcaaatcgtgattcttgtttctgtgttcttgttactggttgtgcaggcgtagagggaaagttcgtggtggagttgatttgctgagcaaatctggatgcaggggcaaacattatctgaattttttttttggtttccgttttcgttattgttctgcttttttttttgggatatgtcgatggattttgtgattgtacgtagaacttagaaaaaaactaccttttatatagttttggtaaaactgtaatcgaagatttcacctactgctttcgtggttttggtcacattttacttgtgcactttgattcatatgttggaatgcggtttcgttggcacctgctacacgaaacttgatgattttgctagtatttgtcatatgaatcaagtagaggaaagccatgaccagtaggcgaaatgctagagtgtggcagaagaggaatgagtagacaatttaatcataaatccacttgtttgaaaaaaaagttaacattcaaaattctttgctggcatcctctaatccctttaatatttccaaattctcgcactttttgaacaccacattcatttttgtcagaatattgcgttcttaatttgtctagaataagcacactaaaactaataattatcttaacaaccatggaataacataaattatctgtttttctttataatatttttgtagaattgtaggttaatgaaatgtataaattgtgattctaagagtatatatgaatagtacaattgtacggttggaactattttgcggattactgttcaaaattaatgtgtttaaaggtcactgatttactttcttattctgccagccattaagggaacgttaatcatcattttgactagagtgatagttgcaaggacgatattaaatacagtatttgataagcaattaaggaaaataaaagaaacagaaacagaaacagaagatttgagtttattgaagaaggaatttagagtgattggagttttaataagttttgagatgattttggtgaattttggtgaattaggaaatttgtcactaaaatttcctcaaatctcacctaaaaccatgagatttatatgtttgaattttaaactaagaaaattccctataatctcacctaaagtcactcaaatcacttcaaattatcaaagattaattcattggatttgatttgttttccaaaattaaacaagataccaattattaaaaaataaagatcccgttgattttggatgtacaacttttccgaactagtcgtatataaatactagcttctttgacgtcgactatagcagcttttcatttgatatacaaatattcatcaatatatacatagacaccaaaaaacatgaatttttctttactttctacaatgctaatggcattgtcttctgtttgcttgttttttgttggttatgcgcagcaattttcaggaagtgtagcagtttcagcacttttcgctttcggagactcgatactcgataccggcaataacaacaatctaaacactctttccaaatgcaatttctttccgtatggtagaaattttataggcggaaaagctactggaagatttggaaatggaagagttttctcggatatgattggtatatctatcaacgttaacatctactatatctttatacacctcgacacaactatataatgttactgatttacctaatatttatgatttgatattagtcttttttgtgcagccgaaggtttgaatgtaaaaaaactcttacccgcttaccgcgatcccaacctttcgaagaatgatcttccaaccggtgtttgttttgcatccggtggatctggacttgatgaacgcactgccagatcacaagtaaaaattacttgtgttgcttagagtttacattgtaatcattcttgattatcttttataatatgttctcttgttgatgtatagggagttatatgggtgcctgatcaggtgaaagatttcaaagaatatatcatgaaactaaacggcgtcgtacgagataaaagaaaagtaaacgcgattatatcaaacgctgtttatctaatctcagctggaaataacgatcttgcaatcacctatcctactctaatggcacaatatactgtttcaacctacactgatcttttggtcacttggactgataatcttttaaaggtacactattttaaaatatttgtgataaaacataattgtatgattggtctttttcgaaatctattaattttgttttttggttatttgaagagtctatatgcaatgggtgcaagaaagtttgcggttcttggaacacttccgttaggttgcttgccaggagcaagacatacaggtggaaattttgggaatatatgcttagtccctataaatcaagtggctgctatattcaaccaaaaattatctgcaaaacttaacaatcttcacacaatacttcccggcgccaaatttgtctatgtagacatgtataatcctctccttaatctcatcaacaatcctcgggcttcaggtaatggcctaacttaatgaaaaattagatatatacgtcaaaaatataatatgttattcttcttcgttgatggctattatagggttcattgatgtggctgatggatgttgttgtatgccgacatcgccggttccgtgccctgatgcatctcagtatgtgttttgggattttgcccacccgagcgagaagtcatatatgacgattgcgccaaagattatagaaggaatcaagaagaatcttgcatgatcgtttcctctatgttttaacttcgttagacatattttacacaatgttctattttcattttttgttttgttttaaatgttctgttttcatatttattaagaaaaagtattaaaacaaaaaaaaagtgtataccacacaccatatgcaaatatatgatattaaaaaatatgaaaagacacaaattgactatgtataatcgtctaattaagaactattggttagaaacattttctatacatttaatttgatgttataaagtgaccataagaacatacacttctaaagtcatatgtaatattctgctatttaaatttataaaaagtgattttataactttatttgatgttctatcaatttgtagcggatttgggacgtttcaaatacctcggatcatggcacttgtaatttgaagatcttcgatcagagttttcatggtcttgatggttatccgacgaacgtaccaagaaatcggtggcagattaaaaataaaagaaggcttaaacatctggtccaatgtcactttcgacccaatccttccttgtccgcggctacatctttcgtattcttctgtactcttcggcttcttttgtttgcacaagcgttctgaatctacgtatagcggctccactttatactgacaaacatgtttatgaacatcttattctttaccgtatattgtacctgtcaaaaataagcaagagaaacccaaattaaatcttttccaagattgaaaaaaatggattgattctcatgagggaagtttttacggtaaggacttgtcggtgttcgataaaatttgcaattatcgggatagttccagataaccaaaggaagttccaggccacagctttcttggtgtccacaagctgccctttcccggtatccggcgacacaacttttcttgatatgttttcctttcataagaagaaaactatgacacactctcaaatcttgttatcattattttatttgaatcaatgaaatgataagttaaaagaagaaaccaaaagttggcgtcctttgatgattctgaagtatggttggttgtctggattagttaaaacgttgtaagctgcttgaggaggcaatcctaatgtaaattgcatttctatagttgacataccccattctagatcatttcttctttccaccttcaaacattacaaaagaaaagatctttattcttaattctatataccattttgaaaggcaaagaatcaaaaatattgtctttgttagctgatttttatttattttaactgatttggtctttaccttcacattaggaggagcatcattccattgttccttcttctctgtatctctccaaagttttaattgctgtttcatttcatctctcgcctcatgagtgtttgtctctgactttgacttaaatttcgcattctcagatctctcggactctgcctacaacaacaaacataatcattatctattgattgtttatttgttttgagttctcgggttgtataattgatggaaatgaaactgaccttgtgaggaagctgttgagtgttttgattgatccagctaccaaatccaggaaatacacccatgttctctcttaaactttagtccacaaagagaaaatgacgatccaaagatagatggatggatgtatgtagagacaaacagagagttgacttacagaggaaaagaagtcaacggcacaatttaaggtttcagggaccttagataaaaaagatggattcagatttagacaaaaatgtaatatgaaattgagagaataccgaaggtggattgtaccatacgttaccataaaaaaaaaggagaaacagggcagctcatgtctcgtgacttctttcttgtcgtacaagcgacaggtacatgaggaatgtttctgctgtgtcctacgtgaaatccgagttcatgaacttatatccgtaattacaagaagaatgaaaagtatgtatagtccacgtgaattttcccaaactatttttgactggtgttaaaaaatatgttcattgaccttttaatatcatatgagagaaaattgcaaaactcaaatccaaaatgtagcagtttcataaataattgtgagggtttctaaaaaaacgtttgattaaaatttgagtataacagatttaaaaatgtttgcgaatcacgtttactttacacatatgtttgcgaattaatagctttaggtgttttttacttttcatttttagaatatgcttaattaccagttcaaatttaatcagatttttttagttgaaacgactataggtttagatttttattttgcagatgtcccttcaaaagatgctaaaataatacagtttttttttcccaatatttacttgttaatattaacatttaacacgatactcattttttttattcggtataaagaatacacttgttaagatgaatgaagtgattataaagattagtatttgtcctcttcggatttatactatagtgatttagaaacctatcgaatgtttgagggcatttcaaacgcctcggagcttggcgcccatatcttgaagatcttgtatcagagccttagtaatcttgatggtgatatcacggatgtaccaagaaagcggtggcagattaaaaggaaaagaaggctgaaaggtctggttcattttcaccttcgacgcaatctttccttgtccaccactacatttatggtattcttctcgactttttggcttcatttgcttgcacaaacgttttgaatctacgtatattggctccactttccaactaccctcaaaacttttcatgaacatcattttccttttcatatatactgcctacgacaacaagcacgagattaatttttccaataattaataatgaacaaaaagattgattatattctcttgatagatagaaataagttccttacagaaagattcttacggttttcgacgaaatctagacttatcgggatagttcccgaccatgaaagaaacttccaggccacagctttctctgcctccaccgtctggctcgatccattatccgtcaacacatttcttgatacgttatccttcgtaagaaaaaaatatcacattctcaaaaattgttaatataataatactcttatactcatttgaatcatacaatgataagaacataaaagaaaaaccagaagttcgtggcgttggttaattattcttgagtatgattggttgtcgggattagtcaaaacgtcgtaggctgcttgaggaggcaatcctaatgtaaataccatgtccacatggcaaagaccatcttctgtttccaccttcaccttagcagggacatcttcccattgttctttcttctctgcatgtctccaaagttttagttgctccttcatctcatttctctcttcgtgatcagtattttttatttctgaccttgacttagatttcacattctcagcctacaacaacaaacatatataattatgcattatctaataatctctaaaattgaccgatattgtattcgtacttatatttaacttcctagagttctcatattgatggaaatgaaactgaccttaggaggctcttgagtgttatggttgatcaagccaccaaatccaggaaatatacccattccactcttaaaatttagtcgatagagagaaaatgacgatccaaagagagtgtccgagagaaagatgatatagagacaaagagatagttgacttaaggagggaaatatgccaaaagacaaagagatggtttcagggaccgtagataaaagttggattaagatttagacaaaatatagtaagaaactgaaataataagcgaaggtgaagtgtgtagggtacgtttacttacggcagagaaaaaaaaaactaggaagctcaattcttgtgacttctttcttgacgtacaagcaagagctacatgaggaatgttaatggacctataagcccactaggattagtgagggaatgaaagattttcttaaaagaaaaaaaatcctttgcggctagcgttgatatagatactgtagatagaaggcacaatttagtgaagggaaaaaaaagataaatcaaaatcaaccacaggtaacattcaactatttaaagagacacagtttagtgaaagaaaacaaaaatggcatgaaaagaacacaaaaatgtgcgttactatttactaatccctatccctacgttgtttaaaactttaaaccaatttttttattttttgtcaatgaactttaaaccatataattagaacgtattgtgtgtaaaacagtgagtaatgggaatataaaggagtcaatgattggtaaagcccactccataaatcttttgaattttattgggaaagagtaaattgtacaaaatcccactttattccagatttttgttccaaagttcaactctcttccttgcacttacacatcacaaagaatatctttagtgttctttctttataaaaagaaaagaaagaaaaacaacaaagaatgttctctcaattttaaaaatcttggtttcagacgcattagtcttttattccttgcattacctgtcgcttttgtatgatacaatattaaatagtaacttcttcaaaccaaaaattctactaataatgcattacccctaatctcacatggaatgaagcatattcacatttcttgtttcacaagtaccttctgagtaaccctccttgatctctactcaaggaactccacaaaaattaaaatctcacaactccaacatcttcttataacacgtcttgatttatctttaagaaccaaacaaaaaaccaaaacctagaagagaaaatgggagatcaaggagtacaacaaatgcaacagcctattgttgtgtatccaaacgcttacaataaacagtatccagacccttctacaaaaccttcttcttcctctggctcaagcggaaactttgggacggtcttcatagtcctagccgtgatctttgtcttgtcggctcttgcttgtgtctttggaaggctatgtaaccgtgaaagccgcgcggctaagcagcaacatagcaagcatccgaagcatgagaaagcttcttccaagaagagccgtgagattcggcctgtggagcgtgagccgagggagagaggtgatatggattttggtttcgatatgaaacggcctgaaccaattgagaaaccttctggaagagacggaggagaggacatagaattcgggtttgataacaagagaggtgaaagaggccgcgaaggcggaggcggaggaggaccacctccaccgaatatcaaacatgcagtgaggttcaagctaccggaaaatggagatcatcattctaaaggagagatcagacgtggaggtccttccttcgagttccgaccaggacactaatgatcttaatttgtttaagaacaaatcacttgatatgtctttattacttcctcactttcatttcttttgtgctttttttcttttctggttgattcttcttatgggtatggaacttagtgctgaagctatcaaacttcttattagtctcttggtgtgatgtataaagtcgtctctctacatatcaaaggtactaaataaaatccataatatttctgagtatattttgtaagaatcatggttaaagaatcaacaaatttataagaagaacgttttttatcagaatacagagttcttcactatcctcttcactcaaacaaaaattaagaacacagaacggagatacaaataactctttcacaacttatctaggttctatttctttcttttttctgagggaacttcgccattagagggcaaaaactaaaggcacctaccaataaatgtaatatacgaaaagaatggctttagaacgaggaggcagaggtatctgttactttcacctattgtatgatcagaaccgtcggttgttgaaaggccgagtctcagattcattccctgagaaatctgaagagcttttggcagagtagtttccactgtacaatcctgactctacgctgttatcaccaccaaacgccattttcctgaatttcataatgtcttcattgtattgccctgagtcataagttgtgctttgcccaattttgattccgttgctaatatctcccgagtctccgtcgcagtccaatgctctcacaaccttatttcgaagagtagataagttttcagatgtgagaaatcacttgttactatatatgggagctttggacttttggttagtcagaattacctgaaccatgcgtgggcgttttggaccagaatgtctaacacatgcagcggctgtctcgatcattctgaagacttcatgctccacataacgcttttcaagccgtgtatcaatcagttcgcttaaatctccggtctcaatggctttgagaagcagcgggcgcgcctgtgagttcatttataagtactatataagtatactagggccaatcttactattattgaagaatgtttgaaagttggattcttacccattcaaccaaactctcttctcctagaggctgagtctggtcaactggtttccgtccagttacaagctctaagagaacaaccccgaatgagaatacatcggatctatcagtcaattttccacttgatgcatattccggcgctaggtaccttaacacaaaacatgtcatgcagccatacgatcaataaagattcaggtttgatccaatttgttgcctcaagccatatataacaaacttttcatcaggcattggatcaataaggtccagttttggagtagagtttgtgatgaatgtttgcttacccgaaggttcccataacccgagttgaaacatgagtttgtgttgtatcattgagtctagcaagtccaaaatcagcaacctaaacatccaaaaaacagaacaagtctcattaactaaaactttacagtcataagatagatttaacgaaaaggaggatttcattattgcctgagcttcatattcatcatctagaagaatatttgctgactttatatctctgtgaatgattttcggatgacctgtaaaataaaacaaggatatgatttttggcttctgtttaaactatgaagtgcataaccaaagcacacaactaagaaaatgtgaaggcattacttacagtcttcgtgaagatatgccaaccctttggctgatcctatagcgatccggactctcttagaccactctaaaactggcaaaccctttcctaaagcgtaaagcgagtcagtctaacacgtaaagctaaaaaaaagtcttatctataacgaaaatggtaacaagtcactcaccatgcaaatgatgctccaaggtttgattagaaacatactcatagataagcaatctatgctggtctgaaatgcagtaaccaaccagagagaccaaatggcgatgatgaacgcggctgatgatctcaacctctgctttgaattcacggtcaccttgtccacttccagctttaagctgcttaaccgcaacaactttaccatcctgcaatgtacctttatagacacatccaaatccgccttctccaagaatgtttttgcgagcaaagccttgtgttatctcagcaagctcttcgtaactgaaatgagtctggccacttccgagtatagcagagtcaggtgtgccacttgattgcatttgatgatgaggataaccaccaccagctgtaccataactgtttcccatagaggattgttgttgctgtgaattgttatacattgaaccattaggaccagaggagtatcctttacctggatcttgaccgtataagaatccatctacatcaaaagcaaagatagtcagagagatgattcaagcacatagaagatgatcagagagagataaaggtgagatttttaaacctgatttaacagagaaattgggatgtggcaagtactgtgagtgattatagctatcaatgtttctctttttctttcttctcactaagaacacaacgcctataagcgccatgattgcgaaaccggctacagccataccaaccatagtcttcccttgatagccgccaccaccgccaccgccatctccattgccttggtttggagtaggagttcctttactaggggatgtgagagatggagacaccacaggtccactagaaggagttttgggtggtactgtggggaatgggctcggcggagcgttgggattagccggaggagaagtggctggtcctgatggttgtattgggggaggattggtagggtctaatggtgaagctggcggtgaatttgtaggatctgatgctggtggagctggaggagattgtaacggtggtgattccgggtttgtgggtcctacattcggcgacggcgacgatggaggaggcgattgaagatcttgagacggaggagggttgttgtcattggattcatttggtggagcaggtggtgtttcggaatcttctggaggagaaggagattcgtttgacgtcggtggcggcggagaaggggttgaatcaacgggtggagaagaatcggaaggtggaggtggagaatctgttagcggaggaagaatcgaaggtaaaggaggaagctgtgaatctggaggaggagtggatggttctgacagcggcggtgttgatgatgaatcagctggtggactaggaggagaggaatcaacaggtggaagagctgagttttctgatggagtctctggtggaggagcggtatcagctggtggtgctggtggtgaagaactcggcgactcgcctaagtctgacatttttttttttctaaggaaaaaactagcttagtttaatttaatttaatgatggattttttctaaggcaaaaactagggtttataaaattcccaggaccttgagaaacaaggtggagagagaggagaaaatgtacagactttaatttctaaaggtctcttctctctccctcaaactttccttttcccaggaaaaataaaataaaaacgaatctaacaaaaaatcgccatgatcatagatgatgatgatgataatagtcgaaggcacgtcgtcgtcgtctctgttttttttttttttcctcatcgtattgtttcttttgggacgacacaccttgattctcgggttaccgcgtaaattcaacgaaatcttttaaagtttaatcggaccttttgcgacccgacccgggtaatctcattgaagaactttctaccacgatgatgtgaaatctagatgggcctttattaaggacatgataataaagcccattacaatggaatagatggacctttatcaagggcgtgtactactgttccgattttatgatatttttcctatcaaagaagtaaaacaaaactttagccacccgagcaaggcatagctttaaatggaacacctatcacatttaccaaatttaatacctaaaattgctatatttatctgatcatcctatctttctttttcttcttctccaatcaaattcaaccatgtatttatattaattttccatatcgtaaatgttcattacgaagatattttgttttcaatctataagcttaaaaacaaactaatcctcaattagatgacacgtcgttaaaaatgataacaacaacgccaagccataatttccttagcgtggcaagtaacgtgatcttagtataggggtaatatagtcatttaagaagaaaacaaaaatcttgtcgtgcaagcagaaaagtaacggcaccgcttaacaaaaaccgtttatacggagaacgacgattctgaccctttttctttcacctgtaaaaaaaaagaacacttgctttcttcttcattctccactttttttttttccttctccccaagaatacttctctttctctctcgcactttcttctagactctgttttttcttttttgggggtgataatggcggcgcaggtcgaaattgaggaccaaacgtccgtcaccaaccttgataatggcgaaatattcgattcaatctccgacgatgctgattcttctgtttctcacgccggatcttctttctcttcctcttcactgatccttctcggcgaaggaaacccagagcacgacgttatcaagacgtgtttactctcgggaatgggtgttgtttctagcgacacgacgatcgttacgattagtaaaaactcttcggaacgaggaatcacgacgagagccaagtttttggcgtttaggattttcactgacgctgttgcgaggaaacacggcggagatgctaatgtgaaatatggttggtacgctggttctagagatgagattcaaagaatcatctcttacggatttagcaatcgtgatgttggaaaatttgaaaatgatggtggttctcatggaattggaatccatttggttccttccaagtgttctctacttgcgtaagcctgagatctctctactgattttcgtcgtaattttgagctaataactcggattatagctagtttctgagaaattttgaattgattttgatttataatcaacatgagtttaactaggtttgtttttcttattgtgtgtggtggtgatgatgtaacagtgaaagctatttttgcagggcttcagctacagagcaagatgaagaaggtttacgatatcttctgttatgccgtgtaatcttagggaaacctgagataatcatctccggctctaaacaatcgtatccgagttctgctgagtttgattctggtgtggatgatttacacaatcctagaaactatgtgatttggagttgtaacatgaattcgtgtattcttccgagttatatcgtcagttttaggtctcctagactgagaggttataaacactttctttctttaaggtctcttggtattggtgattacatagtgctaaaggattggttggtgtatttttttcagtgagtagaggtggttttgcttcgagaccaagctcgccgtgggttagttttgcttccttgatgtcaatgttgtctacatcaatggatccttcaagaatgaacttgatcatccgaacttacgatgattttcgggtatgtaatccagtttccttactgtatgttctgttctattattcttgaagttcgttggttaagattcaatgtgggtttattttgcagaaacggaagattaggagagaccaattggtaaggaagatgagagaagtggctggagataatcttttggctgagataatcaagaatcacaaaaacagaaacaaggtcacgaattaaaaaaaaaaaaaaaaacatgaggtaagcaagagtctttatttattctcaactaatcaatttaatgtaaagtggaagttcttattcttacttatggagcaaggattgttaaacttttatttgggtatatatatgaaaagtgacctttttaattgtcaaacaccacatcagattatatacctttagacgtgtgttgattgttgatccaactcatgcaatgtttcagtccattcatttgcttttgttacatattgaatattaagaaatgtctttgactttctggaatattattgaccttttttttcttcttctattacttgcagagaagttccacacgtgtgaaaggtgagaagaaaaaaatcaatagaagatcacacacgtatataggacaagcttcaatcaaaacgtggaaggaactatatgagagatttgatgcattttttttttctattggaaggtgtagtttccgttagtggtaaaaacagaggatcccttttgggaaacttgtaaagagcttgaacattacaaatctccagaataatcaagaaattctagaatcacagtctcttcaattacattgacctagcagttgtaaatctcctccgtttacttctcctatgtgatctccatctttccttaatgtcatcagctttgctcttttcggttaccacattgttttctccttgatcatcaatatagcctcctccttttcctccccgaagtctagtagcttcagcgaaaagatcttcgatcatactctctgtggttttaatggtgatcccacgtatgtaccaagaaagtggcgggggagtaagaagagctgaaggctgaaacatttgatccattgtcacctttgatccgatccttcctcgtccgttgctacagctatggtaatctttttgagattttggctttgagcggtcacacaaatgttcgtctataaacaatggctccactttccaacaaccctcaaacactttcatgaacattgttgtctcttgcttatattttgactggcctcaagataaaaaaacaatttgagtttgtgaagatagagtaaaaggattgattcttgcggtagaaaatatatcttacagtgagatttttccggttttcttcgacaatgagatgtataggacaagttccatcccaccaaaggaacttccaggccgcggcttgcttcacttccacggtctgctttggcccttcgtcgatcaaaacttttcttgatatgttttcctatttaggattaagacctatatctcaaatatttgctgtaatactcaattcaaatcaaacaaaacaagaccatgcacaagcaccttgatgtttttgaagtatcttttgttgtctggatgagtgaaaatgttgtatactaattcaggaggcaatcctacgtctgcttcaatgtttaaatggcaaaacaaaccattttgtgatttcacctgcaaacaagaaaatttgaagaatcatatttttttttctaaattctaccaaatctaagtttaaatttatttttggttctaatcttaccaccactttaggaggctgatctatccatgagggattatctctccaagcttgtaattgcttctctaacttctcttcatctctatgctcctcataagcagtctctatctttgacactgacttcaaacttagctctttcacattccttaatcttttgaactcagcctacaacaacaacaagaatcataatctaactaaatttctatattttaaataagcttcttgaggggttcttgagatggaaatgaaagtttgaccttaagaggctcttgaattgtttgattcatccataccaaaaatccaggaaacacaacgttattttcaaacaatttaacgaaacctataccgctcttctcctctgatcttgaaatttcagatacacccattttgtttctgtaaaattaggtcacaaaaacagaacaagatgacaatgagagatccaagtcaacgatgtggtttgagggaaaaacacatagagaaaggtttgattaatcaaaggttataaatgaaattgatgcttaatggtaataataacaagaatcagttaggtggagattgagtgtaccttacgcacctagaactaaaaatctgggacaagttccattctcgtgagttctctctttcgacgttaaagcatgtgcgtaaaatcggccggacattgcttacacaacttgtgtttcatttgtagcaatcgaacctgtgaaactctgacctgtgtctcctctaccacaaaatcaaatatcgactctggtttgcaattcatatccaagaattgatcttttatttattttttcccacttccaagcttctctagtttatattatccgtatagttttagtttatttttatgaaaaagtaaatgcgcaaagtcaaaatctgctaatgtctttgttgaactagaacttttttttgtcggtgttgaataaacaacaaatacgaatacaacaattttattattgttttctttaattggaaaaggtgcccgaagacttgatatccaagtatcatggacttaagatatgtaattaatgggccaattagcagattatggacagtgtttattttgaaaaagatagaggcctataactagaaatactatttaatgtacaagtaaaatttttgtgtgtaaaatgtttaggtggatctgcacacagccacacaatgtcaccatgcatggcgcgcatgacgtgatagaatagattaagtctaataaagagcaagtgtataaaatgaaatgagggaatagaacataatttgtaaatatgaaattaggaaatttatatgtggaagaatatattaaatttacaacatgctactatatctatgtatattcatttagcctagtgttttcaatgtttgttgtttttcttttttttcttggtgatattgttacgtttccatatttgtctgttgaagtcactgcacctggatttcgaaggtttataccccaagtttgaagtgttttcagcgcagttttggtgttcttgatggtgacctttcgaatgtaccaagatagtggcggcagattaaaaggaggatatggcttaaagtattggttcattgtcacctttgatgcaatccttccttgtccaccgctacatcttttgtattctgccggactcttcggctccatgttattgcacaagcgttctgaatctacatatagtggctccactctatagctaccttcgaaaactttcatcaagatcattttctttttcttatattttgcctgtcgacagtcaccaagagaaaccggagttaagtgtcacaccaatacaaaacaaaaagttttgattattgtgagggggtatagagaaacttcttactgtaagatcttttctgttttcatcgacaattagacttatggggacagcaaaagacgacccaaggaatttccagtccacggttttcttcaccttcgcgatctgcctcggtccatcctccattaaaacctttcttgatttgctttccttcataaaaaaaaatagagtacactctcaagtcttgctacaattaataccacatctgaataatacaatgaatgataagaaaaaagaggtggggagagaaaaaatggtccgttggatggattagtaaaaaatccgaagactttatctggagaaaatcccaatgtcaattctatgttcatatgacaaagaccattttttgttgtcacctacaaacatcaaaaatatattaaaaaaatagtaagatatttattcttattcctttaaaggcaaacaaatctaagtagtgcgattatatatgtttgatgatttgttatcattaccttcacctttggaggggcatcattccatggatgcatcttctctgcatctatccaaacttgatcttgtttcttcctctcatcttcgtcataatatttcttcatcttatcatggttattattattatccaccatttctgactctgacttagattcaacattttcagtttttttgggcttggcctacaacaacacacataatcataatctagtttctacattaatggattttttctgatttatggaaatgaaactgacctttcgaggctgtttattgttttgactgacccagccaccaaatccagtaaataccatttttatttgaaagattagtccacaagctaaattacgaattgtcgacaatagaaaatgatgatacaaagcttgtatatgatatggtttaaagaatcttagctatagagcttgtatatgatatggtttaaagaatcttagctataatcttgagagaatgatgtacgttaagttttacgcacggctaaaaaatgaagtgggcagctcaattctcgtgagtgattgacgtataggagagacctacctgaggaaagaggagatcaaaggtttgataagtttgcggattacgctccttctcatttttttctatgtgatcccttttggtgtaactccgcataattagtaatttagtatagtaatatgaacgtgatctaggaacttcaacaccataaacatatctttcgcgttatgtttacgttaacatgacaaccatagatctttgttaattcaaagcattaaacaaactaaacacaaacttttcatatgaattcattcattgaagggtttgcgacatggtatcatttcatggtactctaggaacttggaagtttctcgtattgtactaacttgatagattcccaaacggaataacacaccaatccattccctattgataagaaaacgacctcaaaacgctttctcatcgccgttgcatcgttggagagttgctcgaacccggctcccttcgagttcgagccattgctactaagagatgaagagaaattgcgggttcgctctaccttattttatgtttcatagaaatacaacttttgttttgaaaattgaaatacaagcttattaagaagatttattcattttttatatggaagcaagatgaaaattctatttttggctttgtgccaaaatattctaaattctagcatcaatatcttgcaaaataataatatggaaaaagacatgagcgattatattttttactatctctctcccaaaaatataataaaagaaattaatttttgtttcatcaatatgttccaaaaacttaaatggttaatggcattgatcgtaaataattatgttactgcaatgtgtttttgatagtaaataatcgacttttataagattgattctaacttctaagcactcgaaatcaaaaatgactttccgattactgtttaggagaaacttctgtttttccatgtttgttggttgacatgattacacccggatttcgaatactgaaactccaactttgaagtctctctagcacactcttggtattcttgatggtgatatcacgaatgaaccaagaaaatggcggtagattaaaaggaggatatggctgaaaatattggtccattgtcactttcgatgcaatctttccttgtccgccactacatttcttgtattcatctacactcttcggcttcttgttcttgcataagcgtactgaatctacgtatacaggctccactttatagctaccctcgaatactttcatgaacatcattttctcttttttatatttcgcctgtccacaataagcaagaaaaaccgaagttaaattttgcctatacaaaacaaaagatcttgattattgttaggggttatagagaagcttcttactgtaagatctcttctgttttcatcgacaattagacttatggggatagcaatagacctcccactgaagttccaggccacagctttcttcaccttcgcgatctgcctcggtccatcgtccttcaaaacctttcttgatttgcttttcttcataattaacaaaaagagtacactttcaagtattgctacaattaataccacatttgaatcattcaatgataagaaataaaaccagaagtggttcggtgtttggtccgttatgtggattagtgaaaagttcgaagactccatcaggaggcaaccccaatgtcaattctatgtgcatatggcatatacccttttttgttgtcaccttcaatcaaacaaaaaaaaggtgttttgtcaatcttattttgaattctacaaattccttaaaatgttcttgagattttgttagctgattttgctattactaccttaaccttaggaggggcatctttccatggatgcttcttctctgcagctgtccaaagtttatcttgcctctcccactcatcttcgtcatagtattttttcatcttagcaggaccattatccatctctgatgccgacttagattcaacatgctcagagctcttgggatcttcctacaataacaaagagaatcatatatgatttagtttatacgatggggtaataatattttttttaattgatttgacctcaagaggctgttgagaattctgattgatccatgctccaaacgcaggaaatacacccattatttctctatcaaattttatatagtccacaaatgataatgacaatgcaattgtatataatatgatttgaagaatatttagctaaaatgtctgcaattttgagagaatggtgtacgttaagttttacgtacggccaaacaatgcagcgggcagctcaattctcgtgagttatttacgtacagacgagacctaccttagctaggaaaaaataaaatagcaactttaataccataaaccgaaatagagatacaaaaccgtataaccatatataattcttgcgttggaaacttggaaacgaggaattacaaattgaccaacgtttcagaattgtgccaaaatggcataatatggatttggcccccatttttattaatgtacaattttgtgttgaattcgaagaaacctgatgtagagcatatcattacatttttcatataaatttattgatttacatagagacaaacattatagtcattttggtatagattttatacaaactaaaaaacgaagaaaagtatatccaaactttatatacacatacgaaaactaaatctagaaacgacgacaaagacaaccgtaacaattaggaacaaatctcctaattcacccttgtgctaattagaactttcgtacgggtctactcgcatcttggcacccatatcttgaagcattttgagcagagtcgtggtggtcttgatggtggtcctacgaatgtaccaagaacggcggcaaattaaaaataggatatggctgaaaatatttggtccattgtcacttttgatgcaatctttccttgcccaccgctacattttttgtattcttctggactctttggctccttctgattgcacaagcgctcgaaatctacataaattggctccactttatagctaccctcgaacactttcatgaacttcattttctgtttcttatattttccctatccacaacatgcaagagaaacccaagttaagtttcaacaatacaaaacaaaaacattgatttttgcgaaggatacagagaagcttcttaccctaagatctttctcattttcaaccgcatttatatttatcggcatacctccagaccaccacaggaaatcccaggccacaactttatctacctccactatctgccttggtccatccctcttcaaaaccttcctttttttgtttaccttcataaaacaaaaaagagtacacttccaagtcttgctatgtaagaataatatgcatataccacatttaattcacacaatgatatgagaaaaagaaaaccagaagttggcgccaagacttgtcactgacgagtggtaagttgtctggattagtgaaaagctcgaagactgatcgtggaggcaatccaaatgtcaattctatgtacatatggcaaagacccttttttgttgtcaccttcaaccataaaaattataagaaattttttgggatctttatcttataactcaagtaattcctctaataagagagaaaatattgttagcaatttggtcttaccttgactttaggaggggcatcataccatggatatttcttctctgcatctctccaaagttttccttgctccatcacctcatcgtcgacattattagtattcatctctgacactgacttagatctattattctcagatttcttgaactcggcctacaacaacaaacatatacatatatactctaatttctatatttagtccatgacatttaataagatatattaaccatataatttagcttatatttgacttttgggctctttgattgatggaaatgaaactgaccttaggagactgttgcatattttgattaaatccagccactaatccagaattacactcatttctctctgaaatttttagtccatgaacgatacttacctaatcagaacaagagctaatgactgtccattcttgtatatattatagtttgaggaatatgagattgaaacttgtttatggaatcgagaaaatatcgagaggttagtgatgggggtagtgtacgttatgtttacctaccgcgaaatgaagtgggcagctcggattttgtgagttcttgacgtacaggcaaaaactaatatagaaagaaggcaccgtaggtattatctcgtgagaacttttccatttttttataccatgaaataaagatcctttaatgcatatccgtcagaattaggaggacagttattcatttgttccacacattgaactttgtctattagtgttgcagattgaggtcagacgagcaaaaatatgagattccaaaaatataagaatacatttctctgatttaatggtaagcacaaagttagcttaaatattcgtatgtcacaaagttcaaatttagtaggaaatgaagtaatctttgatttatttgacccgcatgcaacgcatgtcatcatgtatggcatggactggactatggaaataggatggaacgtgatagaatatacaaagaccatcgagtttgttctaactcctaagtatacggtatctctcgcagtatggtggccctatcttgaagcattttgagcagagttttggtggtcttgatggtgatgttacgaatataccaagaaaacggcggcagatttaaaagaggatatggctgaaaatattggtccatagtcacttttggtgcaatttttccttgtccgccactacattttttgtattcttctcgactcttaggtttcatgttcttgcataagcgatctgcatctacatatagtggttctattttccagctaccttcgaacactttcatgaacatcattttttctttcttatattttacctgttgacaataagaaagagaaacccaagttaagtttcaccaatacaagacaaaacgttcattagttttaggggtgtagagaagcttcttacttcaaggtcttttttgttttcgttgacaattaaattaatggggagagatccagagaaccaaaggaagtcccatgccacagctttcttcaccttcacggtctgcctaggtccatctttcttcaaaatctttcttgatttgtttgcctttataagaaacaaatcacactctcaagtattgctataattaataccacatttgaatcatacaatgataggaagaaaaccagaagttgtcgccctgacttgtctataacaaagaatggtatgttggttggattgatgaaaagttcgtatgctccatcaggaggcactcctaatgtcaattctatgttcatatggcaaagaccctttttcattgtcaccttcaaacgcaaaaatagaaattttttatagacctttcatctctactcttattcttaaatctaaaagtattgagattttgttagctgatttgctattattaccttcacttttggagggggatcataccatggatgcttcttctctgcatcactccaaagatttagttgcttaatctcctcatcatcttcggtattattagtatccatatccgtattcgagttagatttaacgttctcagatctcttggactcgccctacaattaaccgatataagtagtttatatagattgactttttgggttctctggttgatggaaatgaaactaacctttgggggctgttgattgttctgattgatccagccaccaaatccaggaaacacattcatttcactatgaaagcttggtccacaaatgatacttatctaatcaaagaaaattgaggaatttgagattacagcttggttatgaaattgaaagaacattgagctagggagtggtggtgggggagtgtacgttaaatttacgtagcaagaaaaaaataaagtggacagttcgatttctgtgagtcttgacgtacaagcgagagctacataaaggaaaaagacttcgaaggtgttattatctcatgagcattatgctgttttccaacttctcaaatctttgtaaatatttccatttttttcacagcatggactaaatatcctttattgacgaaaaaataattttcatcattgaacttatttttccaatcgacttatttttcaggaataggagagtcgagttggacatacatttgtatataagtagatagtattggttatgtctgttttattttgttcattcaaatgaatgtaattagttgttttatttttttcctatctggattcatatgcaaaataatgagacttttcatttttatgtgtttttacaaaaaaaatctaatcaagtggtaacatcacttttgtggatcatgataacatattttctaagatcttctagcaacattttggtgattttgatggtgatcccacggatgatccaagaaaccggtggcagattaagaagggtagaaggctaaaagataagctccattgtcaccatcgatgcaattcttcctcgtccgccgctacattttttgtactcttcttgactattcaccgacctagacctgcaaaagcgttcctgatctacgtatagtggctcgactttccagctaccctcaaacactttcatgaacttcattttctctttcatgaacttcatgcagtggcttagactttacatccccaggttccatagctgtagtctacaacaagaaacataatctaatttctatatttaaccgatatagtattttttatattttttgctgatatatttgctcttaccttaccaggttcatcataccaaggttttagattagtgtctttctctgacactggactagatttaacattctcagatctcccagattcagcctacaacaacaaaaataatttataagattcaggttctttgaatattgatggaatgaaactgacctcaggacgttgttgaatattctgattgatccagccaccaaatccaggaaatacactcataattctctttgatatattaagtccacagacgaaacttaacctaatctaatcaaaggaaaatgacgacacaaagctggtatctatggaagttttaggaatcttagataaaggcttgattcatatttaggcgaaatataatacaacatgtaactgaaaaaatggtgtacgtatatgtgtttacttaccgtgcaacaaagaagtgcacaactccattatcgtgagttcttgacgtataagaaagaagatttgaggagaatatccggtgatttggattcaaagtcattttagatttgtgcaagatgaattcttcttattctcctcacaccagcctcaaaatcttgatgagaacgtgggtgctataactgcgggtcttcttactaatgtccctcatgcctacgagttcaatggtcttgtcaatggcgtgttctgtcttttaggtctgccgccagtgtccacatttgttatatataacccgaggaccagagaatccatcactttacccaaaataaagacgaagaatcagaagattatgctgactacaatattgtgagaaacatgatcataagacttcagatccaaggaatggaagaaggttaacggtaagcgatgttatatctttctaaaccatgtagagaacattaagcttaagcattttagtacttaacaacttattagggttggaggcagtgagatgagcattctcttttggatttattactgttcagcaaaacatagttgccttttttttttttttgaaatttaaactatattttcctgatctcatatctgatttttattggaatatcaacttattgttaataatattaattctagacttatgtcggttagatcatcaaaagttttgttcaacaaaggacgagagagtttttccatggggtatctttattactggtaggctggtaacgtttaggtagtgaaatacttcattcaacacattttgttatgcaaggcatggagtatggaatggagagcatcgcgttagacctaaggtaattcaggtcctaaagtcaactggaattaaaaaaaaaaaaaattaagatgcttatgcctatatgcgtattcgttgatcaaacaaaaaaaagatacatatgcgtattcaagttatagttttccatgtttcttgcttgtaagtctttataaagtcgttatctagacttagtctcgcaacacgacactcgcatgttgaagcattttgagcagggttatggtggtcctgatggttatatcacggatgaaccaagaaaatggtggtagatttaaaaggaggatatggctgaaagtattggtccattgttactttcgatgcaatccttccttgtccgccactacatgttttgtattcttgaaaactctttggctccttattattgcacaagcgtactgaatctacatatagtggctccactttatagttaccttcgaatactttcatgaacatcattttctcttttttatattttgcctgtccacaacaagcaagaaaaacgcaatttaaactttatcaatacaaaacaaaattagtaatgcttatatatcaaagataattgtgaagggtcgagaaaagcttcttcttactgtaaattctttttggttttcatccacaattagttctatcgggatagctccagaccaccaaaggaagtcccatgccaaagcttgctccaccttcacgatctgcctccgtccatctttctttaaaacctttcttgatttgtattccttcatcagaaaaatatcacactctcaaggactactatcaataataccacattcgaaacatacaatgatagggaacaaaatccagaagttgacgcccatgcttgttcatatcgaagaagagtgggccatcatttggattagtgaaaagttcgaagactccattaggattccagcctaatgtcagttctatgttcatatggcatagtcccttttttgttgtcaccttcaaaataaacaaaacaaattaagattgttgttctttagaaaagagctttcgtcaagcctaggtagtttccttgccaatttctttttttttttcaaaaacaaggccatctaaagtgcagttgatttctcagaccctttcaagccaaatatacataaaatccgagaatcctttcctccgtttttttttttttgcgagaattgtttctcggatgttgaatctaccaattcgttttaggaatcctagctagtaaaaaaaagaaaagaaattgaactcattttcttagggaagttaacatattttcgaggtcactcctagtattatctcttgtgttaatactattaacatacatcaataaactcaatactttcaagttcacaatattggcatggttttagagccaagtttaaccctagagaatatgctaacttccgtaataagataagtaaattttcttttctttttttttactaggattctcctagtaattctttctaaaataagtattgagatgttgttaggctatttgcttttgttaccttgaccttcggaggggcatcataccatggatgcttcttctctgaagcactccaaagttcatattgcttcttcatttcctctttgtcatagactagttcttgattattactatctttctctgactctgaattagtattaacatccacaaatcttttggactcaccctacaataacgaacataatttataatagtttatactaatttgacttgtcgagttctaagaatgatggaaatgaaactgaccttaggaggttcttgaatgttctgatttatccagccatcaaatccagaaaataccctcattttgctctgaagttttggtccacaaacgatgtttacctaatcagacagaacaagagcataaaatagtacgtttgtatatattgtggattgagtaataaaagtttggttcaaatttagaaaatttcaatataaaactgaaataatggtgtacgttaggttttacgtgtggagaaacaaagtagtaggcagcttcattctcgtgagttttacgtattgaataaacaaagaagttatttcccttattttgtatgtatttagtagtcgagaggtcgataaattgaagactgatgcgtgccctcgcggaatcaggattagtcaacttgacttactagtcggattgctttgatcggaatttctttttctaaagatgatccgtcgggatcaaatatggaccgctccactctgcttaatattccggttaatttaggtattgactgctttaaatttaattacctggcggtgggtactagtttgtgttgtatttgccatgttagctgcttgagatctttatgatattgtttgagtatattgaatgacgagtgtcaagtatccacattagctgtcccaaaggcttgttcagtttattttattagtttaatggtaacctttttaccaaaaaaacaacaaaaatattcacataaacaagatacctaaaaatatacttgatatggttttgtagtactaaaaaattatgaattttatattttcccctattagaattcccttttgaataaactgtttaccgagataagttttatattgttttgtttatttcgattttggggcttttcaaacttctcgtaaagtggtacccgcttttctaagatcttcgagcagaatcttggtggttctgatggtgatcccacgaatgatccaagaaaccggtggtcgattaagaagagaagaaggctcaaaaatctgctccattgtaacttttgacccaacttttccttgtccaccgctacatattttgtattcttctcgactttttggcgaccttgacttgcacaagcgttcctgatctacgtaatctggctcaactttccagctacccttgaacactttcattaacatcattttctttgtcgtatattttgcctatatgcaagatttattgatcaaacactagttaatacatccaaaactgaacaaattaaacaactgattttcttagaggatatctgtaagctttcttactgttagattcttatggttttcgtgaattataagatgtattgggatatctactgaacacccaagaaagttccaggacaaagctttttccacctccgtggtctgccttggtccatccttcttcaaaacctttgttgatttgttttccttcattagaaaaaagaccacactctcaattcttgcttcaattaactaatactcagtttacaactatattaaaatgacataccaaacgttggcgcccggccttatcctctttgaagaaaggaaagttgtttggattagtgaacatctcatagactgcttcaggaggcaatcccaatttgaattctatgttcaaatggcaaagacacttttttgttgtcaccttaaaacatccaaaaatgtaacaaactttttagatattttctcttaatgttagtaactcctcttaaaggcaataaaaaactaaaaggtattgagattttgtttgcaaatttggtctttaccttcaccttagctggagcatcataccatggatgttttttctcagcagctctccaaagtcttgattccttctttacctcagctaagtcataatatttaggatctaccgcccacacagaattagatgcagggctcttggactcgacctacaacaacaaacactattctacatttgatttgacttccttgagttctgtgattatagaaatgaaactgacctcatgaggctcttcaacatgaggattgatcgacccactaaatctaggagttacactcattttgtttctcaaagtttagtccaaaactatattatcctaatcagagtaatagaaaatgaaagagaactcgaaagaaacgtataagaaggcacaagggaaaactaaaacgtgcagctcaaattttatgagtttctgacgtacagggctcctacatgaatcctaaattctaaattttcctcttgtcccttcaagtcaaattatttcacaatttagaaaaattaaatggaatcatttattttcaatattcagaagatttaaaaacttatttccgtctactcacaaaagaagctatcatcccatgattgaagttacctttaaaaaattttgacttttttttttttttggacatcactacaattggtttataggttataggtttttgggttatttagaattcttcgttgtttttgaactctatttatttttatttatttgggaattaagagttttgtccttaatttcagttggttttatttgagtatatagagatcaaagggtgttgagatgaaacatttttgtgatcattaaaaacatgcttttgacaagaagcagtttccgtaccattcacgtcgtgactcattcacgtcgtgactcattcacgtcgtgactcattcacgtcgcgactcatccggttgaaccgtttacatgctttgacgttgtataagatatattggtaaagagctttgttagaacttacaacatacttatgtgtgaccatttaggttagcgtttttcatctttgttgcttgatgtctttataacatcgttatctagagactcactctcgtagtacaacactcgcatgttgaagcattttgagcagggtttttgtggtcctgatggtgatatcacgaatgaaccaagaaattggtggcagattaaaaggaggatatggctgaaaatattggtccattgttactttcgatccaacccttccttgtccgccactacattttttgtattcttgtagactcttcggctccctttgcttgcacaaacgtactgaatctacatatagtggctctatcttccagttaccttcgaaaactttcatgaacatcattttctcttttttatattttgcctgtcctcaacaagcaaaacatatctaagttaaattttaccaatacaaaataaagatagtgatgtttatcagaacaaacatacagaaatattgattattgtcaggggttagagaagcttcttactgtaagatcttttttgtttacatcgacaattagatttatcggaaattctccagaccaccatagaaagtcccatgccacagctttcttcaatctcacaatctgcctcggtccatccttcttcaaaacctttcttgatttggttgccttcatcagaaaatatcacactctcaagtactactataaataacaccacattcaaaacatacaatgatataggaaaaaaccagaagcgggcggccattcatgtccataaaagttcgtagactccatcaggagtcaagcccaatgtcatttctatgttcatatgacaaagacccttttttgttgtaaccttgaaacatcaaaaatataagaaaaattttaagctcttttcttcaccaattccttaaaagatccaagtattgagattttgttatctgatttgctattgttaccttcaccttaggaggtgcatcataccatggatgcttcttctctgcagctttccatagttcattttgcctcttggtttcctcttcgtcataatttagtccttcctcattattagtatctttctctgacactgaattagatttaacattcttagatctcctggactcagcctacaacaacaaacagagtttattttgttatattttcaggttctctgatatattgatggaaatgaaagtgaccttaggaggctgttggatgttctgattgatccagccaccaaatccaggaaatacactcatttctttctgaatttcgttaccacaaacggatactcactcacctgatcagagcaaatgcaaatgaggatcaaaacagtatctattaatctattatggttcgatgaatcttagattaaagcttgattctgatttagaaagaaaaaaaaaatcaagatgaaactgagataatggtgcatgtacgttatgttttacgtaaggagaaacaaaagaaatggccatgcagctccattctcgtgagttttacgtattgaagaaacaaagaagttatttcacttatttcttatggatttagtggtcaagaggttgatagattagagtctggcgcatgctttcatggaatcagaatatgtcaactcgactcattagtcgctttgatagatttttttttttctcttcaagttgattcgcatatggtcaaattgatttttatttatttaactatagaataaatactaaatagtttcgtgaatgctgataaaatatacatttgcttaatatttcgtcccgaagttccatacttccatcagtaccaaacttaaagcctcctattttcctgatatttcaatcattggctaccttggatttaattagcttgccgtgggaaccagtttgtagttttcttgcaatgtttgttgcttgaaatatttatgagttttgtttgagtaatgaatgacgaaaatgtcactatttagagaattaattgaactatacctaactcgaatgtaaaatattatgacggtcaagacctcgtcctttctttctttccattgcgtttgagagggtgtagcggggaattactgtgatcgatgaatgcctctcccctcatcccacctaactcgcacacttgacaaacaaacccgaaacagaatatcctctatccatggattggctggtgatagaagatatgcaggctgtatggccgtctggtttggttcaaaataattattagtctcttattctttctttatatttgtaaattaatctcaaaaactgatcaaacacaagttgcactagatgtaaaacagtttttttccgaataattttacataatattcaaaaaaaaaaagaatgtaaaatattcgcattatctgtcccaaaggcttggttcaatatttttgcttttgttttgtaagattcaaaattttcgatggagaaacattttatccatttagaatcctttaccaaaaataaaatccaaattagagatacctaacaatatatttgatttcgtttatgtaaatttctatttttccagtttcactgtttcgattccctttataatgtgtttatcacagaatataaccggtccattccaaatttggggattttcaaactgttcgtaaagtggtacctgcttttcgaatatcttcgagcagaatcttggtggttttgatggtaatcccacggattatccaagaaaccggtggcagattaagaagaggagaaggcttaaagatctgctccatggtcaccttggacccaacctttccttgtccaccactacatcttttgtattcttctcgacttttcggcaaccttgacttgcacaagcgttcctgatctacaaagtctggcaccactttccagctaccctccaacactttcaaaaacatcatattctttgtcctatattttgcctaagcaagagaaagccaaacacaaattaatttaccctaaactggacaaaattaccaatttatttttaagagatatacaaagacttttactgtgagattcttatgattttcatcgataactagatgtatcgggattgctctggatatgaaaaggaagttccagtacaaatctttttccatctccgtggtctgcctcggtccatttttcttcaaaacttttcttgatttgttttccttcataggggaaaaacccacactcccaatcatttctgtatagtcaatactcaatttgaaacattactcaatgaaaagaaagaaaaaaacaccagacgttggcgcccggccttgtcctttttgaagactggatagttgtttggattagtgaacatctcgtagactccttcaggaggtaatcccagtttaaattctatgttcatatggcaaagaccattttttgttgtcaccttcaaacataaaaaatgtaatgaattaagatatgttttcaaaaacaaaactctagcaattcttcttaaaggcaaaacaaatctaatgagactttgtttgttggtctggtcttaccttcaccttagcaggagcatcataccatggatgcttttcctctgcagctctccaaatttctccttctctcctcacttcatctaagtcgtaatatttagtatctaccgcccacacagcttcagatttagggcttttggactcggcctacaacaaaaaacagtattctatattgattttacttactcggtttccctgattaatggacttgcaactgacctcaggaggctcttcaacattctgattgatccagctaccaaatccaggaagcacactcattttgtataatcgtttagtccataaacgatactaccctaattagagccaggcaagagaaaatgacgatccaactaaggtaaaagcttgatttagatttagacaatatacaataggaaatagaaactgaaagaaaacgcacgtaaaaatgtttatgatttacgtacaaggcaaaacaaagtggacggctcgattttcatgagttgttgacgtacatgcaacatctacatgaatcctaactcatcctcttgtcccttcgtttcaatcctttgatgtatatagttcgctttaatttacaaccacaacaatttttcacaagaaaaaataagaaaatacttttttcacagttgacaagatttgaacgttctgttcctatataaagttgaggcattagtatatactcacaaaagaatctattatgcatgcataataattaattaacttctaaatattttgggtagacttgcttaaattcttgggttttttaccaattagtattccgatgttcggaattatataaagtgattctttctttcttcttgacagaacgtgaaattgtttttacagtattccaatatttgaggttaatgtttgtataaaaatggtataactagcaaatatcggattggaaagagtttcaaacgcttctgataacggcggcctgaatttgaagatcttcgattagagccttggtggtcttgacggtggccctacggatgtaccaagaaagtggtggcaggttaagataagaagaaggctgaaaatactggtccaatgtcactctcgagccaatcaatccttttccaccggtacattgtctatattcttctcgattctttgggagcctcggcttgcaaaagcgcatgttatctacgtaccatggctctatttgccacttaccatagaacgttttcatgaacatcacgttctttttaggaatcatatatagtgtctgtccacagtaagcaacataaacaaaattaaaaaaaaaattatacttgatatgcgcataaatatctttagaaacttttatttttgtggtatatatagagaaaaattcttacgctgaaatctttccggctctcattgaaagttagatgtaccgggatagatccagaccaccaaaggaacctccagggagcagctttttccaccctcacgtgcttctctgtcggtccaagatcgctaaaaactttacttgatacgtgttccttcataagaaatatcacattcgcaagtacggctattattagttcgcaaatcaaacaatacaataataggaagtaagaaataaataccagagtttggcgctttttcatcattgtgaagtatgatgggttctcataagtagtgagtatatcgaagactgcttcaggaggtaatcctattgtaaatttcatgttcaaatggtaaagatccttttcgtttgtcaccttcaaacataaaagatataagaaatttgtttagaatttatttttttatctagttccaccaattttgacaggaagttcccatagttttcatttcatgtaactataatcaatattaagaaatcaattcgtttattttaaggattcccgtagaccacctaaccaaaaaaaaaaaaaaagaaatctcatagaccatagtaatcaactaatcataatcatcagcattttaggtattttcaaaaatctatatcattttatttgcagcttctagaaatttacacaaacaaatgattagatcactcatcatcgtgcttgtattttaagtcgtcaacgtaacgggctttcacaataaactaggatttaacccgcggtttaccgcgggcaatcggtttatttggttcttatactaaatatttgaatgaatttgatatcttaaatttataaatataaactttttaatcaaacataactaaataataattgggatttttttggttgttatttagtgataagagaaatgtgttaaaatgtgtttaaaaatgtgtatgtaattttagtgaaagtaaaatatttacaaaaatgtaagattcacaaaattggtataaaattgtttatgattataagtgtttttttaactatttgacaggttatacacttttttggcaaaataaagactatattaattatgttatttataattatatgtctttaaagtaaagataaaaaaataacattatttcacttatttttgttgaacggtttagattgaagggaattaattttattgaacggtttagattcaatcagatcatataaagtttagaagattgttaagaccaaattacccttaatgattttgaataccacagaacaaaatccaaaattaaaatcaaaattgaggccaaattagacaaaatttcaatttgtacttcccttttaataataaggggataattgactctcttaacaacaaaaaaataaaagaaattattctgaatcaaagattttattgtcatggtagtaagaaataaacgttcagatggaggcttctttatttttttctatttattatatatttatattgtgtcttgtgtttattgctgttagtacaaaattaacggcatttccaattatgttaacgtctgtaaaatcgagaatgtaagttacaagcactatgatgagtctgaaaaacgcatgtgttcttataaaataaaaagtaaaaattaatattatgcatttcacaataatatggccacaccacatgtttttcatggatcaaccgtaacgccaggttaagaaatgagaatttctcgttggtttgtgatcttaccttaactttaggaggataatcataccatggagatttcttatctgaagctctccaaagttttaattgcttctttaattcttctctgttctctggataagtctcagacactgacttagttttaacattcctagatctcttggactcgacctacaacaacaaatagaaacataactttaaatattgatttgtcctcctagggtcctctggttgatggaaataaaactgacctctggaggctgttgtgtgttctgattgatcaagccagggaatatacccatttctctctgaaaatgtagtctacaaatgatgcttacctgataaaaacaagagcaaacgaataaccaaagcttgtatatgtgaggaatattgtaatataaagttgttatagattgagataatgtactagctgaggaggtaatggtggaggagtagtgtacgtatacagcgaaacaagaagtgagcagcatgattttagtgagttcttgacgtcgagctaagacctacctaaagaaagaggagaataaaggtattacctcgtgagcagtctgctgttctaacttgtaaaatcataaaacttttcccatttttcacagcacgaaacaaaaatcccttgatcgatttgacagattttaacagaaaatttctctgttttcatcagtaaagtttgtctattagttttgcatgtagagctccgaccaaaatactactgtgagttgatgttttaaagtcaaaaccctttatctaattcgatggtaagcacttacgaacatgtaatttcggaatcaatatttgatgtaaaataacatgacataatataatgttgttgacaaaaatatatatatgtatacagtcgctattacagaatgaatgtagagctaagaattacaaataataatattaaccaatagaatcggttattgtattgttgtttggtacaatgtaaaccggttactaaaccggaatactctactatataaagagtgtttcatgtaacagaacaatttaagaagaataacaaacttttttcatcttcttcatttcttctgaattcgttcatcaactattaaataattgagatgtttatcctgaaaatgcaaaatccaattaacggtgagtctagaggtcaaaatctaccgataactcactaactaaagaactcattgaggtttccatacctttccagcttcagaagaagaattcggatatgggatatcatcttttaaatcattaagagggatatagagaagtttcttaccgtaagatctttttggttgtcttcgacaattagacttgttgggagagctccagaaaacaaaaggaatttccaggatacaactttctctacctccgcaatccgcctcggtccatccttcatcaaaagttttcttgatttgctttccttcataagaaaaatcacactcttaagtacttgcaatattgtattcttcttgactcttcggctccatttgcttgcacaaacgttttgaatatatgtatagtcgctccactttatagcaaccctccaacaacttcatgaacatcatcttctctttcttatattttgcctttccataataagcaagataaaacctatgttcagtttcaccaatggaaaatatttattcattgttgtaagggataagtcatatagagaaacttgttactgtaagattttgttagctgattaggtacggttttacctttaccttaggaattaaggggatcatacaagagaaaaactaactttgtatatattgattgtatgttcgtaaaatgaaatttcttttttcaaaaatttacatttttgaggtttagtattccactattcggattaaaaatatagcatttaggtttaatactactaccaaaatagtagaagtggtagatgacagatttgggggtttcaagcgtctcggaacatgatacttgcattttgaatcaatatgagcagatttttggtggttttgatggtgatcccacgaatgtaccaagaaagtggtggtagattaagaagaaaataaggttggaagtattggtccattgtcactttcgatgcaacctttccttctccgccgctacatcttttgtattcttctcgactcttcggctttctgtccttgcacaagcgttctgaatctacgtatagtggctctattttccatttaccctcaaaatatttcataaacttcattttctctttcatatatcttccctatccataagcaagagacatcaaacttataattagtttccctaatatgaaacaaaaaagttattgattagtttgagagatatagggaagctactctaaagtttttttggttttcatcaacaattagagtaaatggaaaagctccacaccaccaaagaacgtcccaggtcagagctttctccaaccgcgcgctctgcctcggtccatctttcatcaaaacctttcttgatttgttttcctaattcatcagaaaaaaatatcacactctcaaatatttctgtcattaataccacatttgaatcataaaaatgtaaagagaaaaaccaaaagttcgcgcccagtctcgttgtcgatcctgaagaatggaaagtcgttcggattagcgaacaaatcatagaccccttccggaggcaatcctactgtcaactctatgtgcatgtggcaaagacccttttttgttgtcaccttcaaacatgaaaatataagaaatctttcatatttttttttttcttaattcttctacaaattccttttaagagaataaattcttaagtcttaccttgaccttaggaggagcatcataccatggtttcttcttctctgcagctctccaaagttttccttgcttcttagcctcagctttgtcataataaaatgcccgtttattagtatcattctctgtcgctgaattagagtcaacattctcagatctcttggactcatcctacaacaacaaacataaccataatatatttattattatcattctcagcttctatatttatttaaccaataatatcttttattttttgacatcaaatgaaatttaccttaagaggctgttgttgtaggttctggttgatccagccaacaaatcttcgaaatacactcatttctcttgaaaatttagtccaaacaataattacctgatgaaagaaggagaaaatgacgatataagcttgtatatgttatgctttgaggtatcttagacaaaaagcttgattcagagttaaccaattttcaaaattaaattcagagaatagtgtacgttaggtttacgtacacaagaacagagaaataggcagctcaattctcatgagttcttaacgtataggtgagagctacttcaagtaaaggagatcgaagttattatctgtttgatttctatagataggtcaagcaaaatttgtataaaaggatgcagtttctatatgattttgcagtaaggtacttttacacaaacaatagattcatttatacactttgtgaaacttgtaaagagccctcttatggtttttagctgttcactgactttacattcgtgtatctgatttagatgaatgatgcctctgtaaaagaatggataatggtgatttagatccaccaaattcaaaaaaacaatatatggaatattcacaaacggagtgcctctctttaaagatggagcacaaagcagattctgcttttaagggtcactgctcctcgtcaagcggttgatctgttcttctagctgcaaccaagtttgcaaccaagttaagaatattcatgatgatctactagaaggagaagatgtgtgagtgtggctctcttttacaaacctgagcattttctgttttgtgtttctcaacctcttcttcaagattcttaacgctgtagcatttgaaaccaatgaaacaatcaagcatttttctcacgttccttctttaagagatttaaagcttgtggaatttatcattacctctgctgcaaaacgtgaacctcagacaatagatctgtctctgttgttgatatctgtgaattcagaacttttggctcttagttctcggcctctctctatgcatatgtcactagcaaagtatgagaagcaaacccaacctgcccaacttctgtattgccaatcggaattctgatttctgtacaaaaatcaagatcaggtcatggaacttgtaacatagagaagatgcaaattctagtgatagaacagcaaacttaccagcagttggatcacagagttgcattaaaccgattaaccttttctgccaagcaaagagaaatagtgtgaaactaccaggagatggaaacccaaacgatattcatgagtgaaatatcaacaagaaacgttggcaaaccctttggatatcattctggatcaggatattctgtacgattgggaggacttgagcagtatcacaagaaacagggttcacaagaatagcaggttccgtcagcagcgcttcaacattttcctgtatataagagggattgaggattgtgcaaagagaaattgtgtgaaactaccaggagatggaaacccaaacgatattcatgagtgaaatatcaacaagaaacgtttttaaatggcaataaccctttggatatcattttggatcaggatattctgtaagattgggaggacttgagcagtatcacaagaaacagggttcacaagactagcaggttccatcagcagcgcttcaacattttcctgtatatcagagggattgaggattgcaataagagtcagaagttgaaggatcatagaaagttattttctactaatccagattaccgggtcatttatttaaaataacaataactgagttgattatggcttagttatactaaaatggtttgaaagaaaagttatctttgtatgtccagacgtatacctgagatactttctccttgttaccatctacacctttaaccaacttggccttttcctcctgcagtgttgccaaggttcaatcacacagtccaaagcaatggtgataccaacaacagagaaggaaagttttcatctaaccttcagctttctataacgctcaccaagcggagagaggccatcaagaaatgtactagccaagtattcagtagaaagagtttgctgtaagaacggatattccagtagttgtgaagcggtcggacgtttttctggatcttctatcaagcaagctgcgaccaactctctaaaagactgcaacaatatatagtatctttcttaatgagtgaaagatgaaatcaacatttctcaggtgtaatcattccattccactgaccttagagaatttcgtgtcttcttcatagttaggaaagggagaattttgtaagttcaatggtagcacctgaaaacaatcatgaaaaacagagcattctagaaacagatactataaaggggaaaatacagtgcatgatggaactttaatcttataaggtaagactcaccgtggtaggtgaatgaccatgggcaagttccagggcagtcatgccaaacgaccagatatccactctaaaaagttgaatagaaaactaataagtcctaggcaagtcactcctttaagatggcagtacagctacactagaaaacagcagacatacttgaaatcatagccatcaacttgctgcatatccttctcaggtgccatcctagaaagagcaaagatatcctcaagctaaagaaaacagcttagaatggaaagtctactctctatagtcggattaagcactcaccggcgtggatttccaacaaaagtattctcagaactagtacgcatcctttccacactatcaaacatggatgctgaaacttcaaagtcaccgagcttaacagttccttctgagtcaaccagtacattcccagcctagaaagaaggatacattctgctatcaaaacatgatcggaaaaaaacgaagtacataacgtgaattgagattaaaagtaccttaacatttcgatggatgtgtcctagtccatgaaggtaaacaagagctttaagaatctcccgcaacaatatagcaattacaggttcctcaagaccatttggatagactgatttcattatgttcaaggaagagccgcacgacataaaaggcatcacaatccacaagctgctactatctatgaaagagcaatgcaccctcaatagatttggatgatcaattaagctcaatctatgaacttctttccttatggtttcctgaatttatctccaacaacagactaaatatcaatttccgatgatagatcctaaatatgaacaaacaaagaacaaagatgaagatacgaaccagatcgttggtgcatttttcaaggttccagatcttgatggctacaatttcatcaagtagaatgcatcgagctctgtaaacaccatcgcctatctcttctaaaatctcgtaatctttcgcaaccagaggaaatctcgtttccggtgaactcgtcattatgcctaattcatgcagaaaatcaataagacggcgaacgaaattaatcgtttctccgatcaaaaaccattctcaacttcatatacagtaatgcattgaagttaagaaacgaaaatccgaactctgttctaacaaatcggagaaaaagagagaaatcctgaagtacgaggcggcgattacgtacgagccggagaaaaaacctgaagcgtgagagcgcaaaggaggaggcaacgaaggagacgaagaagaagcggtggcggaggagaattcagttgagacaaatcgccggagagttcgatttttctctgacttgtggaagtgaaagattcggaaactttggagactggaaagtttgttagtcgcgggcgccttttatagctgacgaattttattttactatcattttctgatttcatgtgtataaatataaggaaatattagctgatgaaattaacactgaaaagtgaaaagtaataacataagcctataaaagtgaaattggtaatgttaatatccgatttaattggatattttttgttgaaaatgcaacacaaattacgtgatagcgtttagtctttctcaaacacaatcaattcacaatagaaattgtagaatagaataatttcattagataaattcattgctccaaatgatggttttttttttgtgtgacttttatatatatttatgagtttttttatatatacttatatatttatgagttaataagccccaaaaataattttcacggatttttagagtaggagcaaacatcaaatagaattttatttaaattcattgcaattttcaattattaagaacttgaagtcaaatatacatgtgttgaagattgaagcttatataattttgtgtttttgaagatgatacgtcatcttctgaagctgaaagagtttccacaaaaggtaaaagtacgagaaaggcttagccgcttaggcttagtacgtgtcctcggtataaagtgtctgttgcatttcttgggtctcacttaacaaaactttgaagcactacgtcattggacaaaaatttctgacaccgttctttacaactaacagtggagatggagaagaagagtagcacggaaagtccggtgctaatgtgtgatccaggcaagaggtaatgtgtgatcaaggcaaagttttgatgaatcttcacatccaaatgcctacgtaagatgaccaacgtgccggcccgaatgaatgggctgcctaaagcaagccaaataattgatgccccaatgaaaagaaaaaaaaattgtttgaaaagaatgcatatagtggccttgaactcatgacttgttaatagagaaaattcaagcttaaccactagacctattgaacaattcagaaaatcataaccctaaatttttttataagatctgattccctaaagccctagctttatgagcttctgccacggaccgggccggaccaacggttaagaacttgattttaactttttaccaaacaaaacttgattttactttttacgttgttcactttttccttttaattccaattttttcttttgatttgtttaccggcatgagaagtagttgctccctaattactttagacgggataagttctcaattcttaaacttcatttcaaaatatcgtcttggataatggatatatgagcgggagccgccaagtgttaaacatagtctagacaaatcaattaaatgttcttctaatttttcctaatggcaatggttaaatctgaatatttcattagccaaatgttgtctagtcaaatgtcgtgaactaaataaaccgcatcatcaagtggaatcgtgggactgggaccatatataatgatatatcatatatgaaataaatgtgtgaatacttgtcttttatcttcttgggtttgattataacattcagaatttcagatggttgtgacttgtggcattaaaatgaaacatcactggtggatctatattctcttctaattttcctctccaccacgatatataatattttctatttttggcaacaaactatattaccttcatatttctgatattttccactgcatagctttctttttgagatacgagttagagttactaatgatttttcacaatattactttgaccttaaaaataaatgaaatgatgatatcccattaactagcaactgaattgatctttatgaaaacatagaggtaagacatgagagttgacataatctcatcgatacatattttaagaatttctcttgttgaatatctaaagtcagaaatcgataattgtctttcaagaaaaactatctttgatcaatatctctgcatattataggtcaacaactaaacatttattttaaatttgttttcaatctctctattctttatccccaccttcgttttttctttaataatgttaaataaaaatatttgtaacgttcatattttgggaagtcttcaacaatattcgacgaacatttagctgtaacgtccaaaagtcaccaacccaaatagaaatttcgaaggccaaaatatatttgtgctaactaacttcaatatcgttaagcttagctcagagcaaataattgtgttggtacacacaattaaaacttaacaaatactacaagattgattgaccaaattataaatgttaaacatatggaccaaaatcgttgaataatatataaagcttttgacatttattagatttgttaataaacatgtgggagagagagactgactagtcttattaattttgtttaatcacgtggtttaaacttagttttgtaaattatcaagaagtaacggaaccgttaattccacgcgtaagtcaagatatttcatcgttaatttttgacttttgacgacggcttgaatcagtcaacgtcacccttcgcgcgtgaactaactaacaccaatgtttggtcaacgtcagacggaacaaaaccgtgatcttcacaaaaatccttaattaccgataagacacgtggatctcaagaaacgcatccacgtcacaccacatgtcagtttcgtttttgctttcccaacaagtttttgatagacgaaaattacggatttacccgtccgttgacacgtaaggcgacaatcacagaagcagcccacccactatttcctcagcccatcacgcgcttttacttgtaaagttaataacaacaaaaagagaagtgatgtgattggcccaattaaaataaaataaaacgtactgttcacacttgatgacttatcttcatgaagcaccaaccatataaatttggtcaggtctttattaaacaaatcaaattatcttcctcactcgttgtttcatttcttagagccgtcgtttcagatttcttcttccagagagagttaaaaagagtaacggtgaggtttggatctaatcgaatcaacgatggaggttgcttttccatcttcgccgccggtgaaatgcatcgccgatgaaagattaacagagatctccatggatttcaccaaattaggattcccagaagaagatgaagaaattaaaaaattggagagatcgtggagtaagctcgaagaatccgtcgaatttaacgaagacgatgaagaagaagaagaagagttttcgtttgcttgtgtaaacggagaaggatctccaattaccgctgatgaagcttttgaagatggtcagatccgtcctgtgtttcctctgtttaaccgtgatcttctcttcgagtacgaaaacgaagatgacaaaaacgacaacgtttcggtcaccgacgagaacagaccgcgtcttagaaaattatttgttgaggatcgtaacggtaacggtgacggagaggagacggagggttctgagaaagaaccgttgggaccgtattgttcgtggacaggaggaacggttgcagaagcgtcgccggagacttgccggaaaagtaattcgacgggattctcaaagctttggagatttagagatcttgttttgagaagtaacagtgatggaagagacgcgtttgttttcttgaataatagtaatgacaagactcggactcggtcttcttcgtcgtcgtcgtctacggcggcggaggagaatgataagaaggtaataacagagaagaaaaaggggaaggagaaaacttcgacgtcgtcggagacgaagaagaagacgacgacgactaaatcggcgcatgagaagctatacatgagaaacagagcgatgaaggaagaagtgaaacacagatcgtatcttccgtacaaacaagtcgggttcttcactaatgtgaatggtcttagcagaaatattcatcctttctgacaaaaataaaaattaagtttggtttttgggtgatttttttttgttttttggttatgtaaaaaaaaaatttaatttagtactcttctttggggtcacttctgcttggtagattgaaattttaaatgattgcagaaaggtgtactgttttttttcactattttctggtgttattgtgaagagtttggcttgtgtactaaaccattttgtaagtaaaaaaatatataaaatagttcgatttgcttaagtagattttagtaaaattgaatgattttgcaaaagaagactgatatcaactggtatacttcagctaaatgataaaagctcacaagaagttaattgatcttgtgaggacactagatgttcgttgatcctagagtatagctgaacaacttgtctttttgactgtgttgaataattgttgatatctcaaaatgatgctgaaacaaggaacaatgtaaataatcttatcgttctcaaaatgatgctgaaacaaggaatacaatcttctaaagaggctaagagtttgttgaaaaaacctccaactcaaagagcacaggaaaccgaagaaaacccaaacgaaagacaaagcccaacaactaaaagtaaaataaagagagtccaatatgagatgatagtatagaagtgggaaaatgattttttcccctattttggcaaagaaaataaaaagccttaatcgtcctttgtggcaagcaaaaataatttttgttttttcccttgacttcaaattgttgtgaatctttaaagataacataatcatgtctttatgtgtaaagtaactgaccatatttaactggtcatttgaaaattatatttaactatatcagaaacaatcatataggcaattatattagaaaaacaattcttgttgtttagaagttaaaagtttagaatgaaaaaaaaataaatatatatatatatatataacaataattattgtacaattatatttccaaatagacaactatattaacaaatactcatcgttgttacatttttttctttaaaagaatataaattggagtcaatttaaacatgaataactttctttttaacgtctatctagaaatcaagaatacgaagagtacatgatacaaacaaagtacgaatcaaatcaataaacaaagtttagtaaaatttgaaaaaacaacggacgcagatctacattttcaagggaagcaagtctataaacaaagttagtaacgccaattgcccccatgcggcatcactttgccaagccccaatttagttcattcaacattttatactgatccgtccgaaagaaatacaaatgaggcggcaaaaaatcgacgttaattacaagtacgattgaagccggatacaccagacattttagaacagagactgctaataatcattgcatcttcttctctgaataactattttcttactattattgtttattgtcccagatataaacatctaaattttgaatgagtttatcattctatttttcaccttattattaaaaaggttattttctattacattcgcggcaatattcgaaagcaaaacaactattctaatatgatttttttttggacaattttatgttcgttatggcatatcaattcatattttcatgtagttaactatttctatacatagaaacgtgattctattatgtcccattatagatagttgacaactttttgtaagcaaaagaaaaaaatgatgaaattatcagattgactgtatatgttaaaaacttaattggatttttctttatcatacttacttaaatttgatatagaaaacaaaaagaatcaaaagaagcaaaagtgaaggagagacatcacatgtgatttatgcatgtagaaacttttaacctgggtaatcttgttatgagaacattcatctctgttagtatcaatcatagagaaccaataagaatttagaaatacgagcatagaataattatttggtttctaagtttgaaaatttccactagctactttctccatcaaaaacaaatagttagaagaagaagaaacaaaataattggctcgttgacaaaataattgaacaatgatatgcatttttcttcacgaacttgagaatatacaaatgcaaattggatagttgacatttgatgcacgttcttgcacgttacctttcgtggtagtttggcgcagacaagctttcacgattactgagatgtaagcaaaacaaaaagaagaagatggtaaaaccaaatgctatataaagccatgcacaggtaatgtagaatgacaaaacaaagcaaacaacaaaaccaacgcagtgaggcgttggacaagcaatcaaaataagaatgatatcttctccagggatggggcgttctgcccatcttgtttatgctcttggttttattatcatggccacaatggttgctgcgtcttatgagccctacacgtatagctcaccaccaccaccattgtatgactctcctacaccaaaggttgactataagtctccaccacctccatacgtttacagttctccaccacctccactatcgtattcgccatctcccaaggtagactacaagtctccaccacctccatatgtttacagctctccaccaccaccatattactcaccatcccctaaagtcgaatacaaatccccaccacctccatatgtttatagttctccaccaccaccatattactcaccctcacctaaagtagattacaagtctccaccaccaccgtatgtttacagctccccaccaccaccatactattcaccttctccaaagcccacatacaaatcaccaccacctccatatgtttacaattctccaccaccaccatactactcaccatcccctaaggtcgaatacaaatctccaccacctccatacgtctatagctctccacccccaccatactactcaccctcacctaaagtagattataagtctccaccaccaccgtatgtttacaactctccaccaccaccatactattcaccttctccaaaacccacatacaagtccccaccaccaccatatatttacagctctccaccaccaccatactattctccttctcctaaaccagtatacaaatctccaccaccaccatacgtctattcctctccaccaccaccatactattcaccttctcctaaaccagcatacaaatctccaccaccaccgtatgtttatagctctccacctcctccatactactcgccttctcctaaacccatatacaagtctccaccaccaccgtacgtctacaactctcctccaccaccatactactctccttctccaaaaccggcatacaaatctccaccaccaccatacgtatacagctttccacctcctccatactactcgccttctcctaaacccgtatacaagtctccaccaccaccatacgtctacaactctcctccaccaccatactactctccttctccaaaaccggcatacaaatctccaccaccaccatacgtatacagctctccaccaccaccatactactcgccttctcctaaaccaacatacaaatctccaccaccaccatatgtttatagctctccacctcctccatactactcgccttctcctaaacccgtatacaagtctccaccaccaccgtacatctacaactctccaccaccaccatactactccccttcacctaaaccatcatacaaatccccaccaccaccatatgtttacagctctccaccaccaccatattactcgccttctcctaagcttacatacaaatcctcaccaccaccctatgtttacagctctccaccaccaccatattactctccttctcctaaggttgtatacaaatctccaccaccaccatatgtttacagctctccaccaccaccatactactccccttcacctaaaccatcatacaaatccccaccaccaccgtacgtctataactctccacctcctccttactactctccttcacctaaggtcatatacaaatcgccaccacacccacatgtatgtgtttgtcccccacctccaccatgctactctcattctccaaagattgagtacaaatccccaccaacaccatatgtttaccactcaccacctcccccaccttattattcgccttcgcctaaacctgcatataaatcttcaccaccaccttacgtctacagctctccaccaccaccatattactcacctgctcctaagcccgtatacaaatctccaccaccaccatacgtgtacaactccccaccaccaccatattactcaccatcccctaaacctacatacaaatctccaccaccaccatatgtatacagctctccaccaccaccatattactcacctactcctaaacctacatacaaatctccaccacccccatatgtctacagttccccaccaccaccatattactcgccttctcctaagccaacatacaaatccccaccaccaccatacgtctacagttctccaccaccaccatattactcacctgctcctaagcccacatacaaatctccaccaccaccatacgtttacagctccccaccaccaccatactactcgccttcccctaagcctacatacaaatctccaccacctccatatgtatatagctctccacctccaccaccttattactctccttctccaaaggttgagtacaaatctccgccaccaccatatgtctacagttctcctcccccaccatattactctccttctccaaaggttgagtacaaatctcctcctccaccgtatgtttatagttctccacctccaccaccatattactctccttctccaaaggttgagtacaaatcccctccaccaccgtatgtctacagctccccaccaccacccacgtattattctccttctccaaaggttgaatacaaatctccaccacctccatatgtctacaactctccacctccaccggcgtattactctccatctccaaagattgagtacaaatctccacctccaccatatgtctacagttctccaccaccaccatcatattctccttctccaaaagctgaatacaaatctcctcctcccccatccttatattactaaattaatttattaaagtcataaataagatcaccaagtctcatttgatgtcccgtctattttcttcttcttgggcttgaatggttttatctgatgtcagatgaactctctggttattaaaattttatttgcatttttgtttgtttttctttccattgtgtaaaagttgtttcaatcttgaaatgtatcagttacaattatatatattgtttctttatctaaagaatactaatttacctaattaatactctctctttcttattaatctgaatttagaaaacaagttgttacaaacatacaatttttatgtatttctattagttattaatgatgaattctaagcaaaataaaagaatattattggtttataataatgaaaaatggttaattacaaaaagtgatttatttataatcaatttaacatatttgcttaatatgtataagaaaaaaaaaacaagaataattagggatataactatataaggattattcgttttaaaaaacataaataatatctaaaaatcagctagaaatattatgattttgaaaaccttacccggagtttttgttaatgtgaggtttagtgaacaaaaactttttagtttgataacaatttgtaacattttcgattccacatgtcaaatatgtcgtcccattttcgattcttgaatccaatgctgatcgtattcatattccggaaattttgaagatcttagtccaaaataaattgggaaacatttttttcctaactaattacgttaagccaatctaaactttttaaatcacgattaccaaagttattgaagcaaacattcttttttatagactgcttatatttggtgaagataatgttttttttaattgaatggtcgatattttcaatgtatttaaaagaattacagagtgacaaggaaaaattcacaaatttccctttgtctttaattttttgtagtgcaaatgtaaaagcatataatttggcacgaaaaatttataccgaacagcatcatgtcacatatgtaaacaatatcatttgggagtgcctcgtttgaactctaattaatttcggttgacaacaacaaaatggtaaggcataagtttactgtattatcttaaaacattggcaatttcatctttttgctctagtgtatcattagtagtatcttgcatatcctttatatattgaaattttaaatatcactataagccaattctgtagatatacgtaaatcttttagattatataatatttgatatgaaattttgaatattataatttaattgattgtctatctttaactaaaattaataaaattaaaatgtataaaaactttttgataaaacattttacgattatagtttgggtcagctatatagaatctcttgttggttcaattttttctttcgaaagattgtcgggtgctcagaaatagtggcagggtaacctgctagggtggttctttcttccactaggctcactgcggtgtctggtgaaggtttcgttcctttgaccatgttttgagagaaaaatgacctaacaccataacacagtcaagatattttcgggaggtaaaaaaaaatcttctgaaaaccctcatgcatgttttaatcaaaatggatcaatgtgattgtgttaggtcatttagttgaagtgatcgaaagcctaatatatcggtcagtggaaaagtaaaagagaataaaaatcacttccctaagtgagattgaaactcttttagagatgattttgatcatgaggaattgaatccagttgttcaggaaatggaaagaagagtaattttagagggatcctttcatctatcaatttttctgagtgtgagaaatggtgtattatgggagtcaagttttgtataatgttcttgtgtatttgtgagtatcctctagattgggctattctaagcatgagggctatgctttgctgccttacatattgtggcccacatgttgtggcgatgacactcacctacagtggttaattgacctagtttgctaggatgggaggtacgtctttgttggtggagaggtgtgtataatcaattttattgagacataatatttcgtcactatgtcaataaatctgtaataataaaaattttgtgacgattttgtgactaactgttaacggttgcaatacattcgtcacaaaattgttttctcggattgtttcatccgtggcaaagcgcgttgcgctcttaatctcttacctgcttgcggaaattcacccccaaaatatcattaaattcaatacaatgtgttaaacacgtatagtatatcgttagtattatttataggcttgcttataagtaaatttcgttacctatttatatacagataagccatacaaaatcttcactaatttacctaataattaattatttaccgcactatcatctactaagctttaaatgtgttaatttcttcatggaatcgagaagactttaagtatatgcagtttgcttataaacgcggccttgtaattttatgcatatgacatcttatcgtgcatgatctcagaaacagattaattggacatatagtaatgtgaatataaaacctaataaagaaaaaaaaatcaaatggtcacatttattgaaaataagatggtgacatgataatacaaagaagtttatctatttgtctatttagcgacctgtttatttaattcgtttgggcttcgttcaattccgcaggctatctttcacccgaagcaactaaactatagtattaaaagtatatatggaatagcttgtaattaggttttataattgctgctaattattactattatcgttattgaatattcaactgaatcgggccatgattagcgatgaggtacatgacaatgaaacatgcatgttcctcaaattccaattgatatgatggaagaaaacaatacaatgcccgacaaatttgaaaatataaattttaaaacaatgttaacaaaggaaataatataagaagaaaatgccaaaatagtggtttttgacgaaaatgtatgagttctaagaaccaatgaaaaataaaataagaagttatctttatagtaacgggaaattcaactaaaacatgttttgatgagatttaagagtttcgattcgagtttaattttattcctatttaaaacttagaaaattctacactattttctctaagttttctactttacactaactctttctatcaatcttcagcaatttattgattgtctcttttatccccctatactgaatatatgagcgatagttgactggtactaagatgtatttagacataaaactgactttgaatatgagaactggcccacctcctttgattatagatccacccctgtatatatgtttttttaataaagcaaccacgtctccgttccatgcatgtaaaacactcatctacaaatgttttaaatacaagacctttttcttacaataataaaacacatatcttatgattggtaacccttagaaaaaggaaaattaatggtgccaaaaaaaggtatgccaaaaacgttttagtgatatgaaaaagaaaaaaaaatgcaaattctatcaaatttggttaaaaaataattggaatttctaatgcaataaaaatcatgtcattgttattacttcaaatatcccaaattcagaaattattcatccttatatttatttatttcgtaaaaaataatctatagtaataagttcatcatagaaatagtctgatatccaagacagaagatcaatacaatcatagtaaaacttagagtgtatacttaaaatttagagagtcaaaattcatcactgtttaataataataatattaaccatgtaatcatctagttggtattcattgacgaaaaaacaaaagtaattgaaatcaaaatcaagaccgatacagaacatggagacacggaagaaaaaatgatgaatccattgttggtgtctattttcctttgttccctcaaaatattctaatgttggtggggttttttccgccatgcaaaaaacgtattgcattttattaaaaaaaaaatccctttttttttctctttactaacccgaaaatttatgtttggatagcaaaaacattccttttttacagttagaaataaataaataaaatcgtcaaatttgttaggaatttttcttctaaaaaaacaagcatacaattccgggtaatgagaaaatgtcacagatcttcggctataaatagaggagtagctagagagcatcttcttatatcaactaaactttgtattcatttccaagtatcactctaaatcatctttttcgaattcgcctcccaaggtccgtctagaaaactaaatcatcttttcgtttttgtatagatcatatcattatgatgatctcgatctctttttctgtccactcgtctacatgtgaccgctattatagttttcgatatccggttttttatgttaactccttcatatagctagattcaacgcatgtttttttatttgtaaagccggaattaattcgaccagtttcttgtatttgtttcttagagtctcttaggaatcggacatctaataatactcaactcaatcagataatcattttcttatctaaattctttgtgttattgtgttattggaacaaaaagatatgtcgacagagtcgtacgaagacgccattaaaagactcggagagcttctcaggtacacacacacacgtactctctctttctctcacagtcagatccgacataatggatttttcaggctgtgggatgatcacagccgtagatcatttagccacatatttatatacctcactacctcgtaccctgcgaattatttaagaaaaatgggttttttttttttttggtgaacgaaaaatgattttatttgtcttccttaatttttttttttttttttaagtatggatgaaatggtcaaatttgcagtaagaaatcggatctcgggaacgtggcagccgcaaagatcaagaagttaacggatgagttagaggaacttgattccaacaagttagatgccgtagaacgaatcaaatccggatttctccatttcaagactaataattatgagtacgtaaagttatattccatattcgcatttttgatgtttttatatcggtataaatgatccacctttttgacctactcatatcttaattgtgcttataaagttaaagaaacttatttaatctagttactaaatcaaagggagcataagacagaaaatgttttttcttataaatataattatggattgttttacatcttggttaaattattcaagtgttaagttttgaatttgatgtttggtcattatattatttggtttcatcaatttccaggaagaatcctactttgtacaattcacttgccaagagccagacccccaaggttttgattctaccaatttacatcattcttttttctcctcttagacctttgacttatctagtttgaagattctctaattgcccccaaatgggtatgaaacaagggaaaaagcttttgatttagtaatgaatatggtaactttataagcaagcaagaaagaaaccctaaaattagaaacgagggttaagacttgaaagatatacatttatttcaatgtgattttttttcttcttgcagtttttggtgtttgcttgtgcggattcacgagttagtccatctcacatcttgaatttccaacttggggaagccttcatcgttagaaacattgcaaacatggtgccaccttatgacaaggttcgtctaacaaaaatgaatttcaaaatcactctcattaaccttacataaacataccaaaattttgttataaaacaactaactaacataagcttttgtctctggaaacttgcagacaaagcactctaatgttggtgcggcccttgaatatccaattacagtcctcaacgtacgtactaattagttaatatacctctacgttaacatatatgatcgatcattagagatgatttgtacatgtacgtactaattgtacatggtcgacataagattcttagtaaaaagttgatgtgacctagttctaaccctaaaaaggaggtccctaaaagtgttcaccaaaaaaataattgagccttgtagataatgtaatgctgtcattatcaggtggagaacattcttgttattggacacagctgttgtggtggaataaagggactcatggccattgaagataatacagctcccactaagacgtattaatctcaaaggctaatttaatcaaccatgagtttcttgtgattagttctcactaacttgatgtaaattcttgaaaagggtagcgagttcatagaaaactggatccagatctgtgcaccggccaagaacaggatcaagcaggattgtaaagacctaagctttgaagatcagtgcaccaactgtgagaaggtacgtaagtcgtaacaagacaagacaagacacaatctttgctctgttttttctaacttttaaagtagaaaactgagattgtctctcatgtgtgagcaggaagccgtgaacgtgtccttggggaatcttttgtcttacccattcgtgagagaaagagtggtgaagaacaagcttgccataagaggagctcactatgatttcgtaaaaggaacgtttgatctttgggaacttgacttcaagactacccctgcctttgccttgtcttaaaagattcctcctactcaaatattttctctatgttgtttctaattatgttcttataatcttcttctgttgcttctgtaatgtcatctttgctacttctattccaatagaaatgaataaagctttaaagagcatttacttttatttccaccctcattaatacaaagagaagataacacttgctatgcttatacacatagatagataaaggctactacactcaagccagccccttaaggaatgggataaacaacgaccttccctgtggcatggttcgtttctaagtatgaaaaagcatcagcaacgcgtgagaatgggaacggtcctttgggatcaaccacaggcttcaccttcccactctcaatatatgggttaagtttcttcaaaacatcgccattagatgtaacaacgaatcgaaaaccaggaggcgtgacagctccagtcaatgccacaactttccctccttccttaatcaccttcactgccttatcacacatcccttttaacaacacaaaagatgctctaatcagaacgttttgttgcaacaaattagatatgtgttaatggtgttgtgttttgtttgtttaccaatggcgtcaaagacaacatcgtacttgtcaggcaagtcttctatattctcctttgtgtaatcaatagctaaatcagcacctaagcttctcactagctctagcttttctgtactcgcagttgcagctacttttgaagctccatacacgtgcttcgccaactatatcgaacacacatatgagtaatcaatcaacaacaattaatctctgattcttagattacaaggaaccaactattacctgaatcacaagactccctactcctccggcaccattaagaacaagaattgactttccggctgagaattcagtcctaactaaaccttcatcagcggtttctatcgccaacggaagccctgcagcttgcgcaaaatcgatgtttttaggttttaaagctaataacttctcttccacggccgtgtactccgctaaagaaccaaactgctttggaccttccaatgctttctcgctcacgttagcataaacttcatctccttctttcaaatccttcaccgcacttcccactttcaccactactccggcaacgtcgtatcccggaacagtctactccgacgaaagattcaaaatgttaaagaatccgaaaccttcaaaaagagtgagagagagagatttgaatttgcatttaccgggagaggcgaatcagtggctttaaatttcccttgccgtctcttagcatcgacgggattaagagccgccgcaacaactttaatcaaaacctgatcttctttaatctccggcacaacaatgttactctccagcttcagaacatcaactccgccgtagtcactatacacccacgccttcatctctttcggaatcgaagcatccgccgtgacattgaccgccgctgaagcgctctgagagctcgccgagattttcaagaatttcttgctgactgtttgcacgcaagatccgaatctaactctgttgatttggtaaaccggcgattttgttgtgagagaacaataatgaagaagaggcgtctcacggcggagtacgggagttgtggcggtggttgttgcaagcgctgcgttcatttttcagtctgccactagttttgtctaaaaggcttatctctttcgctttcctctgtttttaaaatactctgtttcgtggctttctttgattggttgatattttcttgtggttgtcattttaatgtttatatcacaaaaattgtggcccataatcgtttttgatctggtgctgattttgtgattcatctttgtttcatttcttttagaactacagaagtctagaacaatcacaaaacacttcggtttttgaacattacaatgtacaatttttacgtaagaagatacaatcgacattaatgggcctaaactttaaattgggctttatgaataagcccaacagttgagaaaacgcagtactaaaagtcgatcatctaggcacgatgagattaaccatagaaaccgcgcacaacgaagcacgatcagtacacgtgttaaattatgattgggtccttggtagagattaaagatccaccgtccatttccccagaactagaaaaaagagaagggagaaaactttctccgagctcgattgtttttggaaatcgtcaatcagatatttctcgttcgtctccgccttcgatttatccaaaggtaagctattgataaaaaaaactaaatccctgatatttgattttgaatctcttatactcatacattgctgttcatgtgttgttgtcttgatttcaaatctgcccagctttttgtaataatgatgcatgcactatgtttaatgcttgagttcgatttccctttgtttcgggttttgcctcattgttataactcggtcgaaagtcatctcctttacatgaaatttctgttgttaagattatatggaatgtccttcattgttctgctttctaattcttgtgtcaatcttatctaaatcttataaatcagcatttgcattagaagatttgatctattttaaattggttaagaagtgaaatgattgattgtcaatgcaggctcttgttattgaaaatggcagattccaccaaagcagggttgaagaagccagctttcactaaggttgatcagctgcgtcctgggactagcggacacaatgtcaatgtgaagattgtcagcacgaaaatggtgttacagaaaggtcgtgctgatggtcctcaagctcgccagttgcggatttctgaatgcattgttggtgacgagacaggagtgatcgtctttaccgcaagaaatgaccaaggtactttacttcagtcaataaatcatttgaaaaacaaaacgttcatataacggtttgtgtacttgattctagtaatgttacagggtagctagtaatatcttgatttggttttgtgtgtagtggacttaatgaaagagggatcaactgtaactctacgcaatgcgaaaatcgacatgtataaaggatcaatgaggctagctgtagacaagtggggtcgtgttgaagtcacagagcctgcgagcttcaaagtgaaagaagacaccaacatgtcccttatcgagtatgagctcgtaaacgtcgttgaatgagtgacaaattcctcgaaataccactaggagaaacgccctcaagaataaacaagtcaaatccgtaaccgtttatgttagcgtcaagaaaagagttaaaccctgatcagctgatgtcttgcactaagctatgtaagagtgatgatggctctaaaagttgaatgcagagcttttggcttaggttatgacttcgtgataccttttcttttgtaatgtcatcatacacgctaaggcttttgtgctacattattactctctttgtctttgcctcgtttcaaaaaatccatattcttagtgaagtaaacagtaactgcaagcctctgttgatcaacgaccataatgattatctttctattttggggttatatataaaaatagaagtttaaccaaaatgcaactcgagatgggcttgaatcactttgttaatgattgtggagaagaaatgttgtcgtgtgaagtgatgggacttcaaatgtgtgtcatcattgcgtcatgactgatggcttcttggtttcctttgtcttttaatatgtttatcttcttacatttttatatgtttgtccttgtcacgtatcggtaatgaaacttcaaacttgatataataaacgaataataggtatgaatactaaaatagttagtgaagaaacagtttctaccaacaaaaagtaatgtatcttttcatgagtgttaagtgggcaatgtttagtgcgtttagtcctttttagtctttagagctgtttccttatctcttcctcttaatcaaaattttctaatacgatttattcagagattttaatagagtaaaatgtgacatttcggtattgattgattcatagattaaaaactatataagccttggttccaacttccaacttccaacttagaaatgtgtatatacacacatttgcatcgataataactcaccaacactctctctgtctccatcgaatgtttcctctaactctcaacaaaaatgcgcaaacaatttgtttttcttctgcctttcttgtcacgtctctaccatgtaagtcaaacctaaatcgttcatttgaatccgtttgtttcatttctctataatcgattcacttcagattttattggatttgtttccgtttattcttttgatcatttttgaaatttttgtaacttccaacaatgcaggtagttatagccggaggagaacggttaactaacggcggtttttcaccggagataaatccgttcacacccaaagcgtctttagtacgttactggaacaaacagatccatcaccaatcacccggctcagcctttctcctctccaaggcttcaccacttaccgccgtcgcctccgccaccttcgccaaactcgcctccgaaaacgctcttccggatcgcctccccgacttctgctccgccgcaaacctcttctgttttccagatttaggtccaaccctcgagaaacacagcaacgacgttaaattctctgtttacgaccaacgaaacttcaccaactacggcacgattcaccccggcggtgctgactcgttcaagaaatattcacaaaacggtaacgcagtaaccgactctttccggcgatacagccgagacgccgccggtcacgaagataaattcacaggctacgctgataacagcaacgtcgtcgaggaaaaattcaattcttacggcacatcagccaccggcggctccggcgattttaaaaactatcaatccggtgttaacaatccgacgactcgtttcaaggcctattccgacgaaggaaatggccgtgctcagacgtttaaaacctatactcacgaagccaactccggaccgggtcaatctttcaccagttacggcaaaaacggtaacggagctccaaacgagttctcttcttacggtgtctcctctaacgtaatcggatctgatttctcaaactacggtgaaaacggtaacgcagccaacgacactttcaaaggctacggtggtgacggcaatgttcctcagaataacttcaaaagctacggtgcctccgggaacgctgccgttgacacgttcttgaattatagagacaatgctaacgttggtgatgattcgttctcgtcgtatgccaagaactcaaacttcgagaaggttgatttcgtaaattacggcaaatctattaacccgggttcagagtcgtttagtggttatggtaaaggagctgagggaaacaaaattgatttcaaaacgtatactcagaactctacgttcaaggactacacgaaaaccggagtcgaatttgcgaaatataaccggagtagtctcggtggtggcaaaacggtaaataagtgggtggagcctggcaagttctttagagagtcgatgcttaaagaaggtacattgatttggatgcctgacattaaggataaaatgccgaaaaggtcgtttctacctcgtagcattgtctcgaaactaccgttttctacatcgaaaatcgcggaaatcaagcgtgttttccacgctaacgataactcgacgatggaagggataattactgatgcggtaagggaatgtgagagaccgccgacagtcagcgagactaaacgatgtgtcggatcagcggaggatatgatcgatttcgcgacatctgtgcttggtcgaagtgtggtactccggacgacagagagtgtagccggatcaaaggagaaagtcatgatcggtaaagtcaatggaatcaacggtggaagagtgacaaaatcagtgtcgtgtcaccaaagtttgtacccttacttactctactactgtcactctgtgcctaaagttcgggtgtacgagtcagatcttttggatcccaagagtaaagccaagatcaaccatggtattgctatatgtcacatggacacatcagcttggggtgcgaaccatggagccttcatgttgcttgggtcccggccaggtcagatcgaagtatgccattggatctttgagaatgatatgaattgggccatcgccgattaaccatgttgtagcaaaatgaataatgaatgttaatgttttgtatctctatatttcagtaacgatacaaacttactatcttcctcatattctgttaactaaatatgttgtatcaggattatgtaaacattctaaagcaatgaagttaaaaaaaaatagcagtggaatgtaaattttctaaaaattattgaattcacctagacaatttaagttgtgggggtttaagcaaaccggttctacgagaatcagtccggtccaactgatcatatcatccaagttacggtgaccatgtttctttgtctggaagtgtaagactgattttactgaacacagttccaacattcagggaaatgttattgatacaagaatttctcaatgaagtaaaggagaagtgatgcaatgtaacatggggaagtcaaaagcttatttaatgaagattcactgaacttggtgagattttttttggggagaaacaacaagttatgcagcctataaagacatgtagcttagtgactagtgaggtccttctccaatttgacttgtcgtaatatacatcattttacacatcttactatttaagtggatgcatctatatctttaagttgaagatgatggtgtgttgaaaaaaatatgaatgtgcgtcgcagtaacttaggaatagatttttttttgtccgacaggtatatattactggtttactggtgaacatttagagtgaaagaaaatcgtatcactctcgtcagaaaattaaacaccccttcaacttctgacataattgaaatggcatgatcatcacaataacgattaatatggaatctaagagcaacatcaatataaactaaagtaaacgtttcccatatgcaacataacttcactaacaatcggctttgcaaatatggaatctaagaacaacagcaaaatacataagatcctatgttatcgggtagtttaaaaccttttttaatataaagctcataaaagagcaaccaaatttaaagcataatcattcccagagcaagagaacatcatccaaaattaaactaaagaaacatctaaaactgaaagatatttagtatctgaaaccgtagaaatgaggatctctagggtctcttgggccaaaacggtctctagggtctcttagtccaaaacggtagaagtcacttgggccaaaacggtcaaaaggctctctacggtctctacggtctggaaatagcgtaggaaatcgagggttgctcttttttatgggagggtttcgtcttgctaggagatcgagtcgtttccgtctccaaaaagaagcaaatttacgcttccaatcaacatcgcctgtatataatttccaaagacaacccttaccttcttccaagcatttatgttcccacaaatcattatctgaagccagataccgcatctctgtacaaacacaagccatatatccaatactcacaccaggaagcaactctagtatcttcagctttagctctgtcggtaggagcatcaaacaaggtggagattccaagccagccttatcacaaagaccaatcaacaacggtataacaagttcatcttttaccattctccacaacatgaacacttcccggtagtagctagaagagccctgcttctcaaacttcaaagtatccacaaccaaatcaataacaggcaaaaacctactcttatcaagagaagtcatgtgcactcgcttacaagacccacctagagttccgtaaactacaagcctagggcctatgttctgaaacctcacagtaactgactcgactgtattagtatccttacgtgtaattagctcaggcagagtataccttagagatacagaaagtaacttctttgaaaagctaaacttatcagagccatgatccaacaacacgaatccagattctaacataacggcatgtactgataaagccaaagcagtcaagtcactggtatcgccagatttctcaagcaatacatttttcaaaaagaatggttcacttaaccttttgcttttagcggcagcgagctccacatccattggcactggaccctctatacccgaatttcccctcttggatccttcgcctggactggaatcattatttgaatccgcgaatccagtatccatcgaatcttgaacaaccaccgccttgtttctctccgattgtgaagctagggtttcacaatcttcccgtcgatacaaattacaaatcttttaaaatttcattaagtgtagagtacatgtatatagatgtatattgggcgggtagttttaggcccattaataacaatttagctatatgggcctttggtgggtacttactacttaccatccagatccaacccgatcgattagagaaatttggaatgtctctcaattctcgaaggaaggttgatgagagtgaaagacaaacatggttggcctccgtgagagaagttctcaacttttactgagagaaccaatggaatatttattctaatagttcaaaataaaacattcatttgacggtgagcaatcattgtgatatcaaaacgagatggtgtattatttaaatgatacaaatgttattgcgaagtataaatttctaaaatatgtatgaaaatttcgtttgcaacatcacagtccgtttgcaaacatgaaatctaagagcaatagaaacaaaatataagaagccatatatatcgggtgatcaaaagctttacagaaagaaagaaactcataagagagcaaccatgtaacatatcatggcaagaagaagagaaaatcattcaaaaccaaataaacatttaaagatcaaacatattactatattagtgtcctcccaatttatttgctgatatcggaaaagccatatactacttctcctacctttagaaagattcaacagttccatttttacactcggtatgtttgctagttgagtcccccaagattgcatctgggagtaaagagctgtccccatgttcgtctgccgagcccacgtgctgattgtcccgggtgaataccaatggatccatgcatgcgatccccattaaaccatgtgaaaggagggtctccaatgattcgagggaatcgtatgccgcttcttcccgtggaaatgttccgccttccaagctggttttgcctccaaaaagtatcactagcagcagcaagctgtttttgcctccaaaaagtagcaaacctcgccttccaattaactgaatcacccgcttctgtcacaacaaaattattaacttcctccaagcacttctgcttccacaagtcattgtctgatgccagataccgcatttctgtacaaacacaagccatatttccaatactcacaccaggaagcaactctagtatcttcagctttagctctgttggtaagcgcatcaaacacggtggaggttccaagccagctttatcgcaaataccaatcaacaacgggataacaaggcgatcttttaccattctccagaacatgaacacttcacggtagatactcgaagagccttcttcgtcagatgtagaagtatccataaccaagtcgataacaggaacaaacctacgcttatcaagattcatatgcactcgcccactagatccacctacagttccgtaaactacaaccacagggcctaaattctgaaacttcacagaaactgactcgattgtatttgtatccttagacttaatcagctcaggtagagtatacctcagggatactgtaagtaactcctttgaaaagttaaacttgtcagagccatgattcaacagcacgaatccagattctaacataacagcatgtactgacaaagccaaagtagtcaactcactagtatcaccagatttctcaagcagtatatttttcaagaagaatggttcacttagccttttgcttccagctgcagcgagctccatgtcaagctgctcaacatccatcggctctggaccctccatacccgaaatatctccctctggatcttctacggaggtattaggattagatttcgcttgatcggggacaacatcaacctctgcgaacccaatcgaatcatgaacactcgtctgattactctccgattgagaagctacggtttcagaatctctcaatttccaattcgaagattcgccagcctcgagagagaagtaaattaggtcaccggatattaaaccaagagatcggagcgtatcctccggcgaaggcgtgatgagctcgtctttacgattgagcgagagatgaacggaggaaggcaccgtggggttgatccgtcgccggagatcatggagagtgtctgcatcggccaattcaagttttagggtttctctcgtctcgtgatgtctcaatcgtagcttcattatcgggctactacgatcttcttcttcgcctcacaaagtagagtcatgaaatgtgttgcgtacacatacagataaaaggctgaggcggttaccagttatgggccgtatttgggcctataaacaacttattatagtatatggggttttcgtggataaaggatttatgtgtcaatggaagattgatgagattgagtgagaacctatgaattggacatctcataaaacatgaagttaatagaccaaatggttcgagtttctgttaaaaatggttaccaattgtacaatcactaaccaaatctggctctagcatttgcaacaccgttagtaacataactttcaatgagcaacagcgatattattacctcaaactaatttgtagttatggtttggtatgtgtgttagcgcttttgattataaaaaactaaaaatattaaaatctagaaaaggttacaaataataccttcttgaatgtcaatcggattctgacttttttctatgtcacataaattaaattttgtatttgcggccaaatatattaaatggtacaaattcagaacatcatatattcattattaccatataaataaataacatcaaagaaattttttatctcgctacagttttcaccccataaaaaaaatgcaagcggaattgagcaagcccttacgaacttgtatccaacattattatcttcatatggtaattcatttgtgtgttgtcctatagtaaaacgtgtaagactgccttcaataaactgaagcatatcaacaatgttttccatcaaaacgaatttcggtttttaaaactcctcgtgttcatccaaacaataatttcggaggaaagaaatcatgacaagatgtcaagatcttaccaagtccaaatagttaccttgtgagaaataaaaattctacaaagtatagaatgagttactctaatgtattttgatgataaattcatactttagagataataaatatatagaaatcaattcctataaatctgaaaaaatagtagtaataaataccataaataactatttgatattatttttggttatcacaggtggtaactagtttgaaaaatggaacataaatactcacaacaacctaccattttcaaaaatgaggtggcgaatccacataaaacaaacacaatttcacatccaaacattattttgcagattttgactgattactaataacaaaattaaatgttttaaatatagttgactaatagactagaaaacatatgggattagcgtgggatgcgtacaataaaaacaagaagatccatccagattagatgtaattatacaaatcaataaaataaatcacgcatacgaatacaaaatacagtacaaagacccaccaccaaattcgaccgttgctcacaacgttccaagaaaaaaatccccaagtattttcttctttattcaaaaaagtttcgatttttattttcaattatcccaatcctctttcttcttcaactacacttacttaccgttggatctctccgacttaagtaacaaataaaaccctaaattcttcttcccgatctaaacccatttcttgaatttctcatctgaatcacaaagtctcgatcttgaaactcaacaacaatggcggctttagcccccggaatccttcaaaagctaatcgacggtatgaaaaccggagttaaaccgaccggagaacacagaagctcgttattacaagtcacagatatcgtccctattgatcttgacgagaagaatcttttaccgaaacaaggcttcttcataaaagtctctgattcttctcattcaatctacgttagccttccttcagatcaagacgacgacgttttaagcaacaagatgcagttaggtcagtttatctacgttgatcggcttgatccagggacacctgttccgatcatcaaaggtgctagaccgattcccggacgacatcctttacttggaactcctgagccattgatgagtacaagaggaaagattgagagttcgagacctagaagaggttcttggggtcaaaacggtgacgtttcgtctccgtttgtgttaaagcctgcacctttggattttgatcagtgtacgccggcgaaacataggcttggtacggggagatttatggcggcgtctccgaatgttatgactagagggaggtcacctggtggtgttagatgttcttatggtggagggcttttgtcgaaaatggcggagagtcctgctgcaatgatgaggaagagctgtgttgttccgccgagttcgaagtttccgagaagtaaaagtgtttgcgatagagagacaatggcaaagaactctgttctttttagtccttttaaatcctctgtaggtactttttcctctctgtttttctatattggcttaggcatcaaggtttatgagttaacaagggttttgcaggcaaagaaaaacgattcaccgcctccgagtgtacgtactagaagagcaacagcagcttccttgttggaagatgaaagagaggctccaaagtctacttcaaagtatagtaagctggaaaaacctgagaagagtttgagtctaccaggaagacttagcacactgagcaaggtttgcgtaaatgtgaatgttagattgaatggttagtcttttaagaatgtgtttggtgatgatactgagagatgtctttgtatctgaacaggaagctatgcaacagcgagagacggctcaaaagatagctcttcaggcattgagagaagctacaacaacagaaacagtagttcgtcatctcaagtacacataacaatctcttcttgattggtttcattgtatgatttatggatgtttgtgtttgaaatgttcttatggatcttatttgggacaacgcaggacatttgcaaatctgagcaaatcagcaaaagctgattgtccagctgcttgcttcgacaagttcttggagtttcacagccagatatctgaaaccatgaacgaaattgcttctatcgaagcagctgcttcacctgctactactgagaaaaaatctgaggatggatcattaatactacacgaaatccagcataactctattgatcaggagaaaacaacatcaaagagaagaattctcctgaagcagcagcaaaagagatcaaacgatgagaacaagaaccccgcagtttctctttccggattaggaaacacggcgaggttggttaaagagatagagaaagaagctgcaaattggttcatggagtttatagaaaaggctctggagaaagggatgaagaaatgtaaaggcacaagtgatgcagatgttaagaaggttccacagtctctgattctcaaagttgtaaactgggtggaagaagaacattctgctgataacacgaaacgaccagttcatccaaaagcatcacatatcactagaaagctcagaatcaagttgaagaatccttagaccataagcgcgattttgagatgttaagttgttccttctacgtctactgtgaaaaggctttcagtttccactgcttatagagagatttattcatggattctattgttattagtcaagttcatgtacacatcaatgaaactaataagagtttgtgtttattaatcacacattgtcatgtagctttatttgcaaaatgtattgaagataaattactctcaaaatctagaaatcctagagacacagtacaactccaggttttcaaagcaaaagtgcaaatcataaaccaaactcgagaaataagtgtaaccacctggtatggtttagagccaggcagggttcttgagggaagtaacaacagccttgacttgcaagtaattgttgagactgtagatacctttctctctaccaatgccactcatcttataccctccaaatggaattgatgcatcaagtacatcaaaacagttgatccaaacagtcccaactctgagtgctcgcatcagccggtgtgctgtgtcaagattctgtgtgaacactccagcagctaaaccgtaccttgagttgttggcccttgcaatcacctcatcaagatccctaagaaacatcaaaagccattagtaaagtttaatcagaaaatgtcaacaaagagaaagtttttggtttagcatttagatttgtacttgaatttcagtatggtttgaaccggcccgaaaatctcgtctgttgctatgagcatgtcatcctgcaaagttcaacatggtccatataaatcgattttcgcaagaaaactgtgacggtaataatcggtttacttactttcacatctgagaagacagtaggttgaatgtagtaacccttggaaccaagcctgtcacctccagcttgtaatgtggctccagcctcaactccatgtttgatgtacttcaggattttgttgaattgctctgagtctacctgtttttttgttccaatacaagttgaaatgttgttctgtttatcaccgacaacatggttaggctacggtttctaaatgatggtatgactacctggggaccttgctcaatgcctgacttgaagggatctccaacatttcgcttgagtgcacgagctttagctttctctacaaactcatcatacacacgttcatgtacaaatgtacgcgaaccagcacaacaacattgtccctacagttatacctatcagaaaaggctagattctaaagactgtagaaccatgaaaccataaaaaaaacagtacctggttaaagaacaaagcgaaatgtgcaagctcaacggcctgatccacatcagcatcttcacatacaatgaatggtgactttcctccaagctcaagagtcactgccttaaggttgctttttgaagctaactcaagaataatcttcccaacatcagtagacccggtgaaagcaacctgtagagtgcagaggatttatcagaaactctatagaaggcataacttttgccttttaataggataatttttcaaagtttgtcttttaaaccttatcaacgtccatgtgactagctatagctgcaccagcagtagccccaaatccagaaactatattcacaactccatcaggaagtccagcctgtgtcataaaatttcagttacttgagcaaaacataacatcaataaaacagaatctcactgaagagcacattgttacctcatgaagtagtttcccaacaagaagagcagatagaggagtttgctcagcagttttgagaacaacggtgttaccgcaagctaaagctggtccaagtttccaagaaagcatgagaagagggaagttccatgggatgatttgtccagcgactcctataggctcatgtaaggtctgcacatggtgtggaccatctcctggcattgtcattccatgtatcttgtctgcccaacctgagaaactcatcgaagaacaacatacaaaaatccttacaaagatcatgaaaaagtcattaaggtatacaatatgcatcagtggtttcactcaccagcatagtaccggaacaccctagcaagcattggtacttcaatttgagcagattgttcataaggtttcccattatcccaagtctcaagagcagcaatctcatcattatgtttctcgattaaatcagcgaaacgaaacagtatctttgatctctcctgaagaaattaacaaagctaagagtcatgtcaaaagcacaaataaaacacagaagataagcacaaaacaactttgttatatacataagctgtcattttaggccatggtccttcatcaaaagcctttcgtgcagctgcaaccgcgcggttcacgtcttctgcatcaccttcagacacttgagcaatcacttctccatttcttggatccaaagtagggaaagtttttcctgtagtttttaaacaatctagtctcaatatttttacgagcttaagatattgacaaggctaaacatttcttacctgacactgcatcaacgaatcttccaccgattagaagctgtgtgtgttcaactttcactggtggagtaatagtgttttcgacagcagcagcgaggttactgtatctttgagctcctctgttcatgcctaaagaaacaaacaagaacgcatagattcgatctaaatgagaccaagatcatcaaatccatcgacaagtaaccacaaaatccgaaaaactcggagatcattgatccgtatgaaagttaacagagacaatgaaaacagaacgatctcgatcattatcaagataactatgacagagaagcaatggctctacaaatggatcggatcgcatttagatacctctaagagagaagatagaacgtgaggaggacatgaaagagcgagagagcagcgaagaaactcttcttgatgccatggctaactttttttgttcttcttctctttctcacggtgatggtctcttttgtattggtgtgagaactctgtttatggaagcacacgagtaatgatttcgcatttaacgaacataagaaagaaccatttcagggataaaaatatcacattcgttccccacttgtcgtctacacaagagtcaaatcaaaactcgtgtcgacactaataatactacaatatcattttaatcattcatttctatatattattttagaattattttacttagtacttagtagtaccataccataatcttcggagttatagttgtagttgtagttttagtatcatagatattacgctaataaaagacatagtaatacactaatactagtacaatattcaaatatgtttttatttcattatatttctgtcatttattggattttttttttctgtgacaaatttacatatataatcactagtacataaactggaatattttacagaaatatatttaaaattaacatcatagaaaataacgatttttaagtgtgaatagagattataataagaaaaaagtgtgaatggagatttaaaaagtgtggtacggcattgaaggcgtaagagaaaagtattacgtcctgattattttgaagagatttgagtggttcacctaccacactaaaaataggtgattattttgcttatttatcgttattctatacaaatattagtaggataatttactagtaattatggtataagatagtgtcaactttgtgtgttggcattaaagattacgtttttaattgttattatgtgtttgtatagagataagatcatatattagtcatcattctatactaataatatttcttgttatcactaagatatgatcttgatgacaatgttacacagttacaatacgtataactcagtttggactttggatccaaccttacaaaaacagaacaattcgatggacaaggctatattttagccataatctccttattactaggtagtttcaagtttttcaagatttatatactatgtaattgttctgtgttaaaaagtgttggttttttatagcttttttttttgttgacacaaagcttttttaaaaaaacaaatgacgacaaatttatacaaaactgacagaaactggtttagttagctatggaaacttatatgagcgttaaaaaaatgctaatgcacattgattatcacgttttcatagttagaagtacgaaaaacctttaaaaaaatttgggatttccaaacatcttttcatgcataaccaaatatatatattttcatagtgcatagacattatcgatacgtaaacgtatttctttttgtttctttatagaaaattcattttagcatttacttgtttatctctaccaacttttcttttaatagatagataaaaagaagggattattgtgtcatgacttttttttctccataatgttttcgtataagattcgactatatatacagtaatagaccgtccgttcgaaattattaacacgaactaggaacaaacgtatgaaattgaaacatcattatcaaatgttcggtacttcgtatattatagaagtagctagctagattactaggatgatccaaaatacctcataaacactacactttgatagggaaaaaatatagttaacataaacaaatatcgtctctacaaagtaatgtattttttgctaaaaaaaaaggaaggtatatgtcaattgaaaaataatcaaaccaaatgtaaaaaaaaaagtatatgctaaaaaaaaaatgtacatgctgcattatgttgttttttgcgaaaaataggtcctgaaatgggctactattattagtgggccaaaccttgcgatccaattccctaatgacggtatagggcgtgcactggtggaagactagctattgatttatatatgtttggagtttggactaaaataaatagaaatatctgtattccaattatatataaaaaattctcatcgtctttgatatatagaaagtttttaaaatttcagtttcacagatgttaccagttctagttttataagcttatgctaattatctgatcaatgcaaacaaaagttgacaataataaaatgaagtctttttttttccgcaaaataaaatgaagtcaaatatggtatattcctactataaatatagactaagactcgtgaataatactcgaatcagtctctgaggttttgctggaaaaaaaaaccgaagagctcaaaacagagtgcgtttgtttctgggaatcttgaagcctctcacttgcgaagacgaagcttgcttgttaggtagttatcttcttcttcttcttcgtttcaattcctttttcgttcatctgaaatgtgaaatcatgtgacgtgacgattgggttaacgatcgaatttcgtatatgattcttttctagtttctttaatcagcaagtcttgttgttttctttcaatcgagactgattctagatgttcttaaggatcttgttcgatgaaatttacatgaatctgtattctagaagatgaactttgcatgaatcatccatatcgacgaactgatcttgttgttgttatggattaagtttcttgagatacaagaaaggcttcaatgaccaatctgatctgttttgatgaacacaaatctttatctttgaacaatggattaggtcaatttcacaccatggctggaggaagtaaatcaccggcgtcatctttggaagatggaaaggcatacgtcaatgctgtgaaggtcgcattggaggaagcggaacctgcaaaatatcaagagtttctaagactctttcatgaggtgatagcgcgaaggtgtgtttggtttgctcttaaacagtctaaagaacaaagacacatgtgagaattgattctaatgttatttttatctttgtaggatgggtatggctactttcagtgcacgcatgcaggacctcttgaaagatcacccgagtctgtgtcttggtttaaatgtcatgcttgcacctgagtatcagagagccatccctcccgaggctagcgaagagtttcataaggtggttggaagaagcgtaccacgtccggagcctaccatagatgatgcgacttcatacctcattgctgtgaaggaagcatttcatgatgaacctgcaaaatatgaggaaatgcttaagctcttgaatgattttaaagctcgcaggtatgtattagttcttttctccatgttatgtttgattttctcagtctacagaacaaatacattatgtaaattgattctgatgttactaagtctctttgtagagtcaatgccgctagtgtcattgctagggtggaggaactcatgaaagatcactcgaatctgctttttggtttctgtgtcttcctttcagctacaacgagttttaccacgaagcttaaggtatagagtgcttataggtaccatttgatatttcctatatgttcacttgcggtttaagtaacaaaattgtccatatgcaggcaaagtttcagggcgatggtagtcaagtagttgactcagttcttcagataatgagaatgtacggtgagggaaacaagtccaaacatgatgcgtatcaggaggtaggcttcttggtaggatactttgtgttgtgtgttgcactttcttagttctttggtttcatttgctttgttatcttttgcagatcgttgcacttgttcagggtcatgacgatttagtcatggagctttcacaaattttcactgatccatctactagagtctagagatgactaaggacggtactggaaggcttctaacgaaaagagagtgattttagttttcttttgcaaacatttgagtttggtttgattaacatgacattcacaaatatgctatgcttctatgttgaggtatattgtacaatgaattggcgtataagagactaaaagagagtgtatagtttcttttgttgaggtttctttgatatcaaatgttttttcactaaataaatatttcctcgttaccaagaagacatgagatttgggccgtgtagatattttttgggtcgtgtttgcataagaaactgagaggggaaacactaaaaaaacagagttcagctagaaacaaaaacagagaggaagagagcccaaacttacgcctggccaaaaaatacagagcaaaacaaacaaagtcaagtaattctaataacaaatatattttctaatttaagtaaaccttatatgaattacgaaattgataataagattttatagaaaaaaattaaattcaatatttatatctctaatttaaatatgttttgtatattttttaaaacaagatttggactaaattaatacaaatatctgcattctaatcataaaactttctcatcatatgtctttaatttatagaaagcttttaaatttcattttcacagattttaccaattatatacttttgcaactaaaaaaaccagaagactgcagtgtaaaagctaatgctaagattttactaattatctgctcaatacaaacacaaatcgataataaagctctttacatacaaacaccggattctactatcgatgatgcggatgcggttacatacatcaatgctgtgaaggaagcatttcatgatgaacctgccaagtatgacgtgtttttaaagctctttactgacgttcgcgtccatatatagatatgagttgttttctctcttgttatgtttggcatgctcatcatttcataagtaccaatccacagaacaaacacactacgtgaactgatcctgatgttactaaggtctctttttgtagagtgtatgtcgctagtgacatttctagaacgaaggaactcatcaaagatcacgagaatctgcttcttcgtttaaatgccttcctttccagctgagactcagagagtcctacatcccaatattgagcaacgggctgcatctgatgataacaaaagaagttccttgtagactgacaaaacataagcacctatgtgctttgattgagctttgaacccacaagagccaagatttagctaatactacatatgaaccaattgcttcctctactaggagctgtaccaaatcttattatcactgtacaaagtttcatattgttaaaaactaatttacacaagattacttacaacaaataaagttaaaacaaaaatagattatagagtttggaattggtaactaaaccaattgagagaacatggaaataacattctctagtctagtccgtccatgtttggtggtggtacagtatgagaattttgcacgtgagaaagcgcgtgtgctaaaaagcgagtgagcattaaagacacgaataaaaaaccagacataaaaagccaaaaagtttctctttaaaaaaccattaaaaaggacccaaaagttaaagaaacgatatattcgaggcaaaagtagaattatcatcacataataatttcgctacgttgaaaaaaaagtgaataaaaaaatgaaatgatattttcagttgtacgctcttctcttccttatatcttccgcttcacttcacaccaaaatcaccacctctcacaaaccctagttcctcctctctctcatttctcggagatattcaccagagcaataaccatggacgctaaagaaacctctgccaccgatttgaaaagaccgagagaagaggatgataacggcggcgccgctaccatggagacggagaacggagatcagaaaaaggaacctgcttgtttctccactgttattcctgggtggttctctgaaatgagtcctatgtggccaggtcttgtttccttcctctctctctctcaaaaaacaaattctgggttcttaaattaaaaagctgattttttttttcattggtttgatgatgcaggagaggcacactcattgaaggttgagaaagttttgtttcaagggaaatcagattatcaggatgttattgttttccaggtaacaaaaataagaatcatttctctgttttttcctaacttatttgtctgtgattatacttataaagacttgttttttatgtgttggttagtctgcaacatatggaaaagttttggttttggatggagtaatccaacttacggagagagatgaatgtgcttatcaggaaatgatcactcatcttcctttgtgttctatccctaaccctaagaaggtatacaatcaatccttttgctagattctgtgaccttgattgtgttgtgttgtgggtaatcaaaagtttatagctttggaatgtaatgaaaggtctttcttgaagtttgcatttttcttctccggtaaagtaggatgatgaaatcattagttatggagaaatagagaaaccagagttccttttattagatgtgtatatagaaactacttgagttggcattaatgattacattccagggtggtgataggaatgtccactagagaaaaggttcatgatcaccattttttgctttttatatgtacaaactttgatggcctcctgagaaaaaaaggtacatagtcccatgttcccttctggcaaagttagagaactcaagtaactttattgggttataataatgattcggaagaaacttatttcaatgggcttaaatgattagtctttagcttgttattgggggacttggttcagaaaaggttagataatcaagcttcttacattcagaattgcttttgctcccaagtatcagaattgggtagtctaactattttgggttatggtaaagtgggtcagctaaaaatgctgtttttgcttttagctagtaaagctataagccagagtgtatctgatcaatgcctttctagttcttccataggttttggtcattggaggaggagatggaggtgtcctgcgggaagttgcacgccatgcttctattgagcagattgacatgtgtgaaattgataaaatggtggtcgacgtgagtggtcacttacttttcacctttccttcttctctatttcgatagataaataccttgttatctaatttgtttccacctactggtaattttcaggtgtctaagcaatttttccctgatgtagcaattggatatgaggatcctcgcgtgaaccttgtcattggcgatggtacaatactgccgcttttttctctctttctgaaacattatgtagttatgttgaacacattttgccgtttcaaactgatcggttggtgaatcgttgcaggtgttgctttcttgaagaatgctgctgaaggatcatacgatgcagttattgttgactcttcagatccaatcggtaactactacaatcagatgtcatcagatgtcatcagaaacaacattattccttactgttatgttgaacaatactaaaaagcagcctttacttattgtctgtcaggtcctgcaaaggagctgtttgagaaacccttcttccaatctgtggctagagctcttcgtcctggtggagttgtgtgcactcaagctgaaagcttgtggcttcacatggacatcatcgaagacattgtttccaactgccgtgagatcttcaagggttctgtgaactatgcttggaccagcgttccaacataccccaggcatgtttaatgacctttaacatcaatctctctcctttttgggtgattataacttaacctgaatcacacttttcttattttcagtggggtcattggatttatgctttgttcaactgaaggacctgatgttgacttcaaacacccactgaacccaattgacgagagctccagcaaatcaaatggacctttgaagttttacaatgccgaggtaagataaaaatctctcagtataccatttcatgcggtctacacactcgaatcattagcttatgctctcatttcttgggggtttcagattcattcagctgcattctgcttgccttctttcgccaagaaggtcattgagtcaaaagccaattgaaaagggaaagaaaactaatctggaggatcgttgaatttatcaaaaaataaaagctttttacagtttttagaatgttctgttgtttcactcatgtttctgtaacacaatgcaagagcgactatgtcttcttttagcattacacattcgcatagtagcaaatcctatttacaacatgttcttatgcttttgcgttgaagctgagaagtctaataacctttctgcttttataccatttattataaagattcacactttgaattgatctcagccaaagtctcttaagcagcaggagttttagcttgttctacatcacgcttttttctcaaaaccatagttttacaatcatggtaacaggcaagacaagtcacccatttaagtaaattgccaacacaaatcaagcctacatagaagccagtgtacatcactccatttccactcgcactgcatttggagtataaacatggcatccttgtcgcaagaccgaagaccaagaacattaacatcaaccagaggtcacgcttctcatgtccttttctataccaacctgaaagagacagagcatctcctccgtagatgccttgaccatcttcgtcttcttccaagaccgaaacaaccaaacccatgttccatccggagctccacttactatactttgcagtcagaactataaatagagtacattgcatcagaagagtcagaggcactaccacgttgaatagacccgttggttggtagtggaaccctttgtattcgcgtgagagataaggaatggatacgtagttggttgaaccagagagaaactgaagaaaaaagaacaagaaaaagaaaagaaaaactgaggttgaccaaaggaggacatagagagatgtgatcagacaacctcctactctgttctgacatattttgatagatctctctaccaaataaagcagccctaacggctcttccttggatgtgtaaacaatcgaagatgctgcaacgatcgtggtggtggtaagaaggtcaagaatggtgtaggggaagaagtagagcagaaatgtctggatcagccatgaaatcagatcattctttttctctgatatgagaatcagatcattttccggcaagtcttctcccagaatgagtagtttccagaggaattgggaagtgagatagacggtggtttggagggagagctcaaagaagatcaagaaaaaaaacagtgggagagagcagaggcataggaagagcaagagattgatgttaccaaagagtagcttaagagctcgttttagtagttcgatgacacttagcttctcttcgctattcgtctccatttgttgatctctttctcacaattgaagtagaagaaaaagggtaatcacagatctgtatgtaaagtagaacatatattaatatatggttagcatccttcattgacttgttgacttattctacaagccactgtatggtaatgtttgactagtagggttttactagaagtgtcttctgatttgagaactattaaacttcaatttgttatttcaagtagagagcaaaagctattggtgatagagaaattgttaaagatttggtcacaactcacaaacaatttctctatgtagcaaaagcttttgacccaatctccacgtcaccctttttcctcaagacccttgtgttacaatcatggtaccaaacaacacaagaaacccatttaacgacattcccaacacaaatcaaacttacatagagaccagtgtacaacactccattcccactcagactttcactgcatttgtagtataaacatggcatccttgtcacaagagcgccgaccaagaacactagcatcatccagaagtcacgcttctcttgtcctcttaagtaccaagctgaaagagacagagcactacttccatagatgcctttactatcttcttcctcttctaagaccgaaacaaccatactaatgttccatcccgcgctccacttgctgaactttgcagccagaactatgaagacagtaccatgaatcagaactaccaccacatccaacagaaccactgcttgttcaaggaatctttggtcttgcaccactgcttgattaaagaatatttgttgttcgagtgtgagagaagcaaaatataagtagatggtcgaaccagagaacaaaccgaggaaaacagaggtcgacaagagaaggacatagagagatgtgatcagacaacctcctactttgttctgacatagcttgaaagatctccctaccaaataaagcaaccctaacggctcttcctcagatgtgtaagcaatcgatgatgctgcaacgatcgtggtggtggtaaggaggtcaagaatagtatagggaaagaagtagagcagagttgtctgaatcagccaaggaagaagatcattctccgacaagtcctcctcagaattgactagtttggagatgtatgtggaagcgagtgagacagtggtttggagggagagctcgaagaagatcaagaaacaaaacagtgggagagagcaaagaaagaggaagagagcgagattgatgttaccaaagagtagcttaagagctcgttttagtagttcgatgacacttagcttctcctcgctctttgtctccatttgttgatctctttctcacaatagaagaagagaggtcacagatctgtatgtgtagtggtggaacatgtaattggtaataagtctttgagtaatttaatggtcgtccttcattgacgttgacttcttgacttggtctataagtcactgtatgtaatgtttgattagtagtggggttttactagataagcttcaagtcttagattgtcaatttagaactatttacactttgttgtaattaaattatatggaaattagcaaaaaacttgatcgaagtattagagataacagtgaaagcctaactatgaagtgaagtcagttaatctaagacgtgtgtccaatatcattcttatgaaaacatatatttagaattttttatttcgtttta

SEQ ID NO: 55 - DNA, 99253 bp, Arabidopsis thaliana
aagcttcaagtcttagattgtcaatttagaactatttacactttgttgtaattaaattatatggaaattagcaaaaaacttgatcgaagtattagagataacagtgaaagcctaactatgaagtgaagtcagttaatctaagacgtgtgtccaatatcattcttatgaaaacatatatttagaattttttatttcgttttttttttatgttagagataagataaaattaagctttacattgtataagtgtacatgatcaaacacaactcaataatataactttcaataaatacttggccaagccatgaacactgatagtctcacacaacaatacattgggatatgaccttaatggcttaaacggagcaactataaggaaagcttgaagaggccagagctattggtcatgtagaaattgtttaagattcgagagctttggtttgatctaagacaatttatctatgcaacaaaagtcttaccttttgatccaatctccacatcacctttcttctccaaaacgctagttctacaatcttcataaaacactacacaagccacccatttgatcatattcccaacacagatcaaacccacatagaaactcgtgtacaacactctgtttccattggaactctccgtgcatttgaaacaaaaacatggcatcctcatcgcaatagcgaagaccaagaacaccagcatcacttggagaccacgcttctcatgtccttttccatagttagaagacagtgtcaaggcatcggttccatatatgctttgaccattttcttcctcttctaacaccgaaacaaccaaacccatgttccatcccgcactccacttgctgaacatcgccagtaaaccgagaaagatagcaccgtgaaacatagctaaaaccgcatcaaacaacatctttaccggactgttgacactgctgcttctgtaatagccttcggcatcttcttcaatgtttatagaatagtagtatgagttttcgcctgatccggtcagagaaatgatgtggaaatagttcgttgctacaaataagaagccaaagaaaacaggggttgacaagagaaggacgtacagagaggtgatcagacaaccttcaagtctgttttgacatatctctaccgttctccgaaccaattgaccgaaccttaacggttcctcctccgacgtgtgaacagtccaagatgcagagactattgtggtggtggtgaagaggtctatgaggccgtacgggaacaagtagagtagaaatgtctggataagcaatggaatcagattctccaagacggaagcatcttgaggaacgtagtagtaatcccaattagtgagttgtcgaacgaggtattgagaagcgagtgagacagtggtttggagtgaaagctcgaagaagatcaagaaacaaaagagggggagagagcaaaggaagaggaagagaacaagattgatgttaccacatagaagctttgttgctcgtttgagtatgttgatgaaacctagatcctcctcaatcttcatcttctttcacagttctcttcttctctacaaagaaaaagggagagtacagatctactacagttttttattcgtaaatatggagtcgtttcttcattgacgttgacgtaagaattggtataccaacaaatctgaaccaaattgcctcaaaaccaaatttagaaaagtattaaaatgaaaacatgtggcggccgaagaagaacagattaaaagtcgagattaattgggaaaagaaaagcataagtgggaaaccaaatcatgaacacaaaagactaagctaacacgtttttcacaagcaatataaaaaagaagcatccacaaatgggtttaatttaatgtaagtgtgtgatccaccaacagatgtgtaacaaagttgaccgaaaaacaaaagtgagtagagaaaccaagtggtgatatagcagccgagagctaggaagaggacggggtgaagaaacagattcgtctttctcaatagaagcttggttgcagacttggggtaggagtggtgagtaaagagcagggcaatctaaaagtcacacaatgtaacaagcaaattctagctgatgttggtcgagttgaggatgcagattcatgataaaactaagttgtggggagagtaagatgcagctgtgctgccaagagatccccgataaatcatacctcacaagggaaaaagagtggaaacagttgagctttttagatatgtctatataataaggaaagtgcattcaacaagagacaaaacatttatggatacgaaagaacgacctcaagtgtaggggttcaaggacgctgtgtgaagacagcaggccagtgcgtgttatagagaataagtcaagacggctgttggaaaacagcatgaaggagaactcaccaaatccaattgtctaataaaactcgaacataccatgacatgtccatgctcaacaaccaaacctagaagagctaataccataatagcagatataaagatctatcctaaaaggcgccacagagtagatatagcatcatagcttagtaatagcttctttctcttcagggtccagtttcacaccctgcagaaacgcaaacgaatatataccttatatcaaaatacttcaaatgttattcacatctacatagacaatgctgaagttgagtcatgcagattgagaaagtaaacctaaatccaagaagagaaaagaacttttacccattggcatatggcgaacgtcgaccatagggcgagtctctgcggcgaggagaatcacggcgtgaaccacgataaggaggggatctgctgtagctcctcccacggcgaggtggagtaacactgcgacgccttggaggagatcttcttccacgcgggcttatactcctgaacaaaatcaattccacaggaacaaaaatgtatgtcacaaagcgattataacatcaagaaaggtactatcaacattaacaactcagcccctatacatgattacaaagtgcaatttcaatggatatgttaacacaatggacatactaatgacatactatctcatctaagcagctcaataagaatgtttccgttggatcgttacctgcgagcatacccataatctggactcctacgacgacggggactagggcttctacgcctcacagagcctcgaccacggcgacactcgcgagcaaaatgtccaagctcaccacactcatagcacttggaatcctcaatacctccacgacgaccaccaccacctccacgacctcctttatctttatgagaaagctccacacgccacccattctttcctgaagtatacgccacaagagtaaaacttttcaatgaccaaacaataatacaaacattacatggtaactaagaggtctaatgagaagaacactaacgatccaatgcgctgattgcatccaaagcatctctttcgtcatcgaactcgaggaatgcgtagccaggaggtctacgagctacccagacactgcgatttttaagattcagagtcataattcgtatggcttgaaacaaaattgagtacagagataggacttacttgcgaagaacaccgaaggccttgaattcgtcttcgagttctctttcggtgacgcgtgggtccaaattcccgacataaaccctcgtcatgttgcaaagatcagttgaatctgaacgaaagagaatcgaattttgtgaagaaatatggatatcgataatagttacagcgagtagttaacaaggtacctgagattcttggtcctgagcagcgaagcgggatgttttagggttcagactcagactacggcgaggaaagagagtaaccaagttatttcattattatatgaaaactgaaaagtaaaaaaaaattaacatcatatattatttggtcatttattagttatttcatggtcccttatttttcggtaatccatatattcataaacaaagttttagcgaccaaaatgtaagactagtctcccatagtcgattagttaacgtaaaaagagaattgaggtgaaagcggattttgaaactatgcaaaacatctttgacaacaaaagttatgcaaacatgtttctagagtttgatgtctaattactgtaacttgacgtgattctcagtctgaaaaaaactaatgggcctaaaacccataaccttttggttaaaattttaaaaatatgagcaagtttcagttgcttaatggcccatatgagttggttttggttttcaacttttgcatcagtacttgtatcttcttaaattttcaaaatatagtaggctgattaaatctaagtttggagttggcaagtgtaacaattgttagttttacatataccttaccaatttacacatgattgggcacctaattcatgtgaacaagtctctaaacgattgcacacacacaaaaaaaaaagagtctcattgtttaaaattgcgtcgacgtaaatagaaaaggtttcatcatcccaccaaaaacaaaaagacacttatccattggggaaaacattctgaaccaagataagtcatgctgggtcccacttacatcgactcctctaagactgtgtctttgacacgtgtttagttatgattcgtttatttgcagccactgtgtagaccccacttacctccttttacaaaatcgacattcaatttacacgtgtcgctattccctggcttgtcccttaagctggacatgggaggaataagatactctttaatttttggatggctatggctaaatagatggctcagaagaaataagatggccataacttcattcgttatccaaagctaacattaattggttagtatcaaaatttctaaaattgtgaaatatttatagaatattagtatttaaaattatatctaattgtataaaaattttggggagtgattattagtgtcatgttacttattgtaactatcgttgtgcatatcaataaaaatatacggatttcaattttaaacctcacatttacagatatttagttagatatttaaaagggatatctgcaaaatggacaatatagatattcgattttttttatcgtagttaacaaatgcatgatatcatgtatcatatttacacatactattcttttttttttaagtctagtaaaacggataacgggttgaagaaggataaaaacatttgtatccagccaagccctaaattggtattgtcaagtggaagagcaagaaaagtaaagaagaagaaagtgtcaatctgattcggatccaattacccaatcctcgttggcttcctaaacaacgtgaaaacaaaacacggcttatatatgtcaacgttatttacattgacacttggaaccattaacaccaaatggggataatatcgtaaaataacacatggttagtactttagtgacaatcctaatgctgctttgtcccttggggggtttgagaggccaccctgacctacgtggtgcccttttaatatcaatacattcccgataatgtgtgcttacatgttttaattatcttagtttagtcatataataatgacttcgcttttaactatattatatttactatatgtaatatgtacatgcatgttgcattcccaatgatgtttgttccatttttatgtctttatctaagacttttagtaagacaagataactctaatgatctttcttttttgttaaagtaagaatatatatcgattcaattcatcttatcaatatggatatagtcttagatcgtgtgtagaagttttgttttttgaccaatacattaaattgttttagtctttttttttttttttttgccaacggattatgataattatttcttaaaacgttacctgcactttgtagagatgtgactagtcggtattttttttgttaacatgaaacgacttgtcgtcaacattagatttttgtatacatggacaccgccactttgatataaatttctcatgtcttaccaaatcatagattcaatatagctacttaaactatacattgaaatatttttaaaatacataaaaacaaaaactggaaccgtaaacaaaattgatgggatgtttttttatttgtttcacgggaaaagtttgtagaatttaagcatgctacatgcaatgttaaaaactgttgtatattgtaatttatttacaccattaacattttatattgtgtaaacttaatgatttggcaccagagttgagtttttcttagagtcatgtttacggaaaatctgattcattttggataaactcgtaaacgatagctcattataaaactaaccaaactatcattttattaaagtaataaaaaagttgaccagtaccaatatacgacctatacagagtaggtttgatgagatctcataatctcttaaattaaatacaaatttagcattacctttagattggattaaggattaaaattatttcatttgtttcagccgaaaaaagaaaatggtccaccacattatctagtcatcatctgatctactaccaaaccctacaataagaagataataagaggattgagggtaataatgtcatttacatacacctttatattattttattgccaaaattagaaaaatagatcgtaagaaaacgtgtatatgtgcatttggtattatgttattcggtttttatatttttcttgtctctcattaaattttcttctctatccaaactctgtatagcctgtccccaaagagtctcgagtccttatcgtgaacttttttgttcattcatctgttccacgaagaaaacaatttagatttctccgttgaagtttttcgccggcgatttagtgattctcggagaagaaggtgagtagcaatagtgtgatttttttcttttgggtttttgtggaaaagttttttattttcgtttcgttttgaactgtttcattcatgggtacagattgaatttgtgtgaaaacgtgttcttgagctgtttgttttcgggatctatatgtggcaagaatctcaattttgtgtttgatttggtctcgttgttttctgaatcatcttttggtgtggcattgtttgttttggtgatatagactcttgttgtaagatcattgtttcatcagttttaatgaaatgggtttgttttattttcaggtattttgacgcttgtaagtgtttagacgcgtgttggatttgtaaaaatccattctttggcttgattcttctctatggtgtcaagatcttgtgcaaattttctagatttagcatcttgggacttattggactttcctcaaactcaaagagctcttcctcgtgtcatgactgttcctggtatcatctctgagttggatggaggctacagtgatggatcctctgatgttaattcctcaaacagctcccgtgagcggaagattatagtggctaatatgttaccattacaagctaagagagatacagaaactggacaatggtgttttagttgggatgaagattctcttctcttgcaactcagagatgggttttcttcggatacagagtttgtttatataggatcacttaatgctgatattggtattagtgaacaagaagaagtttctcataagcttttgttggatttcaattgtgttcctacgtttttacccaaggagatgcaagagaagttctatcttggtttctgtaaacatcatttgtggccgctatttcactatatgcttcctatgttccctgaccatggtgatcgttttgaccggcgtctttggcaagcgtatgtctctgcaaacaagatattttcagatagggtgatggaagttatcaaccctgaggaagattatgtttggattcatgattatcatctgatggttcttcccacattcttgaggaaacggtttaacaggatcaagcttggatttttccttcacagtccatttccatcatcagaaatttaccgtactttgccagtccgggatgatcttttgagaggattgttgaactgtgatctcattggcttccacacatttgattatgcacgccattttttgtcatgctgcagtagaatgcttgggcttgattatgaatctaagcgtgggcacatcgggcttgattactttggtcgaacggtgtttattaagatccttcctgttggcatccatatggggaggctggaatcggttttgaatcttccgtcgactgcagcgaaaatgaaagagatacaagaacagtttaaggggaaaaagttgattcttggtgttgacgacatggacatctttaaaggcataagcctcaaacttatagccatggaacgtctctttgagacatattggcatatgcgaggaaaacttgtcctgattcagatagtgaacccagcacgggccacgggtaaggatgtggaagaagcaaagaaggagacatattcaactgcaaaaaggatcaatgagcgctatggttctgctggttatcagccagtgatcttgattgatcgtcttgttcctcgttacgagaagactgcttattatgctatggcagactgctgcctggtgaatgcagtaagagacggcatgaacttagttccatataaatatatcatttgcaggcaagggaccccaggaatggataaggccatggggattagccatgactcagcccggacgagcatgcttgttgtctctgagtttatcggctgctcgccttctttgagtggtgcgatcagggtgaacccatgggatgtagatgctgttgcagaagcggtaaacttagccctcactatgggtgagactgaaaagcgattaaggcacgagaaacactatcactatgtgagtactcatgatgtgggttactgggcaaagagctttatgcaggatcttgagagggcatgccgggagcattataataaacgttgttggggtattggttttggcttgagtttcagagttctgtcactgtctccgagttttaggaagctatctatcgatcacattgtctccacgtatagaaatacacagagaagggcaatatttttggactatgatggcactctcgttcctgaaagctccatcatcaaaacccctaatgccgaagtcctgtctgttctgaaatctctgtgtggagatcctaaaaacactgtgtttgttgtcagtggaagaggatgggagtctctgagcgactggctatctccatgtgaaaatcttggaatcgcagctgaacacggatacttcataaggtataaaagctagtaactgtttttctcagttacagtttctaacaagaatttgaacaaactaagacccatcctatatttgaattcaggtggagtagcaagaaagaatgggagacttgttattcgtcggctgaggcggaatggaagacgatggtagaaccggtaatgagatcatacatggacgcaaccgatggttctactatagagtacaaagagagtgctttggtttggcatcatcaagacgcagatccagactttggagcctgtcaagcaaaagagcttctagatcatctagagagtgtactcgcaaatgagcctgtagtcgtcaagagaggccaacacattgtagaggtcaaaccacaggtaacatcagagagatctattaatccttttcttttacttgcatctgagaatctgttaagaagtcgtgagtgaaccaacattcttatgtgatcgaatcgaatctgttctttatattgatgcagggagtaagcaaaggtctagcagtggaaaaggtgatacaccaaatggtagaggatggaaacccaccggacatggtgatgtgtataggagatgacagatcagacgaagacatgtttgagagcatattgagcacagtgacaaacccggacctcccaatgccacctgagatctttgcctgcacggtgggaagaaaaccaagcaaagccaaatacttcttagacgatgtctctgatgtattaaagctcctaggaggattagctgctgcaacgagcagctcgaagccagagtatcaacaacaatcctcctcattgcacacgcaagtggcgtttgagagcatcatatgataacataaaagtgtctttttcaagtgtgttagtgtgagtaaccataaccaaacatgggaaagggtttgtatatgaagaaggtttaacatgatggggactggtctgtgtgattttatttattttcaaaagcttgggagggtgttttcttctatctctctcactgttgttttcttgtttctttagaatcgcagttttttgctctctttgtatagaaagtctctggtggtttgtaatttacacggagtaaccgaatggataaaagtgggttttgtaattctttaagtacaagccactaatttttgtgagcactaagcaagactaatctaagattagtaatcttaatgtagtcttttgtgttcttcaaaaacggtgtcgtttaagtggttttcttttacattttccatacttggtaaatttatcttttgattttctctcgagtaaaaattatataactcagactgtttgacacacatataaaatcttcttgcagagattgttacatattccagtaacaattacatgtgtaaatattttgaagattattccctgaataaaatcttaaattaatcaccaaaaaccttaatatttttttttaattgttgcgccgacgtttatggcatgaccaatgtgtcacttttctacgcctctctttctattttattttgttgctttctcttcttcttcaacctttctccttcctttttttttctcagattgtcacgaagtgtcactacttcgttcaacattttaaacattcatctttctcatttcgctattcgtctctcctcaactttagtaatgagtaggcattttctgtttctgggtattatcattcttctcttctctgcgtttgttgcttcagctccttcatcaacttcacctgcgagttagttttctttttcaccctgttttttcgcgatgacgcatttttatttacatatatgggtttgatcttaacgagcttacattttattcttattgcagagattgttaatagtttcatctcaaatcatggcacttccttattgaaatggttatggtctctctctttcaaaaccaccactaaaacaggttcctttgataatttttcctctcttcacggatttagggttgtaacagtttgattctgggtttttgatttccttttctgtttgatgctaatcagctgttcctacgaaatcgatggtgaaattcgaaaatgggtattcagtggaaacggtgttagacggaagcaaactcggtatcgaaccttattctattcaggtcttatccaatggcgaattgcttattctggattctcagaatagtaacatttaccagatttcatcttctctttccctttgtaagtattctattgtactattgattttgcgtcagacttggtggatttcaatatttgctgattttcttaaggattttgaatacggatgatgatgaagtcaagcttttttctttttctctgctttcacgtgatagttcacatggactataaagttttgctgtatatggaaatacacagattttaggtaaaagttatttgaaaatcaggagattttctgacgtttttcttttgtttgagaatttggattcaatgaaagtagtcaagaattcaaatcaatgttttaaatgcagcatttaacattaaacaccttttgcattttgattgtggactgtgtatgtatagttgatgaattcttgaacagcaaattgtaactctttgagcaatggcagatagcagacccaggctagttactggctcccctgaaggatatccgggtcatgtggacggtagattaagggacgcgaggttgaacaatcctaagggactcacagttgatgatagaggaaatatctatgttgcagatactgtgaataatgctatcaggaagatcagtgaagcaggtgattttttctgcggttttatggttttgccttttggacaaatgtttggtaagtatcggatttaagaaagaataaaaatgcaatggcaggagtcacaaccattgctggggggaaaatggttcgtgggggaggtcatgtggatggtccaagtgaagatgcaaagttttcaaatgattttgatgttgtttatctcgggagcagttgttccttgctagtcattgaccgaggaaaccaagccatcagagagattcaactccattttgacgactgtgctgatcagtatggaagtggctttcctctgggtaatatttacataccaaagttttccgtttgggtcccctcttgcattcttcagtcatctctatctcaattactctttaatgtatctctgattcaatgctttaatattgcagggattgcagttcttgtagcggcagttttctttggctatatgctggccttgttgcaacgtagactcagttctatcgtttcatatcatactgtgagtgtacattcgcattgtaacatcattctcttatgctaccctataattgagttataaccaacatttcttcctgttgtgtatatgttataggatcaagaagtgtttgaagctgtgcctgatcaagatcctataaaaccggtcagaccaccgctaattctaactggagacgagcaagaaaaacaagaagaaagcttccttggaacgttgcagatattcatttcaaatgcttgggtgttttctgtggagctgttcagtggaatgtttcccggtctcagaaagaagcagacagtcggcttgaacttcaaccatcaagaaacaaagcattctgcttttagcacaacttcatggccaattcaagaaagctttgtaatacacaacaaagatgaaccacctcccgtcgagtccaggaacgccactcctggaaaaatttatcctttcatgtccaaagatgcaacagagaaaatgcaacagctgcgccaaagccgtgccttgtacagaagcttggacgccgaattcctccaggagcagcaacaagagaagcatcagcagtatcaccataggcatcactcaacaatcccatacactctttatgagcagagcagcgagaagactaatgagattgtgtttgggccaggccaggagcaagaccagatgaatactcatcagaatatccaccacagagctcaccaatttgtgagttacccatatggatactattcatagacatgagaagttgcttaatatgatagtagtagtagagattgggaattcaggtatagttttttaaaatttgttgagaaggcacaatagggatttgggtatttagatctctcttgtaagaaaagtaccaaagattaatcattcttccttgatataaagaaaaaaagatgagcacttcaataaatattcaaagatttttcaactcaaccaaactttacatttacaaaagacacatactctctgattcatgtgcttttaactgaaacctactcagtagatgaagaaccatgaattacagtatcttcttcagccatctttgaaaattcttcaacatgaacctttataatgtcatctatggttgcatgaggaagagtctcttcattcctgcaatctttgtcattgttaggttcttgttcatcatcaaagcttattaggtcaataagatcatcagagggtttcagtgaaaggggcggctttgggttgccgcaacctggactctcgggatcagacacagagactgttttgtctaaaatagctacattattgggttgacacatgaagaaaaggctagataccatcgaacaaattaaactacttagggcggaatacatgagggaaaggtgagacacgatcatcataactagtctacttaatactgaataaacggttgattcagcaactcggtttctaatgtaggagaagaaggtcagaacttgttcccccaatttggttaggagaagcttccatgtcatgatgaacgagaggtggttcacttcttcctgtctataacgatttggtttaagagatttgatatgttgattatacactagtatgtaatatgaggatagattaaaaaaaacttacatgacggatgacgtaagggcgaacagcaaatccaatggctaccccgagaatgcaggaaaggacaatccctattgaccaaagagagtatgtccccaaatctgaaacagtgaaagaagaatcgttgaagtttccaaaggcatggttagtcaaatccacaaaagattacttatagaaaagacatactagaatgagagttttcgaggcaatcctcctccttaagatttatctggcgaatcatttcatttccatgatcagaaacaagcaaacaacatctttgaggaacaaaagttatctcgaaatcgctagagaaagtagcattctgtgcaggtccatctctgtgtccaaatgcctttgagatccctccagcaatggtggttacagaacctacaaagtccagtaaataaaacatgcataatcaaaataaactaagtggctctttcaacaaactaagattagacaacaacaacaactagcatttatacaaaaggaatacaagaaatggattaaacaaacacctgaagagctgatcttccgtatagctttattactcttatcagcaacataaacattccctttagcatccacagcaaaaccacggggtttgctgaaccggctgttaccagctttaccatctacatgacccgaactcccatccccagcaaaccggtttatcacactatctgcacaaccacacacacatactcaaagtgagctcaaacttcaattgaaagaaagataaacaaaattttcacttatagtaaagtttagaacttttatttgcaggttgatcgtttcacacacatacacacacatattagtattgtggtccaatttgagattacggagaaagaaaaaatgaaggtcaagacttgcaatcaaaatcaacaagctctaaacatttacttatgcatccatgaatttacaactcatatacaaacacaattataatgatccgattaatagatgagacaaaagagtggttttgtgggtgtttaccaacggacaaaggaaaggaagtagtgtaaaatgtactgccggaagaatcaaggacgatcagattagaagatcctggtaaagcatgaatcgtgtatggattcagaccagacttatggccatcgaccaccgttgtgacttcgtacccttcttctaaaactatcttaccactcactgtaacaaaatcatgaggaaaattaaaaattcgaattttgggttgggaaattcaactgaattaacagatttttgaaaatatacccagattgaaaacgacgaacaagaagagagacacggacgaaaatccccaagccatgtcaaaatcgagaggagaaagcgactgttctgtgtaacttgtgttgtgttacttatttttgctgcttagcatctttaaaggttttaaaaagatactagggcctgagcgatactatgatgtgttcaagtgtaggggagaatttgtgtaacaaccaatgaaagagcgcgtatcatcgaccctctcaaatttgactaataaaaacggcccaagtagggcccatttatgtgtttaactataaagaaacggcccagtctatgtttttgttttgagaggattgctggtcgaaacgttaccgtttaggtggaaatggaagtcatgtttatacaacgcatttaatttggcaattatggtttacgaagactgagaagaaaaaaacgagcatcgtccatcgagatccaaatcctcagtttcattttcatctctctctctcgtattgatcagctactcgaaactccggtaacggattttcacaatcccggcggcgaaactcttcttcccggctaagttttcattttcttcagattcctcgtaaagttgccggtggaccaaggtccaactcttgaacaccccaaatcatgaatcccttttcttctggtactcgtttaaggtaaattgattctcttctttcctttttatcgtttctgtttcaggtttcttagtcgttgatcagcttacaaatgaaatttgaatataacatgatgtaattgagctcgttttcatttgaggattgaattttgttgattggcctgtttcgaagatgaatttggtattggtgtttctgattccatttagaattttgattttagtctaagaacatgatcacactaaggatttttggtaatccttttgcttaatttaattgaatattggattggtcatgttgctgttggggtttaatagtggaatcagatcggattattgtatatggttctgaagttatagtggacatatgagtatgattcagggacatgatccgtgccataagagcatgcaaaacagctgcggaggagcgagctgttgtaagaaaggagtgtgccgatattcgagcattgattaatgaagatgacccgcatgatcggcaccggaaccttgcgaaactcatgtttatacacatgctgggttatcccacacactttgggcagatggagtgcttgaagctaattgcatctcctggatttccagagaagaggattggatatctagggctaatgttgcttcttgatgagagacaagaagtgttgatgcttgtcacaaattcgttaaaacagtatccttactaatttctagtattaaatcttgataccttggcctttgaatggattcttcttctatgttaaaaaatactagagaacacttgatttttgattgcattgctgttatgggaattaaggagaaaaatatttaaatagatttgttcctgtttaaccttaagtcacgtgcagagatcttaatcactcgaaccagtatgttgtaggacttgctctctgtgctttagggaatatttgttcagcagaaatggcccgtgatcttgcgccagaagtagaaagattaatccagtttcgtgaccctaatatccgaaagaaggtgaagtgttttctaattcatatacagggtctcctggagtttagtcgctttttttttttccttcattgcctttaccatttatgttgtattatatgcaggcggcgctttgctctactagaataataaggaaagttccagatctagcagaaaacttcgtaaatgctgctgcttccttgcttaaagaaaagcatcatggggttcttataacaggagttcaactttgttatgaattatgcacgattaatgatgaagccctagagtacttcagaacggtaagtctataaatattatacagaacactctacttatgcatacaggagcatcgacgtaatttaattgaatatgcgtacatatgatactatattacctgtatgatgcttttgtgtactatttttctcttgcaataaagtttgatatctgtggtattcacttataaatagattactctgctgaaatgaggcagacaatcaggttgttatattgttttatcagaccgtcagttttgacaaacccttgtctttgttttgtctctgcagaaatgcacagagggactgataaaaactttgagggatattactaatagcgcatatcagcctgagtatgatgttgcagggatcacagacccttttctccacatacggttgctcaggctcttgcgtgttttaggccagggtgatgctgatgctagtgatttgatgacagatatacttgcacaggttagtcatagtttagcaagtgattctggatatggttgaccatcttcacatttgcgatgtaattcctttgttaaacatcaacggtttatggtttttgttccagttaccttacatatattttttcggaaaaatgttgtaagatagctatgctctctcatgtgctggaactgattctgttaaatatagcataatggagaaagaatttcatttcgttgatagggttcatgggctattattctctttggtagatagaagacttattggttactgagtttttgccgtacttgaattctccctcttttgataccggtctttgttgtcatagtaagtgttgatttgtggacggacatataaatctgtaggctgcgccaatccttttctatctcaccatgatgaatgcatcctgcgtctgttacatgctttgttttggaaatcttttgagttcaaagtcagggatctactgtcggatactttgttatcctggttctttgatatttattctcgttggtttcatgctattgtaggtggcaacaaaaactgaatcaaacaaaaacgcagggaatgcggtactctatgagtgtgttgaaacaatcatggccattgaagacaccaatagcttgcgtgtgcttgctatcaatatcttgggaagattcttatctaaccgcgacaataacatcaggttcaaccccctacacctcaattttatttgataatagtatggtattatatatgtttgtaatggaactagcttacttgtatttttcttctgtctatcatctttctttggatgtgcttaactctatgaagcacacaatgctcttctgaccaaccagcgttgccttttctaatcttgatttcgtttctctcaaaaacgctgcattcccttatgaaattcatactttcgttctctcagatatgttgcattaaacatgctgatgaaagctatcactttcgatgatcaagcagtgcaaaggcacagagttacaattttggaatgtgtgaaggtattagtattaccaggaaaatattttatacaatgttaactgctaagtatatcttagagaaataaaaaatgctaatttggtttctgcttccataacaatataggacccagatgcttctatccggaaaagagctcttgagcttgtcactcttttggtgaatgaaaacaatgtcacacaactgacaaaggagctaattgattatttggaaatcagcgacgaagattttaaggaagatcttagtgcaaaaatttgttttatcgttgaaaagtaagtattctatttaagaaatagaatgactacttactctgagaaagttgggggtcaggatgattggaaagttactgtgaatgtctagttgattgaagtttttgttgactttttaaattttttgataatgtaggttttctccagaaaaactatggtacattgatcagatgctcaaggttctgtgtgaggtatggattcaaacgcgagaatatgctctgtaacgtgttaccagttaattgcactctttgaaatcgtttgagagtttatatctgcttaagctaatttcaaatgcattgtttgtatctgtcataacctattgtcatctattccatgttagtaggctggaaagtttgtgaaagatgatgtgtggcatgcacttattgttgtcataagcaatgcatcagagcttcatggatatacagttagggccttgtacaaatcagtcttgacttattcggaacaggtagctattttctaatgttagattgtgctcagtcctcaatcagttgtaaccctttctaatatggtttcgttgagatgataaccaggagacccttgtccgagtggcggtatggtgcattggggaatatggtgatctgttggttaacaatgtggggatgcttggtattgaagatccaataacggtgagcatcacaatggcaatcttaattcattatttgctccatgataaatatgcagatgcttttgcttcttgggatttcatttttgctttgaaaaatatgcaacgagtatgtgactgccttgagcaggtaacggaatctgatgcagtggacgttatcgaggatgccattactcgccataactcagattcgactacaaaagcaatggcattggttgctctactgaagttgtcatcccgctttccttctatttcagagtatgtctgacctcgttgtgctatctgtttttatctcaactcgttcatctgatatctgcacttatcccttttcaactctacacaagatgcatatgcgcactagtatatgaataataaattttggtctgtctacaagaaactgtagcgcgttgccttctgaaaaaagattagaaatatattatacatgtacatcctgtcctcaactctctattgataattaaaaagttttctaaaattcaatgacaggagaattaaagacataattgtgaagcagaaaggaagccttctccttgaaatgcagcagagagctattgaatacaattctatagttgacaggcataaaaatatcaggtggaatcccttgtgcctctcttcctcatctatcttctagtgtaagtttttcatattctctctccctcaaagctcatgatagaggtatgtgtgcatacaggtcttctctggttgacagaatgccggtactggatgaggctactttcaatgtgaggagggccggctcttttcctgcatcagtttcaaccatggccaagccttcagttagccttcaaaatggtgttgagaaacttcctgtcgctcctcttgtggacttgctagacctagattctgacgatatcatggctgcacctagtccatctggtacagatttccttcaggatcttctcggtgtagacttaggttcatcgtcagcacaatatggttagttctttggcggttctacagctcttgcgttcatattatggcgtgctcatctgctatgtgtctctgaatgaacaagtttttaaaaaaatcattttcctcattgccttgcaaaaggataactcatgtttggtcttccattttttatccaatgattcaggtgcaacccaggctccaaaagctggcacagatctgttgctggatattctatcaattggaacaccttctcctgcacaaaacagcacatcatctattggtttattatcaatagctgacgttaacaataatccctcaattgcgctagacacactttcttcaccagctccacctcacgtagcaacaacttcgtccaccggtatgtttgatttgctagatggtctttctccaagcccatcgaaggaaggtaggaaaaagtcttaacctgaaaaagatctgtataatcattgaaactcttttacaaaggtcaataacaagttttcctccttattgcagccaccaatggtccagcttatgcacctattgttgcatacgagagcagctccttgaagattgagttcaccttctcaaagacaccagggaatctgcaaacgacaaatgtccaggctacttttactaatttatctcccaatactttcacagattttatattccaggctgctgttccaaaggtaattacatctatcttctttttttgcttttttcccctttattcatctttcccaattgataaagcagtaaatagatttcaattttttctttaaccttctctttcttttgtgtaacttccagttcctccagctgcacttggatccagctagcagtaacacactcctggcaagcggtagtggtgccatcacgcagaatctaagagtcactaacagccagcaggggaaggtatggcacattctctgttcgtctttctatctaactttatgtcttcaacattccgtgctcagcattgatgaatagcacttgatgatccacaacataatctatgctcaaataaagataggctgagcctgtggattcagtgacttaacataacactaagggtttaatgtttattgcagaaatctcttgtgatgcgcatgaggattgggtacaaactgaacggaaaagatgtattagaggaaggacaagtcagcaacttccctcgcgggttgtgaaactcatcgatcagccattgtattttcagcataaggacttgagtgtttctttctatcaaacccaactaaaaaagaaagacaagtcttgcccaagccgttgatgcagctttctccttccaattttttcatccgttttatgaaacaagtagtactttggcctttgcttgtgatttgaggttcttgggttttctttttgtacaaaagttttgatgtttggaatcggaaagtggtcaagaagtagaatttgtctctcatgtctctgagactataaaaaagatgtgatttatgacccataaccataactcatgatgtatctactacagttacaattttcgtcttgcaaagaaggagtattggattttggatcatgtcgtagtttgcatgtgttattggattaagtctttggttgatcaaccaacacacatctcttatttgaagcgaattctaattttctgatagctagaaactgttaagtacagatatagagacattcgaacatgtgttatttattaatgttaccaaatggtggatgttcatttgattttattggatatgattttgaagacaacagatcaataaatcatcattctaaacataatctattttcttaaaaacccaccacagaaaattatatatttcgacttcacttttccatattttcattctaaacatatatttgtcccaaaaataaaagatagagataaaccataaacagaaattcatttattattttaaatgattatgtggcttgatgcgaaattcataaaatcaaagtggttttgactaatagtaccatgatataaatttcacttttccatattttcattctaaacatatatttgtcccaaaaataaaagataaagataaaccataaacagaaattcatttattattttaaatgattatgtggcttgatgcgaaattcataaaatcaaagtggttttgactaatagtaccatgatataaatatctgcccagtcatttttgtattaagacaaaacaaaagaatgacttttgtaaatttcaaacttttccagaaatatgtatttttttttttaactttgttatacttttaccaactcttactaatttaaaattttgtggtagttttggaaatgcgtacgtgtttatagttttgaatttgaaggatacaaattgggagttaagggaatttctacaaaaaaatattaatgttaaactgaatagctactttgattacacatgattagttgccgaataagttttagataataggctaatagctattactaaaatatcattgtctcttcataaaaaaaatgtattataatattctagtaacatgacgttgcttgtacaagcctttccattaaacaagccttagcttgcaaatatctctacttgactttctcgagttgtaatgtaatgaagagttgcatatcacagtcacacatatctaagttaattacccatttgacaaaacgtggaatagttgaacccttttattacaatcgtcaatacaacgataatattaaagttttatttaatgcatatatatatatggaaagcttcatgggtaaatacatcgtaaacgttggggaaagaaataaaacacatcgacgtaaatgacattcattattcagtgaaaatctctagttaaatacaccatccagtgccattctctaattagttttataatttcttttaaaagtatatgttctagtggttttgataataatctttaacaaaaaaaaaaaaaaaagtggttttgataataataatcgtctcaactaagatgtttatatagaaagggagtgttctgaaattacattaatctccttaattattttacctaaccccactcatttaaccttttcaccatattgaatagtatttctaaacttaaacaaatatttcagcaatttttttttttgcgtcacccatttaattatctaatgtgatacacaggagggtaaataacttatgtaggccaaattgatataatctacctaatgtattaattcactccaactaagctagcgaagtatattacctcgtgaaacatagcagttaattagggtttaatcaagaaatataaattgatcgaaatgtgatgaatttaaaatgattttaactaatgatcattatgaaataaaattaatatagttactcaacttaattacacaaactgagcaatctataattgcaattatttttagcaacccgaaatattgatctgacgacgatttttgttttgtttttagtataacacagctagcgattaattggattagagaaaatcatacaaccaaaaaaattaattaataattatttaagaaataagaatccttattccttaacttgaccgaagcatggcatgttacgtaactgattctctttatatcctttttgagaaaaaggtataatgaaataaataaaaaggttttgaattcgtaacttggtgcggtgaatcgttcatgatccaacatctgtctatttcccctttatgagtcaaacttgaaattttattcaagctgagtctgttaaattaaagtcatgaagaccgaagacctattatttttcacctgcttaatctagcaagaaactcgaagcacacgcaaatgattcatatttagtattttttcaagaagaaaaatgtgtttatgtggaccaagagttttttatcaaaaggaagttgttttgaacctttgacaacaaaaaaagtggacgtcgttttgagcaatgtgtgttatcagataaatatcagtcaatgctcacgtcactcaacttactcgaataatcactttttagttacgatatattacaaataacaaaacaaaattattaataaatttatgcaagtatttttttttttttttttttgtttattaaactaaactgattgatacaaagtatgcatcaaatttatatgccttttacaaaaatttccaataaacaagttgagaaaaataggcagatatttaagactatatatttttataaatataaacttcaatattatgaattttcattattttaaaagaaaaagatgatatagtccctttagaattacgtgtgtgatttgctaataataaccttttggtgcgaaagtcttagtaggtaatatgtattttactgtctagagttgtccactatttttctcatgtcacacagattcttaattcttatattttgtattttcaattaattcttcataatttatttcgtttcttaacaattaccaccgaattggataggttaagatagttgccttgtctatgtgttcttttatttatctaatttcatatgtgatggtggagaaccgaaataactgtataatgcacatatcttatatatatatggtcttcttgctaacagaaatccgtcttcgccatgaaaccttgaaaggagtcggatgaaactcacacatacggagatttaacgtcaaaattattgcttttgttttttaatatacaatatgttgtgtgagtttgataataatgattttttatagagagtttatgaaaattacattaattattttacctaaccccaccacataactttaacatcagatggaatcttcctaacttttaccaaaagttttagaatttgcattttatttcatcccaccttaattaaccagtataatacatgcatgcaagattaaataaattatgcagaaacaaaaaaaattatattgatttcatctgcttaatatatcaaataccaattgactccaactagaaaaaaaaattgagtaatattaattatgcatattcaaattaaagcatttgagtaaatacatcacaaatccaattattataaacggtaacatttttttatttttttttaagaaaatttcatatactgagatttagtaataagtatataataattatatatatgggttccactttgtataatttttttaaattattcgtgaaatttaagaagaacctcatccaactcctttaggtacttgacagtttcgtcgatgatggaatgtgaatcatcgatgtctttgtgaaccttctcgaagtcgaatgtccataccacgtggctaccatcgccatcttctatcgaagtaatagcaatggttcctttaagcgtcttgaagtgtttctggatttcagtgccactcattttcattgtcatcgtttctccaagtccatatcctcaagaatatgatgtaatggtaaagagaaagagttacaatttggttcaaaagggggcgatccgtttcctttacgaaagctgaaaagaatttgtctgccggagacttaacgtcaaactttacaggcaaagctcccttgtcattgtctatttgttttttttaagagcaaatgtttttagtggatgtgatattaatcttctcaactaaggtgtctatatagagaaaggttgataaaagttacattagttacttcaacttaagttaactccatccactttactttcttcaccgtaaggaatctcaccaactttagccaaaagctccaatatttgacctttgctttcatccgctcaattatttaacgtgttaggataagtaaaattgttcatatcgttttgatctgcataatataccaattaactccaatcaagcaagtattttacgtaataggtgtttttctaaatacattattcttaagaaatgtgatcaacagaaaatcgttttgactaatgacgactattgtgaaataaattaacgaagtcacgagttactcaactttcacaaactgatgagcaacctgaattttcaattatgtttagcaaccaaattttgatcttcttttttttttaatacatctagcgattaactacttggaagaaaatataaataatgcgacctaatctatttcccctgcttaattttgaaagaaactcgaaccatacgcaacttatctatatttagtactttatcatgaagaaaaatgtgaacatgtgaacaatgtctttgatgaaaagaaagtggttttgactaatgtacatcatcaaataaatatcactaaatgctcaagtcactcaactaactttagtttcaattaccatacattaggaatagtaataaaaatcacattagaattttcacaatatattatctgtactagatcataaaaaataagcgtgttacactgttacgttcttttttttgtttggttaagcgtgtaacaaaaatgattcttctctattacccttattaagaaatattatgactatatgtgcgaaccaatgtgcacgtcacttttgctggtatgctgatgaggatgtcttaactcttaacttttgctatttttttttcttatcagaaataaatattacaggaaatttagcgtatgtctcaattaaataattctgaagagagatcatataaccattttttgtcaaggaaatcacataaccctcaaagaaaataaaaacctagctagcttgctagctcgcacttaatttatgatttaactgattcaactgcatagtagaccactttttcttcttttttggtttataatcataatagaccacttacttcaaccaaaaaaagtttttgaagtagttgattttgtaagtacattattaaaaatatgattataaaccaatgtgaacatgatcagtggcggatccactaaggaaggaggggtgtcagttgacccaggttaaatctacaaattaagtttaatgcatagaaatccttaaagagatagcagcatagttggtagttctctttctgttgacacccctaaacaagagttcgaccctgccttattacacttttgagtaatttttattcttttaacatatatctatgacccccctaaaaataaatcctcggtccgccattgaacatggtgaatgataagtgttaacaaatgaatattataatataactatgttagtaaaaggattctagagatcataatagatacatatatttacggtttctgagttgatgttagtgaatcagataaagtgattgttccattggagatgagagtttgtataaatttcttaactgaaaatggcaatgcgtgaacgtgttgtatcattatgactcacacattgttattttgttcataatgagtctgttcaagtaaagtggatgtctacgtggaagaaaataacaaattgtgcaaagatgattcatttcatctgcttaatgtagcaagtaaatgtgaaaaaaggatttgacgaaaacaaaaattgcaggaacaattacttctttttttttttggtcaagagaacaattacttttttaaagagttaatttatctactaactaaaattgagcttgaaagacagctgcgcggacgattttacccttatcggcttctttaataaaagttgggttccagggaacttttatcacttatgccacttttttgaaaaaactgatctggactgccatcagttaatctgaatgccaccgaaaatgtgatataccagttgtacccttaatgagttgattaaaaaaatgaaaaagaaattcaaaagctaaataaagaaaatcgagttcggaggctcctcttcgtcgtcgtgttcttcttctttggtcgacgttcatcttcttcgtcggccaccatcgatttcctcatgccgccgacttgaaatccggcgtaaaagccacgaattaggtcagtttcttctcatatttcctttgacattggtgcattgtgattttagattgggattttgaattctatataattcccagctcgattcaatttgatagtttgatgattggtttgcaaagtaaagagtaatcgattagaggttgccgaaacgttatttgaggtgatgagcaaaggaatgtaggttgaatgtgagttgaatttgaattccgagatttcatattaaagatttggggggtttgtgtttgcaaagtttagattaaccaattagtttaacgaataggtatgtattaacattggaaatcaattgaaaggtaacgaattaggttcagtagaatcgagtgcgacgagagattgatttcaacgtatgataagagtacatgtggtataactattaaaatgtttgattggagttgaactggttgtattttcaggagcgatgaagaagaagatccacactaaggtacattttgattttggaggatactattctgaagtgaatgagtggattggtaaaaattcactatatgctatatcgtttaagacgagtagtttggagaagattagctattcgatgttagttgacaagatcatgaagaaggttgcgattgatgaagcttttgtcaagttgaaactgagttacaatctgtctaaatttaggagagagacatatattgtagatgatgaggatgtcttcatatttttaacagaatctgatgaagagagtcggattcctgttttgcatgtggaggaattaaatggtataggagttgagaggagagaggaaatttctgtaccggagcgtcgaagttcagttggtgtaaatgtaatagaggatgatgttttaaatgaagtatgtgagatggtgcatgatggatatgataatgatgtgaatgattgtgagaatgtagtaggtacggagatcgtggctgtcgaaaggccgatggaaaggccggtgaattctgttgaggaagaagatgaggatgataggattgattatgatgatattcacgatattccacgaagtgtagaagttactccgcaggttatagaatgggatgatggtacgggtattgaaattggtcaagaattttgttcaagggaggctgtgtgggaattggttaacagagctgcaaagaaagaagtttttggagtctatactattaagtcagacccgatgagacttatgctacgatgccgccaagcttctaaagggtgtacttggtatctaagagttgcgagaactaagaaatctcatttttggagtgttagagtgcatagaaagatgcatacatgctctcggagtgttgagactacaagcaacagtatacagcgaggcacaccaagattaatagcatcggttttgcattgtgattatcccggaaatttagagaccccaactccaaaaaacattatgtcgattgtaagaggaagacttggggtgcattgttcatactccactgccttaagaggcaaaatgctacatgttagtgatgtgcgagggactccggaaagaagctacacgatgttattttcttatctttacatgttagagaaggtaaatccagggacagtaacttatgtggagttggaaggagagaaaaagttcaagtacctcttcattgcattaggcgcttgcattgaaggttttagggcaatgcggaaagtgatagttgtggatgcaactcatcttaaaactgtgtatggtgggatgttggttattgcaacagcacaagatcctaatcatcatcattatccacttgcgtttggaatcattgatagcgagaaggatgtaagttggatttggttcttagaaaagttgaaaactgtatattcggatgttcccggattggtctttattagtgataggcatcaaagcataaagaaggctgtcaagacggtgtacccgaatgcgcttcatgcagcttgtatatgacatttgtgtcaaaacatgagagatcgtgtgacaattgacaaggatggagctgctgtcaagttcagggattgtgctcatgcatatactgagagtgagttcgagaaagagtttggtcattttacaagtttatggcctaaagctgctgactttcttgtgaaagtagggtttgagaaatggtcgaggtgccattttaaaggagacaagtataacattgacactagtaattctgcggagtccattaatggtgtgtttaaaaaagcgagaaaataccacttgttaccaatgattgatgtgatgatttctaagttttctgaatggttcaacgagcataggcaagcttcaggttcttgtccaatcacagcacaagttgtgcctactgtggagaacatattgcacattagatgtcaagttgcagccaaattaactgtgtttgagcttaacagttacaaccaagaatacaacgtgattgatctcaactcggtaagttttctggtggatttgaaaatgaaaagttgttcatgcaaatgttttgatatagacaagatcctgtgtgtccatgctatggccgcagcaaggcacctcgcccgcaaggaagggagaaatgcgaatacaaccatctacggactctgctctgtgtattacttgatagatagttggtcattggcctattaccggacgttgtatgtagtcccacatgagtcggtttgggttcttcctgcccatattaaagagttagttgcctttccgccggaatacacaccaaaaggaccaggacgaaatcaagagaagcggtttccatcagctggtgaagcgcgaaagaggagaaaatcgcaacctggaataaacttggaggcttggctgcagcctgaggaagggttcaaccaatacaactaagttcatttgtatttgcattatattatttgtaagtgtgatgtactatgttttatgttttcgtatttgtattgaattctttgcaagtttattgaattctttgcaagtttattgaattctttgcaagtttattgaattatttgcaagtttaatgtatttttttaagttcaactgagacaactgatatatgtatctgtattttaggattaacaaaatgataaaataattctcaatattttcagctattatcaacatctaaacattgaataaatccaaaatatgatattacaacattgttattaataaacttgatcataaactggtttcctaataaatcacctatgtatgacaaggaacatatagttcatgattgtccaatgtacatacgttatgtatgaaaacagatatttactaaatatgattctatcaaaacttattaaaatccattaatatgttaaaacttatgggaccaactaaaaaaatgagttggtttttcagattcaacttcaaaaacacaaaatttagaatagttcaactgtttgtcattccggccaactgtacatatacatacaactatgtgtattctgaatattcgaataaataattttttttaaaaatagaccccacgaagtcgcgttcacactacgattattgcgttcacactacaaagtttctacctatttattctcactctctcttctatttcacttctctcgttcttctctcttcttcacttctctcctcagatcgtcctcaaagctcctcagctcgtcttcaagctcttcccatcacagcgaccatctcctcgcctagctgtcgacaaccaaggtattacatgcactggagttcttcctctctctcgttcttctctcttcttctaaagggtttctagccgccgtaattagtagatctagggtttcttacgggtttctagccgctgtaattagtagatctagggtttcttacgggtttttagccgccgtaattagtagatctagggtttcttacgggtttctagccgccgtaattagtagatctagggtttatagcgttcatgattcatatctctttctttctctgttctgtagatgccctatagttactctcaaccatccacgtccgaagctagttggaatagtggagaggcgaatgccgatgcaaattggggggttccagaaaaatgtttttgtggtaagcctgtaaaacttgaagtgtgcaaaactggttacaggcaaggcgacagagtctacaaatgcccaatgcttaaagtaagttattgtgttttcatttcattggaacaacaaagtacaagtgaattatatttatgaagtcttctctctttcgcaggctgaagagtacgagtcccgaaaccaccttattcagtggtgggatcaggcggtaactgaggagcttgagaaggtaaatcacaaacttgattccgcactaagacatggacaactagcatgcaatcatgctttggagtccatccgggaaactattcatctcatgcaaggcgaaattgaaacccttaaagaaaggttactcgccaaagaagtcgagattgataggcttagggcattactttctacatggtgattatgatgtgatttctgttattgaggatggtgtatggcatttgaacctaaatatgttactcttgtattttaagttgtgtattgaccggccaactgggacaacttagctactcttgtattttaagttatgtgtacgaaaatgttgatgcacgaatcacacaagtacgaaaaatgggatcaagccacacgtagttcatattagaataagtgagctaggccgtcattggaggtaggtcggcaggtaggtaacgagccggcagatgtgcgacgagctggatgaaccgtggtagagaggcgaattggacaaaccgagttgtctgctgaaggtatagacgagctgggcgacgagataggtggactatgcagtcaatggacgaactgccgctaggcgaggaggtagatgagttttgcagttgagggatgagctgatagctagacgaggagtcggacgagctgactagctgacagctaggcgaggagatggtcgccgtgatgggaagagcttgaagacgagctgaggagctttgaggacgatatgaggagcttgaggacgagctaaggagcttgaagagctgacgagctactctgtctctgggtgtcccggccaactgggtcaacttagctactcttgtattttaagttgtgtattgaccgaccaactgggacaacttagctactcttgtattttaagttgtgtattgaccggccaaccgggacaacttagctaaacgttttgattttaataaaatcctaaaacacataaaccatttcagaaaataagtttgtcctctacacataaactacgcataacattcccaaatacacaaaaagaaagtcctattttgacagacacctaatagtccacacacacacataagcaagaaagaattttcaaagtcctacttcttctgtctcttcctcgtttgcttcccctcagttgtaaactcttcccccttatacttggaaggtttccttccacgtttttccccagattccagagtaggaccaacatgctttctcttcttcttcgatatctgcttcttcttcttcttcttcttatcctcttcatcggactcatcgctgccatcacctacaaaaatatgtaaccaaacatctaagaactattgtgaaagcatcactacacaaaagttcaacaaaaactcacttagagactcaatagttggaggtgctgggtcacggattccactgtgaataaccaaggccttgctctgagtatcccttggctgataagacggtggcacaaaatcagcagctgaaccaggacgcatatcttcatatttgtctttttctgcctctttctcaagctgatctgccacatattcctctattccttgtactctcacacaaatccgcttgatttcgctatccatcacagcaagcttgtccgtgagcttgtcaaatcctctctccatagcttccttgaacgagagaatcgatgttccagggatttcaggttcaggtacagctggaacatcatcaacagtttcaatacgtctaccatcaatgtctgcttggtagagactacgccagaaaatcttctttttctctacgataagcctctctctccaactatcaacaatcggatcgatatatccaataccatcatcaacatgcttctctacaacgcgtgacaacatttttctctcatccatatcaggttccaagatgcttgaaatatcctgtcaagtaaacatatatttcaaacaccacaaagattataaacatagatttcaagagaacaaagctaaccgttatatctccaagtgcttcatttatttcttccaaagtaaatcccttcatgcaactttcactgaacttgtgcttgcacattcttggacattccttgtctgcaggtacagcttctctaaatctcttcccaagctgcggaatgcactcaaatgccagaatctagacacaaaaacataaaagtaaatgcaagttcacaataacaaaatctagccactcatataatttactcgactacttacctcaagtggagtaataaatccataaaaagcagtttgtgccttgggtttcaccacacctatcatgttcttcattactctccgcaccccttccatacactgctcaaaagaaaaacgtccccacgggaatgtctcacaagctctgacattatccacaatcctaagaagcaactcctctatcttcgaatcccctttagaatcagctttcataaccttagctaagaataacagaattgtcaacttcaacctagcagtagacttctcactcttaaactcttccagcttctcttccacgtctttaatcttgatgtcctcagtcctcttaaacaacttctcaacaaacttcaaactgcctaaagtcttatagttttttgggtactcacggcagttcaaaccggtcaacaatgcatgctctctaattgagtaccttataggtactccattgacaacaaaccaacactctctcgccaattctgtcttagccgtgcgaaccataagcatccacatgccttgaatcatgtgattgggctccttaggcatgtggaatatgtgcttaaattggtcatgattcctaaaccacttcagttctgcatccaaagtctctataaattccactgtttgtaccaactgacacctcgttcctatcttacacaccttcgtgtaggtagttggatcaaagtacataacttctggcggcaatggttgattatcatcatcatcatcatcatcatcatcatcctgcatattctgcggctgaagatcatcatcaccatcctgcatattctgcggcaggttatcatcatcaccatcatcctgcatattcaattcaaaatactttcaatttcacattaactacctagttgtactacttgttcctgaatgaccattcacaaatttacgacctagttgtactacttgttttatctgaagcaccattcacaaatccaatcatttaccaatgcatgcataatatcctaaaacgagcctaatcaaaaaaataacggtcttctatcataccttatttgctccatcatcatgttgaacaactgcattcgttgcctcttcttcttctgcacaagaatcggcatttgggtctgaaagatcgtcatttgattcccatgcgacggcgtttgaattacccaaatcggcggcgtcacaatcgccggttgtaggctgaatttctccggcttcctcttctgttgtagaaatttcgccggtcgcttcaaccctagttgattcatattctccagatgagtcttttactctagccatatgaaagagacaaagacgaactgaaattggtggtgtcgtcggagacgagagaagacgacgacggagagaagaggaagaagtcgagaagtgaaaagggggaagaattaagtttttacttaggttttttctgtagttagggtaaataatacaactgggccgagtatttacatttttctttgggcccgagcccaacaaattaagttttcgtggtttcgcctgggtttttcgtcatttcgtcatttttcgattttaataaaaattaataatattattttaaacataagaatggcacgagtgattatttcttttccaatagtggcataagaggtgagctctcggttccaggcggtgagaaagacagaaagagagctagcgaaggtacatttaaagtgagatggagagtgagaaaatctgttgctaaaagcggttcaccggagaagatacaaaagccggcagcaaaaaacttcaactttcagtcatgtcaaacccggaaatgaacaaacttctcaacaatcttgagctcaaaaaactcttgggaaaatctgaggtgtgctctttgcgattctctgtgtttgtttccatctgttttagaatcattttttcctatttagagcacaatgcgtaagtctatttttttatattgttaaatggatttatctaagattatgtagcttttgtttgtaggttatatctatctgcgacattgagctgatatgcaaacatcaacctgagcttatatctaagattattgatgttcttgtcgaatatctaaatactggtactttggttattttggttgtttatccttaatttacttattctgctttcacaatttaactcatatgatcaaaatagagaaaccggtggagtgtgatgccgtgcaagaggtttttatggcgatggttcatgttgataaagaaggtaatttgatttcttctgcattcatcttcattgtctgaattgtatgaaagggtgagcatcatagcatctacttatgtctcctttcttactttcttggtgtagcatctttgactgcaatgttgaaccatcttgctaatttcaaggtcagagtcttttctttatctttttttgttttgttttattttctctatttttaggctagctctctgtttaacttggtacaaaatgttctgctaaataaattgaaaattttaataatatgtactcatgtaggtgcccgatttgaagaataaactgccaatttttattgaattggcattatacaaaagcaatttaacgaaaagacgtatatcggatgtactagaaaaggtttggatttcatatgttcttctttgtttctttacgtatgtatttctctccgtctgattttctttccatgtttgcagagtctacaaaaggaaagtgaagcagacttgcaacgacttgcacaatattttgaaacaaaggctggtttggatacatttgatgtgagtatttcatgtgacgctctcaacctattagtttctgaactcaaaacgtcatggtttctgaagctttcattgttgtgccgccgaactacttctgatgtccaccaaatattattttccctgtaggtttcagatgcacattatgttgacaggtttatatcatgcctgctaatggctgttccattctttgcggtatggactcagatttattgttgcatagcacttttggatgttaaatagttaaaaagatgctttgagaaccataaatcttacgaactgtcttcttttgattagagaggtgctccaagcagcaagtattttgagttcatgaaccgtcaccatatcttgcatcattttgacaaggtacaacatatctaaattttttattttctgttaacgtacttgagacaataattttgtctgtacatgatctcttagtgggcataataggagtagagtactagttaatggcgttgagggtacgaagtcaattcttaattaccctcaacttgcatggaactctttttgttcgtaaataatactgtcgcttggctatcttcgtccttttgttagtaaaatctttattattgctccagacgtgagctcattttgttataatcataatctataccaaatccttttttcactagctgacagagcataggaagcttgattttctcaaatctcttgctgaaatgtcgtcagacacaacagctcaagcagcaggccagatgcttccatcgataattgagctcttaaaagtgagctcttaaaggaccataattaatacacttctctagtttaacatctttcacatatttatggacttatctattattgactgttgtcattttctctcagaaatgcatacccgatacaaagatggagagagaatccatgaatatctcatatattgagtgcttattatatgtgctccatcacctagccattaaggttatataactttgtttagttgttttctaacttcatttagttgcttggccaagtctctttgtctttcttgtaacttatgtgtttctgtttaatgtataggctccagctgcagcaacagatttttgcaacgaagaatttatgttgaggtattgtgaactatattactatgatattctgttttcttcttataaaaatttgttttcggtattttgcttcaacatcctgcattaatacagaattaatgttgttgcagattggattgtgttagatctataactcgggcaagattgaagaaactagacacaaccttagctaaggacgataaaaaggttttggaagctgagaaatacgaaaagaataatgattggctgatgaaaatgaagttcagatatgaaacaaagaggcaaaatacgaaaactgagtttcggagctgcaataacatactggccattagaaaggttgcaaacatagccatacctttttcatcttttcttccctttttatctaggtatcctgtgaatctgatttaagctacttatacaaatctaagtatctaaccgtctatacatgttacagttattgaagagaaaaaagtctggctttgtcaaactttcttggaaagaagctaggaaggcattgttaacctcatatacgtataaacccaatttattgtcaactaggtgaaatctctttgtcttctcacaggactcatctacttcttttatcttctcagagacagcacatgcccgatagcccctataaggtctgatgcgcttgaatccgtttcaaaggattgtaagctaaacctagatgatacaggaatatgcgatctaaccgacaagcaagttcaaagtattctggattattcaaaatatcatcaagtttctcgtaacaaaaatggtgcatgtgtgttaaatgacaatgatgacatcgctatgctcggttggcaaatgaaaaaatcggtaaacattttaaaactcttattttaccgaaatcttttacaccggatatatgttcctatatgggagcttaatcaataatcagatatcttctccattttacctaaatcgtttttgatttacaatatataggacttaagtttcctagagacggctggggaacagggtagatcgggtgaggttagagatcaactttttcaccttctctgctgggcctacgcaggctctgatctagttagttaccagagattgttacagaagtgggagaggaagacacttcctctttgtccttggtatttatgtgccttttgcgagccagaaaaacttggagaagaggaaatacttgatagaaatggagaaaagaaaatacttgttgatagacatggtcgtgtacatcattgctatggaggtacaattgaaaaagcattatgccacgtacagagccatggaattccaagggatgttgtcaccaatttcctttgcacggattatcatcccccaagtgcagatgaacctgatatggaaagaagaaaaattaaaggatttcgaaaaatcaacacttggaaggatgttgtagaggcgcttcaaaagcagcagatagtgggggcagatttgcttaattacagtcaactgatgatgacttcaggaaagtatatttacaaaggtcccatgtcacgaatgagtgtttacgtcggatatcacgccgtagtaatagagcagattaagaaaatgaatggagaatgggttgctgtttgcaaaatgagcaatggcacgttggtggctgattatggatacgcttatgtttccatagaagttcagtacatgcctgttggtgcatctgatctgaaaaggaagaggatacgaggttcagaccatccaatgcatctccttaccaatttcatcatcgtagacatggtggaggcagatgagaatgatagaaaggatgcagaaagtgaagaatcagaagaaaaagactcagaaaatgaggaggaagaggattatattcctaaagcaaaaagaggtcttactaaagatcctaaaccaaaaagaagtcgtactgaagatccaacaatggtaagcatcaaagtggcaatctcacttcatcgtttgctccatgattaatatgcagatgctttttgagaattattgttggcttcaaaagatatgcaatgactaactaactgccatgagtagcaggtaaaggaatctgatgcagtgggcgataccggggatgccattagtcgccataactcagattcgactacaaaagtgatggaattggttgctctagtgaagctgttatctggctttccttctatttcaaagtatgctcaaatttgtttaatctcgttgagctatctgtttttatcttaactcgttcatctaacatccattttcaattctaaacatgcgcactaagtgtataaacaatgaattgggctgtctaccagaaactctagcgtgttacactctgaaaaaggatcagaaatttattgtaaatgtacatcctgtcctcaactctcttttggtaactaaatagttctctaaaattcaatggcaggagaattaaagacataattgtgaagcagaaaggaagccttcttcttggaatgcagcagagagctattgagtacaattctatagttgacaggcataaaaatatcaggtggaatcccttgtgcctctcttcctcatctatcttctagtgtaagtttttcatattctctctccctcaaagctcatgatagaggtatgtgtgcatacaggtcttctctggttgacagaatgccggtactggatgaggctactttcaatgtgaggagggccggccattttcctgcatcagcttcaacaatggctcagttttcagttagccttccaaatggtgttgagaaacctgctgtggacttgctatttgatgaagatttctttcaggatcttctctgtgtttacttgggatcatcattatcgcaatctggttagttccttggtatttctacaacggttgctttcttttaatggcgtactcatttgctctgtgtctctgaatgagcaatcatttttaaagttattttccctgcaagactatagataactcatgtttaattttccctttttgttatgcaatgtttcaggtgcaacccaggctccaaaagccggcacatatcggtaaattggattctcttctttcattttcttgtttctgtttcaggttatttagtagttttggcttgatcagcgtacagatgaaatttgatataacatgatgtaattgagctcgttcatttgagaattgaattctgatttaagtttttgtattggcatgtctcgaagataaagttaatattttgtgattcccttagaattttgattttagtctaagaacatgatcaaaccaaggattttggtaatccttttacttatgttactgaatattggattatttatgttgctgttatggttttaaaatgggactctgtttagtttgtattagttatctatgattctgaagtttttgaggatatgtgaatatgattcagggacatgatccgtgccgtaagagcatgtcaaacagctgcggaggagcgagctgttgtaagaaaagagtgtgccaatatccgagcattaattaatgaagatgacccgcatgataggcaccggaaccttgcaaaactcatgctcatacacatgctgggttacccgacacactttgtgcagatggagtgtttgaagctaattgcatctcctggatttccagagaagaggattggatatcttgggttaatgttgatgcttgtcacaaagtcgttaaaacagtatccttataaattcttaataccttggcttttgcatggattcttcttctatgtcaaaacaatactaatatactaaagaatacttgatttttggttgcattgctgtactaggaattaatgaaccatatcgtactagatttattcctgtttaaccttaagccacgtgcagagatcttaatcactcgaaccagtatgttgtaggactcgctctctttgctttagggaatatttgttcagcggaaatggcccctgatcttgcgccagaagtagaaagattagtccagtttcgtgaccctaatatccgaaagaaggtgaagtgttttcatattcatatacagggtcccctagtcgctgttttgtctcttcattgctgttacgattaaagttgtatcatatgcaggcggcgctttgctctactagaatagtaaggaaagttccagatttagtagaaaactttgtaaacgctgatgcttccttgcttaaagaaaagcatcatggggttctaataagaggagttcaactttgttatgaattatgcacgattaatgatgaagccctagagtacttcagaacggtaagtcaataaatttatacagaacactctacttatgcatacaggagcatcgagtaattaaatatgcgtacatatgctactaaattacctgtatgatgcttttgtgtactatatttctcttgcaataaagtttgatatctgtggtatgatagatcaatctgctcaaatgaggcagaaatcaggttgttatttttgttttatcagacaggcagttttgacaaacccttttctttgttttgtctctgcagaaatgcacggagggactgataaaatttttgagggatattactaattgtgcatatcagcctgagtacgatgttgcagggatcacagacccttttcttcaaagacggttgctaaggttcttgcgtgttttaggccagggtgacgctgatgctagtgatttgatgactcatatacttgcccaggttagtcataattttgcttcttgggatttcttgttggctttaaaaaatttgcaatgagtatttgactgccttgagcaggttacggaatctgatgcagtggacgctatcgaggatgccattgctggccataactcagatttgacgacaaaagtgatggcatttgttgctcttctgaagctgtcatctggctttccttcaatctcagagtatgttcatttgatatctgcacttatcgattttcaactcttcacaagatgcatatgcgcactgagtatatgaataatgaattttggctgtctacaagaaactgtagcgcgtttactttctgtaaaaaggattagaaataaattatacctgtagatcctgtccccaactctcttttggtaataaacggtgttttaaaactcaatggcaggagaattaaagacatgattgtgaagcagaaaggaagccttcaccttgaaatgcagcagagagctattgagttcaattctattgtagaaaggcacaaaagaatcaggtggttaatgacatcccttggttgtatcttcctcatatatcttctagtgtaatttttcatgtactctctccctccaagctcatgaaagggaggtctgtgtttatataggtcttctatgggtgagagaatggcggaactagatgaggctgtcttcaatgtaaggagggctggctcattgcttgcataacagagtatttttatctttctgcgcgtacaagtttttgttggcatttagactccttatcactcgataaacaaattaatctggatggaatctctttaggttttcaatttgtcgttatgatatcttccttgacgtgcagatgtagggattggtttagaactaaaatggggaacgaaaaggaaacctaaataataatgcactgcagatagattaactcattgtattaaaaaagaaaaaaagcgtcacacttaaataaaaccataagtcaaagaatccaaacgcacaaaattaatagcttagtttatttatctgatccacattttcaaaatggatcttaacattacgcagacgcccatgtatacgaacgcctagccgacgagcgcttgctttttacacttctgggacttttttccactcttgagagccagagaacgctttttgatatattgaccaccacaaagcttacccttgagagtcaagtctcctctatggcccatgactcttctaactatagcttggcgttcaacatgctccccaatctcaaaaacccgctcatgggctcgaggctctgccaagcccttaaacgttatgtagacatgtgccctgtaggctttgagtctctcattagacggctcctcatctttggtagcagtttctatcgccactttcacaatctccaacttggacagaacttctggcttctacaattttggaattcaattgttattattacgagcagtgccactcgtggtggtatgtctttaattgatatatatatatgtaaaacttacgatactgatcgacttatcagttgtagtaattacaagttccaaatacatagaaatccaatcagtggcttgccactctgattccttcacctgcaaaagcaattacaacatatcactgctagcttaatttatcatgagctagctagcacacacacacacacacccaaaaaaaaaacttaatacagtgttgttgtgtcataatatatatagggcaccttaccatgtaaaatcgttttccgtcattcaaaacatcatctgagggccaatcaggcaattcaccttggaagataccaccggcccgtgcatacaaagcatcatcaaagacatgctcaggcaattcacctctgaggacagcaccggccagttcattcaaagcagtatctgagagacaatcaggcaattcaactttgaagataccatcgcccagtgcgccaccatgaaagtgaggcatgaagggcgtctcggtggacactatgcaacattcattattaatcagcaagctaagggagatttttatagtcaggctagaattttataaagaaaataagtcaccttcaagtaagtcaccttcgtgtttaggtctagcaatggagcagtttatatccaaactgccaaattgttgttcatcaactcgaacctgaaaggttttctgcgatgagccagcagctggatcgggatcatgtgcaagcagagtcatgtagaaagaggaaatatagttcggtaacatgttgaatttcattagggtagcgagctggaagcttgtcccctaaggaagaaaatcgaatcaatcaatatatatggtatatataacagagcatacaactagaggagacaaatcaaccgaatcaatcaatcaatatttatattttaccttcaacatattgtaacgatgaagcccaaacttagcataaagtttgaccaagacaggaaacggataatgccttgcacgttgacagtcgtagggaatcagtcccatgacaattccattcgtacctggtggaagtgagatgttctctaaatcgaaaccctaagatcgatccatcagcaaaaaataatctatcagtccatattaacaaccatacaagctatcaatttcctctaaattctctagaagctattataagaagatgaaagaaattacatcggatttcgccgcttgacgccaaaagtctctctgtacactataaccctcctccgccgtagaattcgcctccgtcgtcatattcttctcgtcttggtggcggtgatgctgctttgtgtttttctttgggatccattccaagtgataaatatatataaactaggaagtgtgtgggtttataactaatttaataatatataaaaatattttatgagtaaaataaacatttaaaaagttatattttaataaaaagcaagactcaattttaataagctatatttgtttcttttgtacccacaattagaatcttttgtatttaagtgtaaagtttaaatttttaatttttatatccaatgttcataaaaattagtaggaaaattgtctttttaagatagttttagaaaaataatgatatatacataattaaaactaatgaaacaaaataacacttcctctgtttctatatatttgtagttttaagatttttgttttctttttaaaataagtgttagtttcatttttctatgcaagaattaaatgtatttattagttttaaaccaattatattttacatcatatatttcttattggttgatttagttgtagttaatgatgttttaaaaaaaaaagatttattaaataaaaattttgtgttttcttaatttgtgtgaaaaacccttaaactataaataatgtgaagcagaggagatagtgtatctaagttgagagatgatacatgtcacaaagaaagatgctacatgtcagctttggtagctcttgaataggagaaacctttctttattatataagattataactaatttaataatatataaaaatagtttgtgagtaaataaatattaaaaatgttatattttaacaaaaaagacccaattttaataaactatatttgtttcttttgtacccactattagaatcttttgtatttaagtgtaaagttaaaatttttaatttttatatcaaatgatcataaaaataaataggaaaattgtctttttatgatagttttagaaaaaataatgatacatataattaaaactaatgaaacaaaataatactccttcttttctatatatttgtagtcttaagattttttttttaataagtgttagtttcatttttctatgcaacatttagttttataccaattatattttacatcatatattttttattggttgatttagttgtagttaataatgtttttataaaaaagagatattaaataaaaaatttgtgttttcttaatttgtgtgaaaaccccttaaactacaaataatgtgaaatagagggagtagtgtatttaagttgagagatgacacatatcacaaggagagatgctacatgtcagcttcagtagcttttgaataggagaaaccattctttattatataagattataactaatttaataatatatatacaaatattttatgagtaaataaatattaaaaatgttatcttttaataaaaaaatgaccaattttaataagctatatttgtttcttttgtacccactattagaatcttttgtatttaagtgtaaagtttaaattttaaatttttattttaaatgttgacaaaaattagtaggaaaattgtctttgtaagatagttttggaaaaaaaataagatacattgttaaaactaatgaaataaaataatagtatatttaaattgagagatgacacctatcacaaagaaatatgccacatgtctttctcgtagcacttgaataggagaaaccgtcgtaaacttccatcccatggattaatttatgggcttcagttgagccttcttaacccaaatctgatttctgatttatgaaacaaagtcaatacattcattcatgaatgaaaaatacgtttttttttctttttctttttatgacttaattagcaaattctttatatatataatattaaaaagtacacctatttaacaataagaaaatattatacaaatcttaattttctttcaagtatatctgttaatatctgagatctcctaacaaattgtaaaaattagtagcttttcaaccggaaaaaaaaatcaaagtacaagtatatatatgtactaggttaggcccgcctagataggcaagtttaaaaaacaattataaatctttaccgatagtatttgaattctaaatagtaaatgataatccctattttataaatatttaaattagtaaatttgtttaatcaaattttaatcttacaattttcattttgctatacacttaataattttgactatatcttattaatgatatttaaattttaaatagtagtctacacaacttcaaacgtaatatgtcacactaaaatcatatatatcgtataaggttgaataaaattgacaaaaataagatgaaatttacatagtaccaaaataaatatgcaatgatgaaaattgaagtttatcgcgttgagtcttccacaacatacgaaaacaattctcttacggtcctaccccaaagtgtaatattaaaaaacgaagagacaaaagatttgtttcaaattattggaaaattggaaataaagaatctcttactaataaaagatgctaattgaggactctcagaccatctacatgagcttctcaaactttaacttcagattgtcacattaccttctcaaactttatcctcagattgtcacatcagcttaatattttaaggatccaatcggtgtaagtaaacggaaaaaaaagttaggtttctgaagcgtttgacctcctcgcctctctttcttttccagattatcttttcgtcttctaaatttcatcacaacaaataaaattcaatagaactagccttcctaatgatttccaaaaacacatcaaaattaatggattaaatttcagagagtaatccatcatatgtgcttctatttcgattgggtggcaagcagatcttaagcatttgacacaaaattttgcattttattcttattttttggcattatctaattcttctgttctttgttttcttttggcattatctacctgcattatcaatttggtgaccagtacaagccacaacaggtatactaaacgcttccctgcagttacaacttacaagggatctctcctagattattaaagtggtcttatgatttttatgattttttttattataatccttacgaattggtaaaaacgtaaccaaatatccagtttggagtatgaccaaaagcatgctcgattatttggattacttgtgctttttgaactccacacgctactattagtcttagtggtatctatctttttcactagggttttttgttgggtgttattgatgtttagcaagttcctattttttctctttaaatttctatgattaatacattgtgtttatatcacattcattttttttattttttattttatcacattcatgtgaagacatagatttattttatgtttattatgagtcttttcaaaataatgtaatgaatagatataaagaagctcatatatctcttactgttatgttatttggaacggtcatatttcaacttctatcaggtttatcaatgtcgagctttatcatttcttatcttctcaagttgttagaaaaacgtattttatagtgatggtgggattaacttgcatcactgtcaagtatgaggtactctgttgtaaattgcttcagactattgtttgaaatcattatgtttgcttggaattttgtcagcttcatgaatgagatagccgatatttttacgatatatacgtgaaacgaagttgttcgtaagaggtgttattttggagtaatgataggataagcggatcagttaaccatacctcaaagtgtgaaagggaatttgtcatttattttcctatcttttttttctctattacattatacatacttgggtgaacgacctgtgtccccctagcaagtttcatatatgaccatatctacacagatttcagatctcgtttccagtccacatgaaacgaaagttaaactccagtttcccctgaaacgaaagttaaagatctcggtccccatattttctaatttcgtggtttattattggtttactgtaccggaaacaatattaaccgataaataaaaacttcaaaaccggatttacccataaaccaacccgaattagtacccgttaaccccaaaagttccccaattctaaaaatctccaattctagaaatccctaaagcaacaaaaaccctagaaacctaatgaagaaaaaaggttagaaataatcagttttaatcttcaaaaaattgacaattcggttaaacaaagtgatgcttttacattttttcaaaagtaatttgactaaagaaactaagtgtcagaattcagaaaaacaaatttatttagaaaactcaaaatgattggctttaatctttctctcatacgtcaacgaagacgaaactcttgtgttcatcttctttatatattcaccattagctctaatccaagtcagatccaacacatacacgataaattccaaaagcactgcttggttttcttcacaccaagtaggttcgtacgggtaagatcttgacatagtccaaggccagagaattccaattccaaatccgtccaaaacctaaaaatcctttgttatagcttatattcatcgaaggtaagcaaaagagatttgggtcatcatgatttttttgctatgtttgtcaatcgtactcatattagagctctgacttatgttgaagattgaagaaaacagacgttgaagagatgaaatcgaaactacggttctaagattttttaatttggggattcttctcattcgtatttatttgggtatttcggattgtcaatgactcgaatcggatatacattcggtttaatcgactgggtttctgattttgcatcaggtcggtacaataaaccaatgataaaccacgaaattagaaaatatggggactgaggtctttaactttcgttttagggggaacctggagtttaactttcgtttcatgtggactggaaacgaggtccgaaatctgtgtaaatatggtcgtatatgaaacttgttagggggacacaggtcgttcacccttatatacttatatcataaactacctacttgatctctcattaatgtaaattgatataaagcagaattagttgttaaaaaaaaaaaaataaataaataaatctttacaggaacattcgtcgaccaagattatatgtactttcaaataactcactttccatgactttaaaaaaacaattgttgaaacacaaggtgctattaattaatttctgtcatattattactctcaactaatgttgatttagtctagcttatgtcttattccagatttatgatattgaaggatacacataaagtgattatagatgccctttttaaatattctagcggcctacaaccaaggaataattgtgttgattgggatatctactaccaccggcaaggtagtaaccagtggcaagaccgagcagcgacttctgtttctagtcaaagaataatcgttttgctttctatttttaatgacaaattaacacataagttgatttttcattaacataaaaatataaaatgtcagatttgtacccgaacgtagccccgattatcctctagtcattacttaaaagtttctccaaactacttttattacaaaatatatgaccgaactcctcaaataactgtatatatagacatttatccacataaatcttttatttccaattttcccaaaataaatctcattaaataaatacttttggttcgatctgatacaacgggcgatgttagaccatcctcaacgcagggtttttagatggatttttagtttaaaacccattaaaaataaatgctaaatttgatttattattaaaaactgctcttaactaagaggcccaaagtagctaaaaaaaaaattgatcagcaaagttataaaataaatgttatattttcactctcgtagagatgagagaccaatgatgagcaaagttagttatcaaaaaaaagaaatgatcagcaaagttagatataacatctctcgagataacaattttgccttccattgatccaatttttatgctctttgtatctctttccttatggattcttaatatgtatctgcataaagttttggtttttgctctgttatatcaattacatttgtctcttgtatttctttgtcccaatacaccaaacacgaattatgaagctcttgtatatctttatgccaatacaacaaaaaccaaacaccaattacaccaagtactgtcccatatcttctttttctccataaaaccaagacaaataaactaaaaccatatctttcttttctccataaaaccacacataaacaaaaacacataaatttgatcacaaaacataatctaaaaccatattttcattttctccataaaaccacacataaaccaaaacacataaatttgatcaaagcacataaattttaaaccaaaacacaataattatgaattgcaataattattaagtttgctaaaattaaaaatgttaatgattttcatttttaattttttttttaagaactccaacttaatattctaccattgaggatgcccaaaattaaaattcttaacaaaattcccaacaacaaaattttcaaaatctattaataaaatattttaaaaacttttgttaataacctcccattgtggatgctcttagtctagtaattaatttttgggatgaaattaatcataaaattgtcgtcacagacaccctgttatgtaaatctgctactaaataaatatattattcttttatcaacgaataaactacttataaatttatttatgggaagagaatagtggagtgaactagatctagtagttggtacaattacgaactatatttttaagctttccaatatacggttaatatggttacggtaaattaactgttacggttagtatattcttttttctatgtcaagaaacattttacatatacatacaaaatgattgaactcatttcttaaaagtattaaacctacattcaaatataagtatcaaccatatactacttaattatccaggaaactacacggaatagttatgctttgatgatgaatataattcagaagaagaatataattaataatattatattgcaacaaaaaaatttatcaaccaatttactcaagggtcgttcattaatattatcttatgtagcataacaacttatgggtccatcccattttttaagactctaaaaaagtttaaaacaaaccaaagagaaaacattcgacttttcactattgcagtattttgacagacaacgatcttcagtactttgaaaagtggtttctgaactaattaaactgtcggacctttgtgacaccaccacaaagcttacccacgagagtcaagtatcctgtactatccatgactcttctaattatcgctttgcgttcaacatccataccagtgacaaaaacctgttgagggactcgaggcttttccaagcgtttaaaccatatgtagacatttgcacttttggcctcgagtctttcatacaacagcgcatctccaatactagtttctatcgccactttctcaatactcaaccgggacagatcagtctgcagcagcaacaacaacaactttggtgtgaataatattattattaacaacagtgccaatcatggtatgtcactgattcatatgcaaaacttacattagtgatgaacttatcatgtgcacaaagtacaagttccaaatacagagaaatccaagcagtagctcgccactctgattcattcataatctgcaaaagcaataataacatatcactactactagcacaacaaaacttaattaatgttgtgtcttaatatataaccttaccacgtaaaaacgttctctgtctttcaaaacatcatctgagggccaatcaggcaattcacctttgaagatgatattatccgccactgccccaccatgatagtgatgtatgaagggcttcttggtggtcactgtggaacattgttaatcagcaagtgagattttatacttgaatatcgacttttatagagaggagaaaaaaaaaaagcaataagtcaccttcatctgtagttcttctagcaatagagaccgtcaaatccaaactgccaaatattttttcatcaattcgaacctgaaaggtttgaggatgtgatgtgccaggaacaccgtaatcgtatgcttccaaagttatgtagaaagaggccacacagttttgtaacatgttgaatttcattaggcgaccgaactcgaatttagtcccctgacaggtaaacaaagaaaaatgaatcaatgtggtttaaaaagcatcatgtcgtaacaaagtaccaaccaaaagagactagatttcgttaccttcaacatattgtaacgatgaagcccaagcttagcatagtgcttgcccaagacacggtaaggaagcggcgtattgatttcacagttgtggggaatcagtccattgatccttccatacatagatggtggtatttgaacactctcaatatcgaaaccctaagatcccattagcaaaaataatctattttaatttcgtgaaacacagaacaatccaaaaaatcacaattatagatcaattttataaacaataattaagaagatgaaagacttacatcggattccgccacttgtcgccaatattctctctgcaagctaaaaaaatcatctgtcgccatttactccttatctgatttacgaaacaaacccatacaaaatacgtttctatctttttaatacgttgattacttttttttctgcaatagatgtaataatctgtgtaatactctgatgtaacttggtataattgcagattgatgtagtcaatttcgtttttaagcagctttggagaagagattaatcaaagatttacctcaatcgaagaaatcagagaaacgaaactccttgagtttgatggaattgaagatcttcgagttgatttcgaatgatcgagttcttaagagactcgatctgagttatggagaagatgaagaacgatctgagttgtcatcaccactttgagggaatctacgtgacattgcatgggctataagggcccatatatgatcatctttgctaaatgaggcccaactaataaacttcagcactaaatcgtaagagaatctccatacacagtaataaatattctacgtacagtttgtgatataaaacagaaatcaattggtatagatttaaccagaagaatcaaagaagatgaagaataaaaaaaacaagaatcaatttaagagagtgagtagatatcggagatggctttgagaaacctaatcctcaactccaaatgcataatataatcagcagtctttgttagaagcagatccggttggttcaatcttcgcccacccggtataagcactcggagtttcctcatctttatctggatcgacccggatcctgacccacgacccgttttcttcttcgtctgcttcctttgctctctgttggatcgtgactcttccattgcctttttgcttatgaaaactgagttgtgatgcaatggacgtgagggtggtctatatttatatatcaaaatggttacaacaaaatgttttagccagagagacagcttcacatgcatgtatctcagatttattttctcaaaactttatgacaggttatatgaacataaagctaatcgtacggagaatgaaacaggctatccaaaaaatttaaaaacttagcaaaaggtatgattagaactagctagggattaacagaaacatcccatatatattaacacaatcaaagaagaagcttattcccctgaacaaacacacaaaaaaagaaatttatctacagagacacaaaagaccacagtttagcacttgatgatgcacaacataatatatgcacaaattaggatacgctaagcatgtggattcagtgacttagtagttagcactcaaatggttttatgtttatggcaaaagatcccatgtgatgcgattaggattgggtaaaactgaacggaaaagatgtattagaggaaggacaagtcagcaacttccctcgcgggttgtgccgatcagccattgtcttttcagcacaaggacttgagtgtttatcatcatcaacccgactaaaaaggaaagacaagtcttccccaatccgttgatggagcaaaaccggctttctccttccaatttgtttcatccgtttcttgaaataaatactctcggctttgtttggggtttgggattatataaggttcttggggtttctttttgtacaaaagatcagatgtttggaatgggaagtagaatatgtctctcttgtctcagagactttgaaagaaattttaattcataaccaatgatgtatttactacagttacagtttcgacttgcaaattgtgtttggatattggatcatgtcgtagtttgcatttataacaagtcttacttgatcaacacatacctcttctttgaaactaattccaacttttctgatagaaattgttagcatatattagagacattcgaacatgtgttgtataccaattactgaatgtccatttaatgtggttggatatgattttgaaggaaatttttgactcgagagatcatcgtgacttaattatttagaaggcgacttgggagatcatcgtgagactgttagagttctcctcacctaactcactcgaatgctctttttggagaataataatatttaaaagtctttagtttattatcaaagaatcaaagaatccaaacgcacaaaattaatagcttagtttattatctgatccacattttcaaatggatcttaacattacgcagacggccatgtatacaaacgcctagccgacgcgagtttgctttttacaattcggggactcttctccactcttgagagccagagaacgccttttgatatattgaccaccacaaagcttacccttgagagtcaagtctcctctatggcccatgactcttctaactatagcttggcgttcaacatgctccccaatctcaaaaacctgccgaggggctcgaggctctgccaagcccttaaacgttatgtagaaatgtgccctgtaggctttgagtctctcattagacggctcctcatctttggtagcagtttctatcgccactttcacaatctccaacttggacagaacttctggcttctgaactgtctacaattttggagttcatcttattattattaccagtagtgccactcgtggtggtatgtcattaattgatatatatatatgtaaaacttacctcagtgatcgacctatcagttgtagtaattacaagttccaaatacatagaaatccaatcagtggcctgccactctgattccttcagctgcaaaagcaataaccacatatcaattgatcatgagctagcacaacaaaagttaagataatgaagtgtcataacatattatagggcattttaccatgtaaaatcgttttccatcattcaaagcatcatctgagggccaatcaggcaattcaccttggaagataccaccggcccgtgcatacaaagcatcatctaagacatgctcaggcaattcatctttggagacagcctccatcagtgcattcaaagcatcatctgagagacaatcaggcaattcacctttgaatataccatcgcccaatgcgccaccatgaaagtgaggtatgaagggcgtcttggtggacactattcaacattcattattaatcagcaagctaagggagattgttatagtcaggctaaaattttataaagaaaacaagtcaccttcaagtaagtcaccttcgtgtttaggtctagcaatggagcagtttatacccaaagtgccaaattgttgttcatcaactcgaacctgaaaggttttctgcgatgagctagcagctggatcgggatcatgtgcaagcagagtcatgtagaaagaggacatatagttttgtaacatgttgaacttcattaaggcagcgagctcgaagcttgttccctgacagatgaaagaagaaaatcgaaacaatcaatgtggtatatataacagagcatacgtttataacataccaactagatgatacaaagagtttaaatatttaccttgatcaaattgtaacgatgaagcccaaacttagcataaagtttgaccaagacaggaaacggataacggtaacaaagttgacagttataggtaatcagtcccatgacccgtccatgcatacctggtggtagtttaatgttctctatatcgaaaccctaaagatccaccagcaaaagatgatctatcagtccatataaacactaaaagcgatcaatttcctctaattgttgtcaagaagccattaagaactcagatttaaggataattttgtgaaacaaaaggaaaaaatcacaatcatagataacaaaacaattaagaagatgaaggaattacatcggattcctccgcttgacgccaatagtctctctgtacattgtaaccctcctccgccgcagaaagggactcctcctccgtagtcatattcttctcgtcggtgaatactttgtgtttttttgttatggcgattacgttatattgaagtgaattaatattttgtgggattcgatgtattcatttatgggcttcagttgggctttttcaattttatgattagaatttaagaacccatacataatgaatgaaattatttaatacatagataatttctttcataagattgcctcacacattgtctctaagaaaatagtgcaatattgaggttccaactcagaatctcatctacttcaaactaacaaactcagattaattttctcaagattttggtgttactagtattgcttgatcaaccaacacctcccttatttgaagccaaatataaatttctgatagaaactgcttagtagcgacataaagacattcaaacatgtgttgtagatgctttttttaccaaatagtgaatgttcatttgatttggttggatatgattttgaagacaacttgtgacttgagagatcatcgtgacgttattatttagaaggcgactttggagatcatcgtgagagttctcctcacctaactcactcgaatgctcttttgggagaataatacaaattatgggtcatcattattttcccctaccaataatgattccatcccatttttggatactctttaaaagtttaaaaaccccaccaaagaaaataatatatttgacttctctttttacaaccttcatttttaaaatatttgtcccacaaatacataatcttcttttgtctcaaaatgttttaagaattctaactttctcagaatttgtgactgatttatgaacaaagttcgatttagaactagaaacatcacatataagagtgtaccactataacatcatcaaagaacaaaagcttattcccttaaacaaacagagagattcagctacagaggacacaaaacaacactacagtggtcatatcgtgttaagcaaaatgaattcaccaaaacacacaaaatcaataattcaattaaatcaatggcagaactaaagctaccctctgatctatacccttaaaatctcatggaccctgaaatctccttccattcaatgataacccatcagatccagaacaaacataagaagaagaagaagaagaaccaccaaccacaagattagtctctgatggatgattattaggaaactttgatctcttattagaccattgccaaatctttgacacagaaaagctctcacctttacttctcatattaatcttcttcccttcaacatccttattattcttcaatccttcattattaggacacaaagcaacaaccagatctgattcagccactatgtactgataagaccccattgagaaacatcttctattatcaagactactactacttgtctctcctcctcctcctactactacttcaccattgttgacaatattactgctcctaaacttaccaagcctcactgaaaacactctcttcccaatctcattctcagctggtttctgaaccggagaaaccctaactcctcctcctccatcatctccggcgaaaaacccgaaattgaaatcagggtattcaaattgatgacctaaagagaaaagggttcctctacaaagtggacaagtcgaattcgagagaagccaagtatcgatacaatctatgtgaaaagcgtgactacaattcggaagcaatctaagcttatcatcttccgagaattcacagagacacactgcacaatcaaaaggctctttcgtacctttgatctctttgtaaagaaacacaggaagagcatcgattaaagcttgatctagacctgaatcatggagatgaaagagctgttgaagctgtctttggtaagtatcggagtcggaaaattctgggttttgattagattcgtttggtgatgacgaaaggtttgatcttttcttctttaagtaatatctgaccaacaaatgtagaatgctacagatgaagaagattacggataagagaacgatgatgaagagaatgatggggcttattcgattattaccaccggaggaagaagaagaagaagagtcggttaattgatgattcagggtgattggagaaggagcagaagaaggcgagatttgattcaagttgtcgtttttgagctgggaataatgaatcctcctctcagacattttttttttttgatgaagaagaagaagaacagagacaccatttaacttgacaacactctctaattcttaatcataaaccctcaaaaagaaatgtaaattctaatctctgactttgtagtaaaaaaaaaatgtagcgagtattttggaatctgaaatgattgctaaacagattttggaacgaccagagagagctatattgtcattacattagaaaattttaattattgagttattaagcagggtcagtctctaattaggtcaccaacattttttaaatttttttgaaaaatctattgaaaaatgatattaaaaaaaaaaatggtgtggagccctatgcttgattcagggatctggtgcctagcaatttcgaaaaatatagaattaagtttttccgaatatgttttgtctttcttaatttattgtagttatctaaaaggagtaataatactacatttaattatccagtggtaggtctcaaggtcgttaaataacaacgaaaaacgggaacaatccacaataatcgttcatcgttcgttggcattagttcctgaaaagaatcactcaacttaaagtgaagttaaatagtacacaagtagcagtcttactatttttttgtgtcagtagattttcaatatctaggggacttgaggacttttactgaagcaacagaaagaaaaaatattgtaaacggattttacttttgaatttggaggtaacgattaatcacatggtaatgtcaactaatgtttttaaaaagtttcgagattgtaaacattggaatttggaatcggtaaaaaaaaatagtgaaaaagcctgtcatcactcatcaccccttcgagagaatctacgtaacatttcatgggctataagggcccatatatgatcatctttgctaacggaggcccaactaataaacttcagcactaaatcgtaagagaatctccatacaaagtaataaatcttctacgtacagtttgtgatataaaacagatatcaattggtttagatttaaccagaagaatcaaagaagatgaagaatgaaaaaaacaagaatcaactttaggagagtgagtagatatcggagatggctttgagaaacctaatcctcaactccaaatgcataatataatcagcagtctttgatagaagcagatccggttggttcaatcttcgtccacccggtataagcactcgaagcttcctcatctttatatggatcgacctggatcctgacccacgacccgttttcttctttgtctgcttcctctcctttctgtaggatcgtgactcttccattgcctttttgcttatgaaaactgagttgtatgaatgtgatgcaaaggcgtgatggtggtccatatttatatagttccacgtcttcttatctatatatttttgggttttatttttcatttttttcgtgcttcttttctttttattttaaactacacaaaataagagtttttttttttagtatattttgttgttgttgtcgtcgtcgatgatcgtttttatatccacattccacacgctcgatctctttgtccttttgccgtgagcagtgagaaacagaagcaaatatgaaagtaataaattatgtcgctatatttgatacaatgtaccggttatcaacttagtttgaaatcatacaattatattttactataaatttgtaatatatattgttttatttttgtcaataacctgcattaaatacgttcgagtgatagactaattaaatacaagaattataaaattttaaatggaagataaaatcatatttttgtttttgatatggaaataaaccatatattatatattttttacttcatccaacgattaaaattgtaaccaactattaaatgtctcaaagaaaccagaatacgctacattagaatccactcgaatataatagttgatgattgacaagagagtgcgtttgcgtttgatgagatcaacagagacagaagtgttacagaggggcagtgaccaataacgatcgggtctgtttttaagttatgacgtggcaaaagccaaaatccttgtcattgctcaacgacgtgggttacacatatctaaccttagttgggtgtactacgtacctttttccgattaggcttcgttgggtgtactacgtaccttcttccgatttgtccgatctttgcctaataggctaatacagtaatacacaaaacgttcctttgcataattgcatgcatggctctcttttttctttaataaacaaattagtttgtgttttttctttaaaaagtgttttgttcactccataagtctcaaatcctatatgattcaagacactttttttgctaaatgatctcaaaatatcatgagaaaaatgtaataaacttatcatcgttatgtttgaaacaatataaatttttcctatattttaatgggcttataggcaaagtagacactttttcaaaaataatttaaaataggtagtttttttttaaattagagagatagatactttttttgcttttgtgagatagagaatttgtctaatagactaaaaaacaaaatacatatcaaatactaaaataccctttatcttgagagagaataaaaattatatgagaaaccatttttactttatttcgtttgtctttatctttttgttttttttattttagttttcttaaatacttaaaaaaaattaaatattcatttaaaaaaaaaattacattgacttttagactatttatctgtcatcattataatgcacaaacatttaaaacatcgttttatacactaaccattattcgttggtgtacaagtgtgtataccgatatttcataaatcatcaccgacttctcttatacaaacataataattgtattagccaaatattattattcaatataatggtgtacatgatggtgtacataattaagttactcttaatggtgtacaaaatgattgaaactattatgacgattggtggatagaatgatatatacaacttttaaatgataacatacaagattggtagacaaagtgtacaaaacttggtgtacacttatagagaatgtataaatcattatttcaattagtggtgtgcatcatctcgtacaccaatgttagtacactgtctcatagatttttaaaggtgtacgattatgtacaccatatttttcatcatctatgtacatcattttgtacactgttatactcagtgtattattttctacatcagtaattatatatttatttttacgttattgttatatactaccattagtacaccaattttaacaatatcacgtacaccgtcggctgagtttaaataaaaattgctacatatttttgaaatatagcaaaattagactttttagattcacataaaaattttaaaaattaatatgattatgtggtaaatttttatgaagaaatatcatcaaactagattttaacccgcggtataccgcgggacgatttatttttaaaagtaatatatattaaaacttgcaaattttatttttacaaaatatttatattttacagtttataattgttattaagtaacgctataccacgaattcatgagacaattgttaaaaaaactgaagttttgacccctattaaaacagcataatttataattttttaaaattttataaatattgattcaaatacatccaccatataacccaattccaaaataaaacacgttctgtaatttctttacccgtcccatgatttttttttaagtagtaatttttaaaatttaagaattatattttctatataaaagttttgtaaattgtatcattatctaatacatttatattttatagtttaattttatatatagtaacattatacataccacataacatttttggttttatataattgtttctaaattaggatgatttgatatgtttaatattagtagtcttaaaaaataataaattaaagatttaacccatattgaaattaaattaaattaattaaaatttagatatcaaatcttatatgttgattttgattggctattatttttggaaattaataatgtatttcgttttttaattaattaaattagtatttgactttttaatccttaaatacataaattaatttactctttaaaatttatttctaatggcatacctatgtaattatttacaaaaattaaggttacatttaaaatgtacttcccaaataatatagtaggataaagtaaaaatatttaagtaaaaaaaaaagtaggatttgacttgagttttgtctttatcttactacataacaaaataacaaaaggttatataagtcatttactaaaatctctattagacaaaaagttgtattagagagaaaagagaaaagtgtatatttctcatatttctaaaaaaactaccgactttgcaaattatttgtagaaaaagtgtttactttccaacttatctctattttaattcggtaggaaactaaattatcaatataaaaaatttgtatagtgatgttgcattttctcgatccaatctgtcgggttgtgaatttgctatattgtacatgcgatttaacacaaacttcaacttgtatagttgtatttatgcttacgagttatatttgcatacattttctcccattactctcatcacccactggccacttcatttcccattataggccgctatcttgttgcaatgtgatttataaaatcatctcaaaaatcattgcgaataggcttaagatggtgctaccaaagttcattgcggggaaccaaactgcttttgtgaaagatagattgttgatagaaaatctgttattggcgacagagctagtcaaagattaccataaagagtcggtttcgagtagatgtgctatcaaaattgacatttcaaaggctttcaattcggttcaatggtcttttattcggaacattcttttatctatggatttcccaatggagtttgttcactggatcatgttatgcatctctactgcttctttctcagtccaagtaaatggagaattagttgggttttttcagagtaaaagaggcctaagacagggctgttcactttcgccatatctatttgttatgagtatggatgttctctccaagttgctagaccaagctgcaagtgcaaagaaatttggttatcactcaagatgcaaagaattaagtctaacccatctcagcttcgctgacgatcttatggttctctccgatggtaaggtgcgatctatagatggcatcgtggaagtttttgacatctttgcaaagttctctggactcaagataagtatggagaagtcaacaatctacttagcaggagttacagaggatgtgtatcatgagattcagaatcgctaccaatttgatgttggtcaactaccggtgcgttatttggggcttccccttgtcactaagcgcctcactgcaacagattatagcccactacttgagcatataaaaaagaaaatcggtacttggacaactcgatatctctcttatgcaggtcgtttgaatttgataacttcggttctatggagcatatgtaatttttggctcgctgcttttcggcttcctagagaatgcattagggagattgataaaatatgttccgcttttctctggtcgggaccagatttgaatcctcgcaaaactcgggtctgttggggtgatgtgtgtaagccaaagcaagaggggggtcttgggctgcgttctttaaaagagatgaacgaagtaagttgtttaaaactgatatggaggattgtctcacacacaaactctctttgggttcgatggatagagcagtacttactcaaacatgatactttctggtcggttcaaaccacaaccaacatgggttcttggatgtggagaaaacttctcaaatacagggatatcgcaaagcagttttgcaaggtcgaggttaaaaatgggaaacgagtggctttttggtatgaaaattggtctaatcttggtgtgttgaatgatttggtaggggatcgtggacgcattgatctgggaatcacgtctcacatgacgttaagtgatgcatgggcgagccgtcaacaacgacgacatcgatcagccacgcttaaccagattgaagaggccattatgctgtagtaccaaaaccgggtggaagctgaagatagcgtcctttggagaggaagaaatgatgagtacatgccaaagttctccacacgagacacatggaatcagacccgtaatacatcaactccggttacttggcacatggggatttggtttgctcatgcaactccaaaattctccttctgcgcatggctagcggtgcaaaacagactctctaccggcgataagatgcttcaatggaacaggagactgtcaccaacttgtgtactctgcaacaacaatatcgaaacaagaaaccacctatttttctcctgctgctacaccgcagaaatatgggaaaatcttgccaaaaacatatacaaagctaagttctcaacaaactggtccactattttaacttctgtctctactacttggcgaaacagaacagagagtttccttgctagatacatcttccaggcaaccatacacaccatatggcatgagagaaatggtagaagacatggggaacgttcgaattcagcgactcatctaatctggtggctcgacaaacaaatgaggaatcaaatttccacaatcgcagcaagtggagaccatcgatatgataagcctctccaactatggtttcaatcaagatcatgagcttttttaaagtttttctaaattattctctactctttcaatcataagttgcacttgctgtataaatgtttatttactttttgaatataatttaatattaaattcaaaaaaaaaaaaaactagtgtgcatatgccagtattttttagcaataaaataaaaactatgcaagtataaacgtattacgtatatatacagtataactcgcatctagagaacaatgtgtgtatctaagtggaacaatttgtatgttttttcttttgtcaaaacactatgggttaagaaacaagactatactatatgaatttatttatttgatagtacatcagtcatggatgttgcaaacagttgtttatttgtttagtcaaatcattcaaaattaattgagaaacgcatgcaaagtgcaacccataacttgcatgtgttttgccaactcatccacactggctcttcaatatccaaagcgacatgagcgttaattgttttcgtcttaattaacagtatgccatttaacgttttcatttcgacattcacgtcgtttcaaaaccacgaaaacgtaactgccacttcagtttccattcaacacgtgaaagcctaaatttaggcatataatgggccaaccaaatttaactggatccataggcgtaagttcaatgattcaaagtgaaaagaaaccataaactgtactgatgtacactcggttgggagccttcaagagaagtgtatatggttttggtccaaaaggccaaggccgtgtaggtacatgtctttgacaagctgtctctagttatcactagttttacttaaacatttgctaaatatttaaaaatgtaacaaaaataaggaaaatgataaaagttcgagttgctcaattacacagttatacattttcaatttttgttagtttcaaatatatgaaatttatagaatgtcattttcgacggagtaaaataaaatttatatggtctctaataaaggtcttgtagcgatctagatataggttcttatgtaaggagatttgctattcaagtaatgagttgcataatccacgtgtctcaaaatattcatttaatcgaatgcagattagtttaacatttttatgaaattgtaaaatcatcatcaatccatcaataatatgcaaatcgatatgttatatattcatcttgaaagccttataagtttatacaccccaaaatgccaaacgtaaataaagatactaaaataaaacgtcgacacacacatatatatatatatatatatatatatatatatattaggttcaatttcattttaagttgttagattattctatatatcaagtaaataatcaactcttccacatttcattcatatttcccacagagatgagacatcaatctgtttactataaatcgcaatatacatgaggattttctgaatcgtttatgaaaaaatgtaactgtttggttttcatctcatgactcacgtcactcaccatatgtttggttttcttcaaaatgagccagttgggtttcactatgttgcagttgcacaatacataaaaatatccagatttaatttatttcatctgcttaatttagcaattaatttgaaccattgatttttttttttttttttttttttttttttgaaaatgagtatgttggctgatgcaaaattcatataatgaaagtggttttgactaatactaatagtacgatgataggaatatctgctcagtcattttcgtattaagacaaaacaaaaccatgactttttgtaaatttcaaacttttccagaaatatttattttttagccttattaaacttttaccaactctcactatttagaagttcgaggtagttttgaaaatgcatgtgtgttttatagttgtgaatttgaagcatacaaactggcaaaagacagacatttttaatataaaaaaatctataataatgttaaattgaatagctaagcctactttgaaaacatatattaatatagttgccgaataaaagtttggataatagttatatatattgctaaaaaaatatcaatgtctcttcatatgaaaaaactttttctgaaaaagtattataattttctagtatacatgacgttgcttctacaagcttaacaaaccctagcttggaaatatctctatttgaatttctcgagttgttgattattattttattgtgtgatgaacattcgcactttacattgattttcttatgtcatggagattcttatttctttgtttggtattttaaaaatttttcttgatcgttcatttcctttcttaacaaaactaaccaaattggctacgttgagatcgagttgctttatttgcccacatctgattttttattgtatgtaatgaagagattcatatcacacacaattaattcggttcttcggttcttcggttctccaccttatgtatacaatatctggtgtgtgggtttgataataatcttctcaaagaaggtgattttatatagaaagttttaagaaatttacattaattatttttacctaaccccaccaccagtggcggatctagagaaatatatagtttagggcactattttttaatatatatttttcaagaatatgatacataaaatttattttttattatttatgcaagtgtgtatagcatggatatagaatttcgtaattattttcatatatatattaacatttaagatataacacaaataatatttaatcatatcacaaaaaaatttcaaaataaactttaaactgataactaaataaggaagtttgagctaagtgtatcattagataattcaaattaatgtttgtggtagaagaaaaggacaatgtaaaaaaaaaaaaaagtatctgctaactagattcgaacccaagcacgggtgaaagagtatgggggacacaaccactaacgctggcttcacatatatcaattgtcttacaagataaaatttataaaacttgtgtagggcacgtgccctacctacccacaacgtagatccgcccctgcccaccacttaactttaacatcagatggaatcttcctaacttttatcaaaagtttaagaatttgcattttgtttcatcccacttaattaaccagtagtacatgcatgtgagattaaataaattacgcagaaacaaaagaaaattattgtgaatactaattgactccaacaagcaaatatttattgattatgcattttcaaagaatttaagtaaatacatcataaatccaattattataacgataactatttcatatagtgtgatagaataatagatataaataactatatatatgggttccactttgtataaaattttagattattctttaaaattaagaatagcctcatccaacttcttaaagtacttgacagattcgtcgatgatggaatgtggatcatcgatgtctttgtgaaccttctcgaagtggaatgtccataccacgtggctaccatcaccaacccctatcggagtaacagcaatggatcctttaagcgtcttgaagtatttctggatttcggagccactcatttgaattgtcatcgttttcttcaccaaatccacagcctcgatttccgtcttgcctatggttgaagcataaagttaattagcgttaaatcaagaatattatgaatggaatgatgaatcaatgaggaggttgatgtaaataatggaaaagagttaccatttttttcaaaagggcgattcgtgtcctcaacgaaagctgaaaagaatttgtctgccggacacttaacgtcaaacttaacagacaaagctccctttagtgtcattatcgatttttttttattttttttaagagcaaatgtttttgtggatgtgatattaatcttctcaactaacgtgtttatatagagagagaggtttacaaaaattaccttaattacttttacttagctccatccactttacttttcaccgtaaggaatctcaccaactttagccaaaagctccaatattttgaactttgctttcacccgttcaattattcattgtggagggtaaataagttgttcatattgatttgatctgcataatatatcaaataactccaatcaagcaagtattttacgcaataggtgtttttctaactacattcttaagaaatgtgatcaactggaaatggttttgactaatgaatattgtgaaataaaatcacgtagtcacgagttactcaactttcacaaactgatgagcaacctaaaatttcaattatgtttagcaacccatattttgatctattttttttttaatacatctagcgattaactacccggaagaaaatacgaataatgcgacctaatttatttcccctgcttaattttgaaagaaactcgaaccatacgcaacttatctatatttagtactttatcatgaagaaaaatgtgaacatgtgggacaatgtctttgatgaagtgaaagtggttttgactaatgtacatcatcaaataaatatcactaaatgctcaagtcactcaactaactttagtttcaattaccatacattaggaatagtaataaaaatcacattagaaatttcacaatatattatctgaactagatcataaaaaataagcgtgttacactgttacgttttttttgtttgtttttcggggtaagcgtgttacacaaatgattcttctttattacccttattgagaaatattatgactatatgtgctatttctttttcttggtatgttgatgaaaatcttaacttttgctagcttgctatttctttttcttatcagaaataaaaattattgggaatttagcgtatgtctcaattaaataattctgaagagagatcatataaccatattttgtcaaggaaatctcataaccctcaaacaaaagaaaaacctatctagcttactagctcgctcttaatttatgatttaactgattcaactgcattatttaccaattggattcaaccaaaataattattcgacgtagttgattttgtaagtacattattaaaaatatgataataaaccaatgtgaacatgatgaattataagttttaacaaataatgttataatatataactacgttagtaaatggattctagagatcataatgcatacatattttacggtttgtgagttgatattagtgattgttccattggagatgagaatttgtatcaatttcttaactgaaaatggcaatgcgtgaacgtgttgtatcattatgactcacacattgttattttgttcataatgagtctgttcaagtaaagtggatgtctacgtggaagaaaatacaaattgtgcaaagatgattaatttcttctgcttaatttagcaagtaacgcgaaccatacgcaattgattgatatttagtaattttcaagaacaaaaatatgataggtgaccagcgggtatttatgaatatcatcagataaatactgaagtctctagctcaacgttttcgagtaataaaagtttaatttcaaatacattacatttaaatatatcttaaaatgtgtgtaacataagtaagttttatatgcatgattattgatattaaattgagaaactttggtctttttttttttgagaaactcaaaatttctaacaaatgtaaaagttaacgataatgaatatttattaataataagaataaattgatagtctctttggataaaagtacctactgaaactgaaagggtatatatatagttctgatttggtccgaacaaacattgtaggtatattcaaagaggctatcaaagttttttcaaaagaaaaacattgtaggtttatttgactgtccattttctttcttatgtcatggagattcttaattcttagatttcactttttcttgataactaattacttgcgtttcttaaaaaactaatagccaaattggttaggttatatatgcattgtcttgtccatgtgttttttcttatgtattggtaaatcagaactaattaaacaatgagttacataatccacatataagttacttaatttatcaaactaatcatggataaattagcctctatattaaaatcgttgatacaaacaataactcacatgcaaaacgatatattattatgtatattgaaatctttatgagtaactacatcccaaatgccaatcaatgttaaccattactagtctatatgctgcaataaccgtagataaataactttaaatgggttccactttattaaccagttaagataactctaattaaaatcttcaacaagatactcatccatctccttaaagaactctacaaaagtgtccatgatggtgcctgggtctttaatgtcagagttgatcttctcatactttactgtcaatatcgcacggtcacagtcattgtcttccacatgagtgatggtcatggttccttcgagtttcttgtacccatccgggttttgccacgtggccatgtcaggggtgattgttcctttgaacgatttgtaccactccgatatctgaaagccctcgattctaaacgtagtctttttcttctccaaaggtacctcctcgatctccaccgtgactatggtgaaacacagcaattagagttttaaataagatttatatcaatcaatgagatgtacgtaatggagaagagttaccatcgtctttaggtagatccatcgtctcgatgcaagtttgaaagaatttcttcgccggagactttatgtgaaaatcagttgacaagtatccatttagtgtcattatttctctctcttttttttttttttagtatatgttgtgtggcttagataataatcttcttagttcttaatgatggtgttttaaatacaaagagtttctgaaaattacgtcaattattttacctaacaccaccatatctaacattttcaccataatcgaatctttctaaatttaaccaaaagcttaacagacatgtgacagctataaacatatgtattcagcttaattcaccacccaattaattaattaataattgtatgtataggagatttcatctacgtagtagatggtttgtaaacaaacctttataaaatgggaagttctttggaaaagaaaattggagattctaagaaaattttcagcaatgtagcaaaatgttgaaagactaatgaactattactaaaaattaaaataattagaattaaaaatcaaacacaaacaaaataaaattataaagatttctcaaaagttataatgacgattatccaaaaccattaggtatatgtatgagtctaagaaaatgtgattgtcttgatttcttcaaaatgaatttcttagaatgtacctactacatgcaagtaaatagtagattagactaaaaccaaaaagaaagaaaaaaagcgtaccgttgaacaaaaaaaaacacgattttgcaaatccataatgttttaattagcggttcactatctttcgccagatccgtcactatttcgcaaatttcatgtcaaacagaattgatacaagatcttgagcttccttcaccaaattgattctctgagtccaagttgcaaagcaataaataacgtcgttgcaagttgctcattgcatggcaagtctcaattgatcggaatgtccttctttaaatatggttcggtttggctccaactcgatcgtcaaactcaaactacattaatatgactcttcatttgtttgtcttttaatttatttttttatctaccaaccaatccggtccaagagccaaataattactctaccacaaggttcgattttttcaaaatgttcgactaaattggcttttgtaaaaagcttatggcctactaggctgcataaactccgaaatcataaaacgtggatattcataaaggggttccactttattcaacttcttaattagaaaaatcttatagagacggtcgaaccctcttatataatttaaaggttctagtgttaggcactagtttgcttaagaagatactcatctatctctttgaagttcttgacagcaaagtccttgatgacatgtggatcatcgatctcatgggcggtcttctcaaactcaccagaccatttcagaaggctaccaccatccttagggataacggtgatggttcctttgaaggttttgtagtactccaacatttctccgccaatgatgctgtacgacatgcttttgttctccaaatccactgcttcgatcctctccgccgatatcttcaccagtggagatcctatattacggtaaagagtagaaacaatgagcattttttaaataaagatatggtgagagagtgaaatatagtcaatgaagacatagatcatttagggtttataatgagttattgaccattaagtaacatgaattatttattattatctttaatacatacaagtcttcctatctagaaccacacttgtttttttttttgaaagatgtcttcatgaatgtagtactcaatcttgaatgcgacaagatttatgctaattacttaattagccatttaggtatttattcgaaacatgatttattaattatggttacaaattaaagacaaaatgagaaatgtaccttctccataagtaatgaggcgaatggagccaggagcgttgccatcgccggctagaacttggatggttttgtagtcgttagggaaagctttggggaagagattgatgccgtcgccaagggctacccagaacttttcagccggagacttaacctcaacctccacatgaagaacaccactcaaccccatttgtttctaattaaaaaaaaaactcaattattttgtatgtctttgaatgatttgtttgtataacttgtcaatgaacgtgtctatatatagagaggttttaaagcctttagtgatatgataaattgcattaactatgtggagcaactcatccaactaatttttcatcctatgggtcctttttaaaattaacctaaagcttatacatttgccattcttcattgctatctcacccactcaaagaggtggatgaatcaataaatcgatgcatggtataacattcagtacaaagaaattaaaactggttttgtactgctttaaaacaaaattgtcggtgataaatgttgaaaaacatatagtattgagagtctatcggccaaaaaaaaaaaaaaaaaaaatctagatatttttcatatattcatacacgttatttttatggctacactcatctacatatatatttttcttattatggatttaaatttttaggaaacaaaattatttcaacttttcatgattatatctaccctttttaacacttgattaattggtttctcttctttcaaggtttttagatcaaagtttcaattgtttgatttatttgaaaaactatttatcatagagagtgtttatggcctagagataaactaatcccttgttcgtatttcttcagatcgattttgtgagattaccattttttcagatcacttacttggttctttgttgaacaatggtaatgtcacacaatcgatctgaagaaccaagtaagtgaagtagcatattttacataattggttctcatttacgacctctcataataactgtgggccaatatgtgaaacatgatgagatttaaatggttataaataatgtattatcattgatcaaaaataaatcagtaaacgttcacgtcacacaattagtcaaacataacaacttaataattgcaaattgcatttcataagaataaaactttctaatcataaagagctgaatgtttcctctttattttctacaataatcttcttggtggcactggcatggttaggtgcaatgcaataaagccaaaacaatttcttcatcgttaggtactttgatttcaccattgtgcgagaaaacagcatgttggtttccattgatataaaacgacaaccactcttcaatcgtaaaataaaaatgttctaagaatgagtcatcatttctattcgaagcaaaagttcatccgaacccaaatccttaatatacaattggatacgttaaagttacagtatcctaggatttgtcaatcttattaaaaaaaactaagattgctttaagaaaattataggttttctccacttataaagtttaacttttataatctctctctcaacgaactatgaaaacaacattagtaaatagtaatatagaagtctagagaaaaaagttgagacgaaaagggtaaggaaacactctgaaagcagcttcccatctctatttgatcgacagagatacgtacgtacacaaactggttagaaggagatagattcagacaagagaaccaaaccgagaatttgagcttagaaaagttaaggaaacatcaagtctttactttctcaagatggctctcaatttcttttgcttcacgtacatgtaatctacgtattcttcagctctaccgtctctttctctctctcttgaactttcggtagttgaaatactgctgttgagtatttcagaaacctaaccctcaaaatcaattaactttattgcactctatatttatcatcttcaaccacaacaatcttctgtttctttggaagcaactaactacaaagaacatcttcacgactagaaagacacatacccttctgtcttaaggacgagaccagaagcttcttctatcggctttgtaatggtctacaaaggataagaaaaaaccaaatccaaactaaagctatgcattttccacttgtttcggcttggaacaagagaaggagaagcaaatcatatgatacggatccatgtacgttccttttctccatcatcttcgccagatggcataaaagtatgttactgtttttgtttttcgacattactactactgaatataaagggtttaggtaaaactgaatcaccatctgtttgaaactaaccttcttctcaggggtctacagaacagcagaatgctggcaaatcgaagatcaggcttctcagccaaggaagcgaagattcgggtcatcagtttataccctcaaggagatggaggaggccacaagttctttcagtgatgagaatctcctcggtaaaggaggctttggccgagtttaccaaggcactttaaaaacaggagaggtaggaactatatagcttcatttatgtgatttacaggctttgtaatgttacaaaaacttttctatcgaagaggagctattagagtaggatacatatcttaatcccttgttatttgaaggttgttgcaatcaagaagatggatttacctacgtttaaaaaggctgacggagaaagagaatttcgtgtggaggtggatatcttgagcagactcgaccacccaaatctggtctctttgatcggctattgtgcagatgggaaacaccggttcctagtatatgaatatatgcaaaatggaaacctgcaagatcatttgaatggtaagtcaacaaaataagagcccaatccactaaaaccaattggcgactaaaccgcgtctttatcacaggaatcaaagaagcaaaaataagctggccaataaggctcagaattgcactaggagcagcaaaaggactcgcgtatctccattcaagttcttctgttgggattccaattgttcacagagacttcaaatccaccaacgttctactagactccaattataatgcaaaggttcttatacagttaatagaaatggagggtttatgcagcactaataccaagcatagactaaaactaagatgtgagtgtaatccttgcagatatccgactttggactagcaaagttgatgccagaaggaaaggatacttgtgtcacagcaagagttctaggaacattcggctatttcgacccagaatatacatcggtaaagattcttacttatatttcacacatgattctcttccgatagggtaaactagacactacttaagaaaaattaaaacttgctagtaatgacataaaatagcctggaaaaggaactttaatcacactcacatatcagagccaataggcaacggaggacaatttttagcataatttttgttcccttcttctgtggcagacaggtaaacttactctacaaagcgacatttatgcatttggggttgtgctgctagaactacttactggacgcagagcagttgacttaactcagggcccaaatgaacagaacctggtgctacaggtaaaatggaccttttaggttctatgattcacaaacacaaaaagttcaaagatcaggaaacttaacataggaataaactgatcaattatctctacgtttcaggttaggaatatactgaatgatagaaagaaattgcgtaaggttatagatgtcgagctgcctcggaattcatacagcatggaagctataaccatgtttgctgatctagcatcacggtgcatccgtatagagagtaaagagcgaccttcagtgatggattgtgttaaggaactgcaactaattatctacacaaactcgaagggtggtttgggtgggacgattcctacattcagaaggctctagacactgaattcttcgaaacaagtaaaatggattactgtcatttttcctaaaatgagaggtcactgataaaaaaacacttgataaatataaacaaacaatactaattatgaattaccggataatttcaattcaacttccagctaggaaactttgatcaagcgatattatttggatatatatactataatttcactaagaaaatcaagcactagatgtatccgtatagtatgttgtatttgctgctatgaatgttttgctttaagagaaatgagtacataaattcaggggtgtagtcttgttttttctttccttctttcgcctaatgcctaaagaattaaccacatgtctatgaacaagaaatacaatcgctgccaatacaggaagcagataacaaagataagagtgtgtgtggagtacctctactaagatcatataaacaataggtcgaagcaaacgggattatcaacccgacccttggtcatgtcacatttagctcctacataataaagccaatcacaatgtttgttataaattcagaaaaggttgagaagaagactaaaagctaattggtacactgatggaaaaactgtacccatgtttacacatttgcagaggaggtcagctcattatcagaccccaccatttctactataggattggtgcatagtggaagaagtttcttccgcatcaaatgcttacgccgctgtaacatcagaaggaccaaaactgtatctgtcttaacaacctcgtatcctgccttcttgtacatattgaaaggagcctcatcaaccatcctacaatgcaagtatacatcttttgatggactaatctgagatatcagttcctcactcgccttcaacaaatgccacccaattcctctccttctaagatcctctttgacagtcatgttacagatataaggtgattccttaggaggagttggagaaggaggagaagcattagcgcctcgtttctccaaacaaacctcaacagttccagccatcacagcctcctcctctccatcatcactaaactcatcaacttttttcctaaagaaaccaactaaagtaactgcgtgtggcaacacttctcttctctcaatcaaatactgcttaatcaaaaaccgtaacacagactgataaccagaaggtaataacatcgattcaccaaatgactcagccaatagatgcaccgttgaatccatctcttcatgtctcataactcgaacccacatcgatccagattcaagctcttgaaaatacgcaaatccttcaagagttttaagcttctctaactcatcgttactcaaaaacctcccggtacgaaacgattcctctagaaacgcgtaattcccggtcgatttagagttttcttctccagtttctgtagctgtcgaaactgaagaaggagggaaagcgaatctgagattggagcggtgagatttacacgagtagagtaatggatatctatgtgaagaagacgagaagccaaacttcgttgattgggttggtttgagagaatcaacagagaaagctagtgagatgcttaaagccgccattgacacacacacacacgattttctccgatttgattgtggttcagtgttcgctaatctgtttataacgaaataaaatggataaagtaacagtcatacactaatctttaaaacgccgcgttttgaactaatcatgaagctcagtagttattgggcccttatggcccatatactgatataaaaatgaggaaactgttataagccagtagctatttgggcttaaggcccatattgcgatatatatagttttaatttttccgaagttcggcgatttcagaagacggaggaggagcgaggacggccgccatggatccagcaggagcatcggtggccagcgcaatcggaggagaaggagagaaattcgcggtggggaatatttattcagtgaaggtgatcaccggagatgagttcagagggatcgtcatggcttacgaccccatccccaacttcgtcttttttgatatccttaatttctttaattgtttgtttcatcaaaatttgagatttaggtattttcaatgtcttgacctgaattgtgttatccttgacgagttattggttattacaagagggtacaaaacctagacctgggcatttgaagaacactcggatggtgaatgcgagttttattacagggctttcgtatttaggcaaaactgaagatccacttgattcagacaacttttctgttgatcttaatggtctccgagctaaagaggcacttgctatcaggtgataagatattttgttgttgaatcctttcaaaatgcaatttttattgctatttgcttgttttgagcttacttgggaaaacgtattgagcacaggcaagcggaagcagatgctgaaagaatgggagttggtgttaccgctgaggctcagagcatcttcgacgcgttgtctaagacgtaaggatcttctctttttatacgttttcggatcgaaaaataagctaatctctaagaaggaaacacagcttagagtatacggtagagaggtgggacgagatcgtaatctaatgttgtttagttgaactattagttctttgtaaacaattgcttgggttggaggattttgttttgtgcgtctaatgtgttattcccaaagataaattgttaggatctggacatgatttagtgttgttttgctcttggtttccggtgatgctagtttgcaactatatatatgtaaagtttctatgtttgtggttgttgtagattacatatgttgtgggctctagtgtcaagtatctttagtcttctttgtgatactgatacagttaagaagctgtctagatacatagttttagactacataaatccttaaactttctttgtttgaatttgctttttctctttcgaatgaatcacatgtgaattattttccttttaggcttcctgtgcaatgggaaaactcagacattctggtgatgaaagaggtacgcgttcgtagcccgtatctttcagattgtgtctttggaggaactgatgctgccaacaaccgagtcaagaaagtggtaagcgtcactttcagttcattgtgtaatgccaattaagcctctggtgttatattagtcatttgcattcaatcgtgtaacgttgatcaagccttgggtgtgatagtaatgcaattttgcttttatcgcagcttgagctggaaagacgaaggttgcaactctttggcacatgaggctagtgaaaagagtcggtcagtgaaatagcgagaaagggttcgttgctactaacccgaaaggcgtctatagatctgatcgaccagcgaaaagcggatatgtttgcttttcgcatgttgttgtctttacttagaatctgcttgtccttgtaaaagcagattagagatttcttgagttacagccttacagggattgaaatttggactaatttcaccctggttattgacaagaacagtgaggtcttgtcttgtccactttttaccagggcttggtttatttatcgcctggaactgtaaactattctgaaatgttgaactactttttagtgacttctccggtagatttttacatctcgtgtgctctagaactgagttccttgatcaatgcaaaagttataagaaatatttttctgttgattgttagtattgaactgtgtatagattccaatgatgatcataatagaccgtggtgatgtataaaaccatcttattcgatacacaacatatacaactatggacacaactactttgcgtttgggtgatcaagcgtgagctaacttgttgattagaaaccaacattgatgctacatgcgaatgaaattttacgttacgactaagctaactctggataagcgcttgcatgaggagatggagatataacaatgatcactcaggttgcttgatatcatttgaatcaaagctttaagaatgttgtaaattgaatccaaaaactagtaagacaatgtgttaattcaacattggaacttataagtatcatagatcgacgcgagagttctgcttctaacagatacttatcaccaaaaccttaacctatctttagtgcaaaacaccactaaactatgagccacaaaaattattaagaaggcaacaaaaaccctactaagaagccaaaggaaacaatccacacacttgcttctaatcttctacttgttgagtatttcgctgagattgagttgctttctttagcaatccactactaacacaagcctgaaaacacaaccatttaccagcaagaagacaccaccacagcaacagtgtaacattactgaactcaagatgaaaagagactaacctgaagagctctcttaccacatgaacgagaattgtgccctgcttgaccacatttattacaatgtattgtgcgcttgctaagtttcccctttttcttaggtggagacacattctttcctttcctctttcgcttcttcgatggagactcacaacaagtacttatcaaaacaagaatgaccaaaatggtattttctttggattagtttataatttgagcactttatataccttaagcttcttcacataatccggatcataatctggatcatcacagtacttagcacgttttcttttgttattatcagacgttatcgtgatcatccatggatcatcacacgttgcacgtgttcttttgttattttcagacgtaatcttgatcatcgatggatcatcacacttagcacgttttcgtttgttattatcagatggcgcagtatgttgctcagcctcgggagggatggttagcttagtcccagctgaaaggtagacgctgaaaccaagaagaagattcgggtgttttttcatgagtccctacacctttgaaatgagactagcttcatcaactctacaaagagactagtaacttcagagttaattcataatgtgatgttttgttgtttagcagaattgcgagttgaagtttagcagaattctaaaggtaaggagagattcatggttaggaggaagactttgataataatgccagggagagattcaatttttttgtgtgtttgcaacttaaaatctagatcttccaagttattttatgttttaaatttttgataacttaagtggatgattaactttggtgtgaattaaaacataaaataaattttggttcgatctggttatgaacttcataatgtttctgaattgaaccgaattgaatatttggtttttctattcaaaagaagattatttatctctttattcattgtaggtacgtaaaataaaataaaatatatattaatcaaggagaaggaggtgaaagagtaataggattacaacaacaacgaggaatgtaaggtcgtttaatagggggaagatcatcaacctcagaaggaggatataggcagctaccatctttataagccaataatgcacaccatttgttacattctggatcttgaaatgtcgcgttacaattttcaaagcatgttggaatcacaagcgttgccgcacttattcctatttctgcgatatcatcatatataagaagtaattaaaactgcaaaaaaaaatactatgaataagtaaatattgtaataattgtattatctaaagaaacataccagagaagaggtcataggaaatggtaatcataacaacgagagtgagtgcaaccaacaatttagaagaacccattttcaaattcttactcgatttgcttttattaaaacaggatttatcgtctttgaagattttgtttgatgtacattagttgagtatgaaatgatgtatttataattacagaagaagttcattaccataacttttgttaatataatcaatgtagatttttaactaaaaatttaaatctttgacccaaaaaaaaacaaatggtaaatcatttgtttggtcaaagttcaatcatgttaagaggaagatctagtgataatagcactgcgaatttaaaagacacataatctacattaacaatttttttatagttagattgacttattcaattcttagcttacttgctacataagaaatttctactaacaacgaactatcgttttcacttttcgtaagctgtttaatgctatttcaattgatttgtttcatcaagcgtcttccaatttgtattggtttagttagttgggcatataacagagagccaatgagccacatcgaaaaggcttaaggtttattcaaatactcgtttgagtatgtgttaaaccttcgtagatcttccttcaattccgatgagacacttttcctcttaaagtacacactcttgttttgaaaaataaaattctctagtatagttaaaggataataaacatgaacatattcgatcaaagcggatgaaacattacatattttatttactaacaacaacgacgatatgtagaagtttttggaggaaatccttcggatagtatgcacacacttcttttataagacaaactgacacaatatttatcgcattcttgtgtcaagaatttcttagtacagtctcgttcacaagtgggaggcgaagcttgcacgttgattccagtttcaactatcaatcagtaaacggaaaatgtaagatttttgttttttgagaatgatacaaaattgtatatgtaataaatgaatctgtattgaaaaagaacttataccacagaaaaggtcagaggaaatggccagcatagcaacaataatgaatttaatcatcaatttggaggagctcattttaactaaccaaggcaatttgtatattttcaagatagagattaatttactttgattaaatatgaaacatatactaacatttttgaagtacattttaaggaatccaattgggtagacctttttttttaattttcgacccaaaattgaatcagtcggatctttcaataattactttcattcctacaaaaaaaactaaacaaaattaactttaaataaaccagtttaagaatatatcattctaacaaatgaatatttgacaatcaagttgttttctattataatgctaacgatactaatcatatttgtttcctaaataaaatatagataaatatttttggaaactaattcattataaccttaattattatagatatttaaaatttaaaaacgtttaaagtatttataatatttaaattctatataaattttataatattaataatatagatgaactctatacaaattatgtatatatatatatgtaatggaaaccatttgcaaacttttaaattgacttgaattatatgtttttaaggaaaaaaaatattgaaaagaaaaatgacaaaatgatgtttaattttattaaacgggctatataatggaacgggtttggatcaatattaaaatagaacaataagctacggttaaattctaaaattacaatcaaaatataattatataatcctcaacattaaacaaaataaatacaatttaaatttcaaaattttaggtacaaaaaagtcgatccgcggtatacaaaaaaaactattatatacaacaaatacatcagtttataaaaaactcaaataacaaaaaatcattttttgatgattgtatttccataaattgttttttcaatttaactaatctcataattttttccataaaaatcatttaactgaaaagaagaagaagaacatatggtcatttcagaagaagcgaaccatgtacacaaaagaaaactatacagtcattttgtctcttaaaaatccgaatcattttttttacaactcaatatagaagcatatgttcatttcatgttctgtttaagagctaaactgtcttttacaactctataaaggctttttattatagcattttcatataaatgtccatgagatctttatctaggagggaagacacctacaattgccaaaacaaaaactgtttaaaatattgtcaaatcatgatcaaaagacttgccaaaaaaattgtttaaaaatatggacacttacctcaatttgatcttggagaatcgacatctttttgcaccgtacgtgcatcatgaccttcataaaactatgtgcaatatttgcatctttttcatgcaaatccaaacattcacattcatgattctttttttcgtattttcttgagaggagtttaacattatagcatttttaccttaagcatcttaggtgtgagatatctttctcttcttggcttcgggaaatttaattctcttagacttggtaatgttgaatgagaggagatcatcaacgggaactctaggagttctcttagcctttggaatctcaaaggagagaaaatcatgcactgaaacgacatcttcttaagcgggaatagtgagaagaccctgaaacaactcatacctttcgaaaatgttgctaagatcctttagaggctgttggtgtccttggagaataaacaccatttttgccatagtatcggcatcacattccctacaagtttattagtagagtaattaggtcaatcatcacaaaatcagaaggaaaaaaaagaaggaaagaatgaaaatttaattacttaggatcaaatatcggtaaaaaggcttcatattttccggcttctctatcaaaagctttcttcattgattgtaagattgcagacgatcgtgttttgagatcttgaactctcttagacttgggaattcaaaggagagacgatcgtgtttgcaaaaggtccatctttgtccacatccaaccatgggctaaaaaaacaagatcaaaatcatttgttaatctcatcaaattaattcttctattatccttggacaaacaaaattcaatatgttgtgtctagcccatatccttccttaatgttcaaaattctccatagaatatattttgttcaagatttgtacttaattcattatttcttttgatggtttgatttattcagttagaatattcaacactaatatactacacaaatttatacatttgatattttaattctcttagatttggagtcacactttatgtattatgccgttaatatcattagtagaaaaccatgatttatatataatttctttattttttaaactctttcttgttgacaacactattttaagattttaaaaagtgccttaatctaatcgtcaattaatcttgatgcatgtaaagggattatatttgcttaaatatatttttggataacttagaaactcatagcttaactttatatattattatatctcataaactctcttctactaacaagctacttttttatctaagaaaattttctaatctaattgtaaaattattttaattaaaaagtcactccatgattggtggccaatctatagtaaaagaaaatttagataactcattattaagaaacatatgtattgttgaaaatcaaaataaaaacctaaattcaagagatttttcgagcaactcgtctctctctctcttcgtgatcgtgtgtcttgtcctccaaggcttcttcttttttctccaaaattcgataacaatttcgtattttctggttcactgcatgggaatgtttttcaggcttgtatttaattccttttgtagttgctggcataagtttgaattggatttttgactacaattttgtatctgctacaaaatttacctgctgattattaaatccgaatgatgaaagtttgatcaccttgaaccctcaaatgtaaaactaaactccaaaacgtatcctctggcaagctttttattggtgaatgttcttctttcttttttttgttgactttggaagagcaaattaatcggtgtcgtaatatcttctgagttgctattaaatgcgatttgtaagttttttatgcactctaggttctatttcttgaaagatcctaaagtggtaatagctttgagatactagagagattcagtgatgatcaaaatttatatgttttaatgaacaaaatttctctttctaattaaggataccaaagggtttagaccaagttcagaccatggctgtaagaagagtaccaccgcagctaactatggatgattctgtttcatacctcaattctgtgaaaatgacatttcttgatgaacctacaaaatttaaagaatttctcaagctcttgattgatattaaaggtccttggtatgaatcatcttccactcctgatctacacaactaacacacatgtgattttgattatgatcatgttactaaagtctctttgtaaaatcaatatattagggtccacaactaaagcaagcccaagcccaagcccaatgtgatgtccatgtaactagggttttagcaagttagaagattcatatatagttatgtaatgagaactatgactgtaactttgagagttggaaacaactctcctcattcatcttataaaatatcaaatccaagaatcaattagatcttggtgacaacctaaagcttcttcctctctttacattctttgcacaataaagctcttcatgagctattcaatttctctttcaataagctcaatgagcatcaatctactcttgtcttagaaatgtcaacacaataaagatagtagcattgcaaggatgattaaactcattaaagcgcacccgcagctgcttcctggtcttaatgtcttccttccagaggctaacaaaggattatgccaatctcaaaccataggttccacaagcgtatccccggagctacttaaggttaatgcgtctgcatacctggcttctgtggaagaagcatttgatgatgacaaattatttttttctccaaaccaactgagggataaaactaatgcacaacttaacagttaaatatatataccatttttcacatcgattgtggctaaaccagtacccattatcgatctcaaataaattcataataacatggttatgcactattctgaatgatgaacccaaaaaaaaaaaatttgatagacttgctctccgatagaatttaacatcttgtgtgcactagagctaaattcaggcttcaatgcataaagtacagaaggttatcttaatttatcaaagcagggataagaaaacattgtagtacggtgtatgctttgtgtacatgttagaatttaaaaaacgattataacaattaacaccatcttattcgatattcaagatataaaactaacgtagctagacaaaacatctagaaattatcaatctaaatttacacaattaacttgagactgagtaatcaaagcatgaactaacttgttgaagagctagacactaaaattgaggtctaaatgtgatcgatatttaagtgccgacaaagccaactccagatatgagaaaagcaaccgcttgcatgaagagatagagatataacaatgtgttcccaaagaaaagtccatagcaagcacaacacaagatgtatatccccaccattatctccttggagtttactctgcaaccaaccaaactctttagcaaacattagtgtagatatattattttttaactagttgattaatttagttacctttcaagaaacatgttactaggttttccaatcctaggaagtagcttagtcttaagagcatctcctaatttctcagtgacaacccattcgttcactctttgtctttcgagtatgccgatgaaagttccttttgtccggtgcatagacattacgttttcaaacaagatccaaaatatcacgaggtagaatgatctaggaaatgagataatccattgtaaataacgatatacaatatacaattaggtgatatatttatcgatcaagatgaattaggaagtagtaactaaccttggtgtcgcaatgacaatgcagagagtgatcatagagggaatgtaaaaagttgaccaagctggaatgttgacttcgggaaagaagacacttgtaggaagaataacacagtagaaaataaaagtgaagcagtggactatgatcttccgtaagaaaaagaagctgtagaccagatacaacttcttccaaatcgtcactctctgctcattaagtcattattacatagatttgtagattaaggttagatatctactcatgaattaattatttgttttagagtaatcttttaatacgactcggtttaactaaacccgaaccaaataatactagattgaaccaaaccggtcttctaacccatcagattaccaaatcaaatgcaacattttttttgtgtgtgtgcatcttcttaaagcataaaagaaacaacaaaacagaagaaaaaatcaatccccatcgaagtgaccaatcaaaacaaaaaatattgtacgtcagcctcacatcacatggcctgtttgtctctccatattaacaagatgaacaaaaaaccaaagtagttattggacgtgtgacaaaaaaaattgtgggcacgtttttgtcaagattaaataagtagattgagaaaaggaccttattgcgaataatctccataatcattttcctgaagagattagctggaccacaagaccatcgatgttgctggaatctaaaggccttaaacttgcttggtaactcgcttttcacctacaaactcagtgttcatatacataatgtaatgattataatttagtaattattattttatagcaatgcatcactatatatatatatagaattatagatatcattgcacatcaagacaagagtgccacactagtcagaaactatgtccataaccaaattctataaaatctaccacaataactatagttcaaaaggggagtttctatgtgactttaataaagttatagtttcaaaagtggaagcatacaaaaaaaaagtgggagtgtctatgtaaagaaagcactagtaaatgttggatattaaatccacatgggaacagttacataatgtacgaaagatgcaatgagggcttatttacagcaattaataggtagggataaaatcaagtaccgtgaggtcattgagaaagacaaatttccagccgagaagaccagcacgaacggccaagtccatgtcctctacagtagtccggtcatgccatcctccagcttcttccatcgcggccattctccatacacccgcagttcctgaaagagatataccaaaaccatatttataaaataagtacctaaaatttatcaaaaattcaaaacatgtaatgataaccaaatacaccattgaagctaaagaaggcatgtctagtggatccagattcttgctctgccataaagtggtagttgagggacatctcttgcatcctcgtcatcaagcacttgtttgcgttcactgcaatgaaccccacacacacatacaatcactcagtttgaaaataaactttgttaggatccttaattatgtacatagcattgttacgaaagatataagttcagtttatcacaacctagatatggagtaaaaatttacaaatattgatagtctcatataagttaatagttgtaaatgtttaggtacgtaaaattgtctaccataatgtacgtactgaatctccatcgggcttgaaccagagcgacctcggggttatgaacgaggaaggggacagagtgttggaggtaatcaggctccggttggaagtctgcgtcgaagatgacgacataattgcatagcttcacgtagttgtgcttcatgccttctttaagagctccggctttgtagccatttctgttgtctctcctctcacactttatatttacacctttgctttcccattttgcacactctgtgttcaccagctcctgaaactcaatcctcctcacattaaatatcttacaatacattatatgtgttcaaataaatcaacaaacttggtcggcaagaccttgatggtttgatcagtggaatcatctaaaacttgaacaattaggcggtccaatggccatattagtctacatgcagcacctatagataattgaaggacctgcaagttaagaacatgttaatatgttatgaatctcacatctataaaatgttccaatgtaatgtggtttataagaaacttaaatcgttatatttattgtcgattagttttgaaataaactttatgattcgtccatactataatttataaaatacatgtagatatacctctttttcgttgtacattggaatttggacaaggaccatggggtaggtttcatgtccaagctcaatgtcctcttgcatcgcctcccatctataaactttttcgggttttcgctcaaacaccttgacgtagagtactacaaggttcatgtatataccctctatgaaaactaagagggagattatcaaacaaaaagccaccaaacacttgaataagggaactataaataagctcctaaattctcgtgtccatgtcgtgtcgaagcttatcctcgcaccatttatggatgtttcaagcttcttgagagcttcagctgcatcctcagaactccctcgatggaacttctcatgcataaataaatagacaaaattagaaattatccgtaaagcagagaaacagagcgagtgatagagaaagaaagatatgctggtgttaattaccattagagagaggaaggcaagacatgaatcttgtaagaagatgagtgacttcagaaacgtagtcattttctttttgtctagtttaagctcatcagtgactaacttcaagagagactctgattgaatggtgcatttgcatctttaagctagcacattgatttattttgttttttgtttttttttagttgagaccttttgttggttttctttagtttggttggttctcgacttgtcgttaatagtgtagtgtacgttgctgattgtttggagaagatgctgatgactcacgagcagtatatcacaactttaaaccaaccacacaaaagagaaaaagaacccaaaaaaaaagtgttttcatttttcaaatcattgtcaaaaaagaacaaaaaagttttgttaactcctctcactatatttttcatccgtaattatcacgtgatgaattttgcaattgtactggtttttgtcaacgtcgacaatgataacaacaatgaccatggattttagatactaaaaacgtacgtgtctcatgcatttgcatttttattgggtcaatattttaggtccattaaaagcccattttgattattataaaaaatataagataaaaaacgaaagatatggcttcgcccgggttcgaaccggagaccttcagtgtgttagactgacgtgataaccaactacaccacgaaaccttgtctgaacatagataacattacaaaatacttaaacctaaattagaaattgatagtacttcaaaactcccattgaccctaacttttgaggattgagaccaaaacccagcttaaacccaccgagtgggttcgtcttccttcttcaccggcaagttctcacaaattaatcgagagattcacgtctctgtgcttcgtaagattttaatttgactctactaatcagttttttactcattttcatcagtcctctggttttcattttctgttttgtttcgccgtcgagaaatttcactttatccgcttcaatcatagatacccagattacgaattctgcgaaagtgttaaacttttcaactttgatttcatgtttgtaatttgacatttgttcttgaatctctgaagcttatctaaagttgtgcgtgtgtttttttttgtgtgataaatctcagtgtgtggtgacttacattgtaatgaactgtctgtctcatgcgcgttcatacattgccttgggactgcttaagagatcaagctatgtcagttctattccgtggaatgaatgtttcttctatatgccttcaaaatcatgtttaaagcctgtagctgtgagtagtgtgtttggaatctgtagtgttcattcttattcctcaagatcaaaggctgttaaatcaaagatgttatcatcaaccgttgtttcggctgtggataaagaaaaggacgcctttttcgttgttcggaagggtgatgttattggaatttataaggatttgagtgattgtcaggctcaagttggatcttcggtaattatgttttggccttaagagtctgttgtgtataatagatactctctttatgatgggaatataagagctttcttaataatggtgtaggtgtttgatcttccggttagtgtttataagggatactctttgcctaaagacactgaggaatatctctcttctgttgggttgaagaaaccactatatagtttaagagcttcagatttgaaagatgatatgtttggtgctcttacaccatgtcttttccaggtaagatcataaaatggccttcactgtatttctcttctctcctatgatgcattcttggagaatatctgcatctgccatgatttgtgatgtgggattttaaactgaaatagtaactatctctctttaaatttcttcactaggagccagctccttgtacagtcaaagtatctgaagatgagactacctcagagacgaagtcaaaagatgacaaaaaagtaagctataagaacaagtttctttggaatcttattgagttgcttagctgaattttaatgattatgagacaaagcgattaagctcgttgcttaagtattcatttttcgcaggatcaacttccttcagcttctatatcttatgatcctttggaaaagctttcaaaggtggagccatctgcttatatatcagacgtgagttgtgattatgtttgtatataccgttactcatgtttcaatggactggatgcaaaattttgtgctcaagttggtctgtttctcttatctcctcatgtgttaggaaacttgctttatcgagtttgacggtgcatcaaagggaaatcccggtctctccggcgcagcagcggtactgaaaactgaggacgggagcttggtatgtatccttttgaatcactgttactaattaaagaatgcagtgatgtatctaagtatcaattttcaacatagatttgtagagtgcgtcaaggtttgggaattgccacaaacaatgcagcagaataccatgcgttaatcctaggattgaagtatgctattgagaaaggttacaagaatattaaagtgaaaggtgactccaagctggtctgtatgcaggttcgtcaattaaaacgttatatatttttgtgcaactaggtaagtttaatgaatcatatacgcttttatcttctcactttctcaacactttctgagaaacaacagattaaaggtcaatggaaggtaaaccatgaggtactcgcaaagctccacaaggaagcaaaactactttgcaacaaatgtgtctcttttgagatcagtcatgtactaagggtatgtctatgtgtgtctctctctgtgtaaatgaatgatatcacatatttctcgtctcatgcttgtgagttgtgagaaagatactaatgcaagtttctgccattattggcatttttctttgtagaatttaaatgctgatgcggatgagcaggcaaacttggctgtccgtcttcccggttagacaacctagtctcctcttttctctgcatttgacaatgtcggatcaaaataatacagaaaactaaccaactctgtgctgcctttacagaaggagaagttgaggtggcgtgaaggctaattatcgatgaactaatataaagatccgggtttgttgttcctcaccacatacagatctaaatagcctgagccctgaacaaatgtactcatgttcgttaggaaaaaaaacatcttggattaaaatctctgttttcttgcagagttacacactagcgactagccactagaaactggtgaagaaccagaatgagcacagagaattctctgtcagatctcacagagaacagcagaaactgactcatcatttgtcttctctttacttcagatgatattttgccggcgttctaacgttttattttgctttgctcttacactagaacagttatattgaaaaattcttttgtaccattaggaagtgaataacatgcgcttccgtcagcgcgtgaaattttatatcgaaacagtcgtgggctttgatttctgtcaattaggcccaatagatgataaaatgagcccattatcatttgcattgaacctttcgccggacttggagctcaagcaaagtacagttcttcgttgaaagtctctcgtctcttttccccagaaaaaaaaagcaattgatacttctttttttaaacaaaatgcgaagaagatttctagaatgttgacgagagcgcttcggattttgaaacccaggttatttctgggaagtttgctacagcgtcgatcggtttgtttctcagctccgtcgccggcgttttctaccggagctatttcccgtacgacggctgagattgacgccgatgaagttactgcgtgcttggatccagctgaatcggtgactaagattccggtgataatgcctggtaaccttcagccacgtgtcgtcgtgtacgacggagtctgtcatctttgccatggaggtacaatgcttttctatttctctctttagcttagaacaactccgttttcaaaaggatcctttagtggtttattgatcgattctgtctattgatctggctatgtatgatgaaatgatttggttctagtcgattcttagtcttgttcagcgaaatttggggatgtttgcgattcaattgaaatgattgttatttctagttctggaagaagaagaagattatgcagtttttgtaattcgttgttcttgtcacattgatttgacttgaagtcatgaaccagagattgtggaagagaaaatgtgggaattgcttttcgtaattgtcctttgttggagtcattgtgctagagaatttgaggtcttctaagaaggattgtgtttctaggttgaattgttgttaatttgtatctgagtaattgtgttcaatgtaggtgtgaagtggataatcaaagctgataagtacagaaagataaagttctgttgtcttcagtctaaagcagctgagccttatctagaagtgagtggtgtcactagagaggatgttcagaaacgatttctcttcattgaaggtctcggcttttaccatcaggcatcaaccggtatgtacatcttctttttacaaaaatgctttcaagtttcacagttaagagtttggtaagatttagctgaaaacatctgctgcactgagaagtaagtattttaagttattgatgagtctgcctagtttaagtatgccccactggttagttatggtagatggattccaaatgatatcagttttaactttaagctagagttaagtataactaagtatgtagttgtttcgtaattaacatgttattataccttctgattctgcatcttttgactctgcagctgcactcagagtggtatcatacttacctctgccttattccgcattgaacgcgttctccatagttcccactcctctgagagactcggtgtatgactatgtggcgaagaatcgctatgactggtttggaaaagctgaggattgcttggttctgaatgacaaagagctgttggagaggtttatagaccgagatgaactcattaatcgaagctaatgacgaccctttgaacaatttggagtttgaatatagagatctaaagggatataactagaggaaattgtccaagtatcaaagctt

SEQ ID NO: 56 - DNA, 122358 bp, Arabidopsis thaliana
gaattctgcgaaagtgttaaacttttcaactttgatttcatgtttgtaatttgacatttgttcttgaatctctgaagcttatctaaagttgtgcgtgtgtttttttttgtgtgataaatctcagtgtgtggtgacttacattgtaatgaactgtctgtctcatgcgcgttcatacattgccttgggactgcttaagagatcaagctatgtcagttctattccgtggaatgaatgtttcttctatatgccttcaaaatcatgtttaaagcctgtagctgtgagtagtgtgtttggaatctgtagtgttcattcttattcctcaagatcaaaggctgttaaatcaaagatgttatcatcaaccgttgtttcggctgtggataaagaaaaggacgcctttttcgttgttcggaagggtgatgttattggaatttataaggatttgagtgattgtcaggctcaagttggatcttcggtaattatgttttggccttaagagtctgttgtgtataatagatactctctttatgatgggaatataagagctttcttaataatggtgtaggtgtttgatcttccggttagtgtttataagggatactctttgcctaaagacactgaggaatatctctcttctgttgggttgaagaaaccactatatagtttaagagcttcagatttgaaagatgatatgtttggtgctcttacaccatgtcttttccaggtaagatcataaaatggccttcactgtatttctcttctctcctatgatgcattcttggagaatatctgcatctgccatgatttgtgatgtgggattttaaactgaaatagtaactatctctctttaaatttcttcactaggagccagctccttgtacagtcaaagtatctgaagatgagactacctcagagacgaagtcaaaagatgacaaaaaagtaagctataagaacaagtttctttggaatcttattgagttgcttagctgaattttaatgattatgagacaaagcgattaagctcgttgcttaagtattcatttttcgcaggatcaacttccttcagcttctatatcttatgatcctttggaaaagctttcaaaggtggagccatctgcttatatatcagacgtgagttgtgattatgtttgtatataccgttactcatgtttcaatggactggatgcaaaattttgtgctcaagttggtctgtttctcttatctcctcatgtgttaggaaacttgctttatcgagtttgacggtgcatcaaagggaaatcccggtctctccggcgcagcagcggtactgaaaactgaggacgggagcttggtatgtatccttttgaatcactgttactaattaaagaatgcagtgatgtatctaagtatcaattttcaacatagatttgtagagtgcgtcaaggtttgggaattgccacaaacaatgcagcagaataccatgcgttaatcctaggattgaagtatgctattgagaaaggttacaagaatattaaagtgaaaggtgactccaagctggtctgtatgcaggttcgtcaattaaaacgttatatatttttgtgcaactaggtaagtttaatgaatcatatacgcttttatcttctcactttctcaacactttctgagaaacaacagattaaaggtcaatggaaggtaaaccatgaggtactcgcaaagctccacaaggaagcaaaactactttgcaacaaatgtgtctcttttgagatcagtcatgtactaagggtatgtctatgtgtgtctctctctgtgtaaatgaatgatatcacatatttctcgtctcatgcttgtgagttgtgagaaagatactaatgcaagtttctgccattattggcatttttctttgtagaatttaaatgctgatgcggatgagcaggcaaacttggctgtccgtcttcccggttagacaacctagtctcctcttttctctgcatttgacaatgtcggatcaaaataatacagaaaactaaccaactctgtgctgcctttacagaaggagaagttgaggtggcgtgaaggctaattatcgatgaactaatataaagatccgggtttgttgttcctcaccacatacagatctaaatagcctgagccctgaacaaatgtactcatgttcgttaggaaaaaaaacatcttggattaaaatctctgttttcttgcagagttacacactagcgactagccactagaaactggtgaagaaccagaatgagcacagagaattctctgtcagatctcacagagaacagcagaaactgactcatcatttgtcttctctttacttcagatgatattttgccggcgttctaacgttttattttgctttgctcttacactagaacagttatattgaaaaattcttttgtaccattaggaagtgaataacatgcgcttccgtcagcgcgtgaaattttatatcgaaacagtcgtgggctttgatttctgtcaattaggcccaatagatgataaaatgagcccattatcatttgcattgaacctttcgccggacttggagctcaagcaaagtacagttcttcgttgaaagtctctcgtctcttttccccagaaaaaaaaagcaattgatacttctttttttaaacaaaatgcgaagaagatttctagaatgttgacgagagcgcttcggattttgaaacccaggttatttctgggaagtttgctacagcgtcgatcggtttgtttctcagctccgtcgccggcgttttctaccggagctatttcccgtacgacggctgagattgacgccgatgaagttactgcgtgcttggatccagctgaatcggtgactaagattccggtgataatgcctggtaaccttcagccacgtgtcgtcgtgtacgacggagtctgtcatctttgccatggaggtacaatgcttttctatttctctctttagcttagaacaactccgttttcaaaaggatcctttagtggtttattgatcgattctgtctattgatctggctatgtatgatgaaatgatttggttctagtcgattcttagtcttgttcagcgaaatttggggatgtttgcgattcaattgaaatgattgttatttctagttctggaagaagaagaagattatgcagtttttgtaattcgttgttcttgtcacattgatttgacttgaagtcatgaaccagagattgtggaagagaaaatgtgggaattgcttttcgtaattgtcctttgttggagtcattgtgctagagaatttgaggtcttctaagaaggattgtgtttctaggttgaattgttgttaatttgtatctgagtaattgtgttcaatgtaggtgtgaagtggataatcaaagctgataagtacagaaagataaagttctgttgtcttcagtctaaagcagctgagccttatctagaagtgagtggtgtcactagagaggatgttcagaaacgatttctcttcattgaaggtctcggcttttaccatcaggcatcaaccggtatgtacatcttctttttacaaaaatgctttcaagtttcacagttaagagtttggtaagatttagctgaaaacatctgctgcactgagaagtaagtattttaagttattgatgagtctgcctagtttaagtatgccccactggttagttatggtagatggattccaaatgatatcagttttaactttaagctagagttaagtataactaagtatgtagttgtttcgtaattaacatgttattataccttctgattctgcatcttttgactctgcagctgcactcagagtggtatcatacttacctctgccttattccgcattgaacgcgttctccatagttcccactcctctgagagactcggtgtatgactatgtggcgaagaatcgctatgactggtttggaaaagctgaggattgcttggttctgaatgacaaagagctgttggagaggtttatagaccgagatgaactcattaatcgaagctaatgacgaccctttgaacaatttggagtttgaatatagagatctaaagggatataactagaggaaattgtccaagtatcaaagcttattaggtttgtgttaggtttctgaacactaatcacaaggggcttaacaaccttccaaagctaaatcagcataatcttctttgctacttctataattacttcagacaaagcagtaagtttttggcacgaaaaaataattccaaattgattatttcataagattctctctcaatataaaaagataattaatgtttgaattttgctaaataaaagcgaggtgatttggagtaaaaatttgaggattcaattaactttcatacaggcgaaagagatatctctcattatcgagtgacaaaaaaagttaagactagtaaattgttgagtctacccgaaggcagatccctccaaaaataggcgtatgccacttagcgtggagagcacacggtattctttagtaaaaggcgaaagaatagttcgctttgtgctcactacatggctgcgtgaatttaatcaaggagattgaagtctatttatattgaagtctccactatcaaatgctctcagtcttccgatgtgggacacttgaagttgaagttccttctttaaaggctttatcatttcggcccttttgggtatttaaggcccaacatttactagtttgaaatcaaccttttttcgttttcttttcctttggtatacatcttccaacataaatttacttgttcacaatcacaattggtttattattgaatcacagtcatcgtggtacaatgctcttatacaacatcaacaaacacttacatttcatgatttacaaagttgaatcaataatgttacttccctaaactctctataaactcgttaatgcttcgatcagagcttcctccttcactcattgccttcacagccaaatctttccacttcttcgaactctctctaatcttcacactactctctccttccatcactcctttcaaacacctcaccaattcttcactcttcacgattacttccccagcttcctctttcgctctatacccaactttccaaacttcctccacaaacttagcatcattcatctgatcactccactgaggcacaccaaccatcggaactcccaaactcaacccttccaacgtagagttccaaccacaatgagtcaaaaagcaacctatcgattcatgagctaaaacctcaagctggttacaccaagaaaccaacaaggctctatctttagtcgattccacaaacccttcaggcaatttcgctatatgagcttctttaatcacccacaagaagttcaaatccgattcttgtagcgcaatagctacctctgcaagttgcttctcaaagagaatcccaaacgaaccaaacgaaacaaatgctactgactgagcctgcttagtctcaagccactccatacactccttcgatatcggtttcaacagactcgcaccatagtctttatcatcttccatccgatcatcaagataagccgatggaatcatcggtccgatcaacgtcgccttcattgcatcagactcaccattttcacaatcctaatcaaaacaacagttctaatttcaattcaacaatgtaacataaagtttcaaactttatagtagaatcaaaactcttacttgtgtttcttctaacccttcaaagccattaacgaataaccaatcagcattttcatggttaggaaactgattcagaagaactctgccatgctcaggatgagtcaaccaatgacgtcccacaaacgaaggtaactcatcgtagctcaaagacggtaagccacggatacgaaacggcgccgaattaggatcagcgggaagaggaaagtcaccgttagagaatttacgcaacacagaacaaacagtgagattattagtgaagaaagaagcagctgaaagttccatagatctagcaacttcaagtccccaaggaagaaacgaatcgtagattaagcaatcgattggtgaatctgtggatttgaatttctcgattaggagagttagggtttcggatccgttgagcttgaaggattctgagtaagtatcgacgctgaaaccggggatacctatggggatgaaatcgaatccatcggagattggttcgacggagagtgatggtgttgtgattgaggaggcggtgtaggtagtggtggcgattgtgactttgacgtttttggagactagacgtttagcgaattgaaccattgggtttaggtggccttgaactgggtatggtaagattacgacgtggcctttcactttgggagttgtttccgccattgttttagctcaacgaagcagagctttgggttgatttttttttttttttcaattgaagatgataaagtgttgaagacatttgttatttgattttggtttattatatagtcagatctattatgtcgcgttgttcacgttttgcgttggtggcaccaacctcaatgttgttggatagtattattctctttttagaagttttctcaattgaaaaaagtgtaactaaaatactaaaaaaacaatgaaataacagaacataataatgatataaaaattagtaaagaacaatggaatgtagtatatcagcacgaaattatgaaaattttgaattattgtgaaataactataaccaatttataggaaagtgatgtaaaaataaataactagtttttaggtttttgtttagagattatgtcgaaataattgtgatttgtagtatatgaaagattggaaagtcacacctctttgacgttagtaaatacagtgagtgtgtgtggcaaatcgattaaacaaaatttatacatatgacatttttgttaggagcaacattttgattatttttatctcctagtgtttctaataattgtggagaccaaaaaagggttttacaatttggtaaaatatcgttttctgtttctcctaaaaactctcaatttagatttttctaaacaaaaacaccttcgttttagaattaacaacgacacaaacagctaaaagataacacacacgcccacaacaatagaagagaaaaaatagagatcgaaaatcaaccaatatcatttgaaatcaggagaaaataatattaattagatttttccctctttttttcaatgaaatcttttggtttatgtctgtttattctcgtatcttctccatgtctccttcaagccaatctctcgtctgattattacaccaaaacatgtcctgaattcgaggaaacactcgtacaaatcgtcaccgataaacaaattgcagctccaacaacagctgtcggaacactccgtctctttttccacgattgcatggttgatggctgcgacgcctcaatcctcgttgcttctactccacgtaaaacctccgaacgtgacgccgatatcaaccgttctcttcctggagacgcattcgacgtaatcacacgtatcaaaaccgccgtcgagctaaaatgtccaaacattgtttcttgctccgatatcctcgttggtgcaacacgtagtttaatctcaatggtcggaggtccgagagttaacgttaagttcggtcggaaagatagtcttgtctctgatatgaatcgtgttgaaggaaaactagctcgacctaacatgactatggatcatatcatttctattttcgagtctagtggtctgaccgttcaagaaatggttgctcttgttggtgctcacaccattggtttctctcattgcaaagagttcgcgagtcggatctttaacaagtctgatcaaaatggtccggtggagatgaatccgaaatacgcggcggagctgaggaagttgtgtgcgaattacaccaatgatgaacagatgtctgcgtttaatgacgtttttactccagggaaatttgataatatgtattacaagaatttgaagcacggttacgggttgctccagtccgatcacgcgattgcgtttgacaacaggacgcgctcgctggtggatctttacgcggaggacgaaacggcgttctttgacgcgtttgcgaaggctatggagaaagttagtgagaagaatgtgaagacggggaagcttggagaagtaagaaggcggtgtgatcaatacaatgactacaagggataaattaggattaccccttttaacacacattcaaaatttatttggtagtgactagtgaatttggtcttgtgatattgagttgctaatatattgaaattgaaaatgtagcaatcatgattcatgccttcgggtggaaaaaaaaaatctctcgtgaaattttttgtgccatcaatatgtgttatctaaatttttgcatgtgtcaaattgaataatctgttacaaaattggatatcacaaaatttccatacttgcgatccatttgtcatatgtgatctcgggttcaatagggcacaatatgtttaagagaactttgacagataacaattatcaaaataaaattgttgactaatactaatgataagttgaaggagaaaaatagcaaaagatttacagatacaccgatccctaaggtaagggagaaaaataatggataagaatctttttctttgataaaagtgatgaagaaactaacaaggttttttcttgtccaatttcaaatgtaaattgaaccatttgctcttcttctttagtgtctcggacttatcacaagtacttggtttcttgttcttctgtctgctgctttcttcctcttcttcttcctcttcctcttcctcttcttcctgttcagttggagcaggcgccttagccgccgccttcttgaatgagctctttctcatcctgttcttgctcgagctccgcttcatcaatggaatcgtcgtgtatgctgagtgaatttcatttctctgctttaagagctcatcgatctgcaaaaagaccataagataatcagactaagctaaccatttcagaaacttacacatagaatctggtctaatttactcagtcatgacacatcttctcttcgttttctgtgaatggtggtttgaaatttataaactttcatgaataaaagactaaccgattgcatttcttgagcgtatcgactggtcatatcggtgaactgcacaagtacttccctgtactctgtctcaaactttgccagctctgctcttttagtgagtatctgagcttctacagacctgaggtcttctttttcttgcgtaaaagcggcagcacacaggacttggattgtgtagctcacatttttaaaaaagttatcacctgaacaaaggaaaatgtcatcagatgatcaccaagttgaatcgaatactgaatccagacagatataaaagggagaagataaatgaatttgtaatcagataataaaccaggaaaactgaccatagacagcaaagacatgcgtgccggcctttagctcggttacctcacattgctgaaaaccatcaagctttttaaagaaggcagtttctggatcttttgcttgagccatctagagcaaaaaaaatgaagtcttgttgggaaaaagaaactcatccaccagaatgaggtgaagtaaatttagaacatagtgaagtgaacctactgaattaattgtgtgatccaaccggtagacagggaaaccgagaaagtacattccggcagatgttatcttacccgttcttttgctgtcctcctgtatccacgtagaattcaatgtacaagaagaaaacaaccatttgagttacttatatttatatgatatatgaaaaccctctgaaaaacactgttttcacttcaattgataacaacaatacctgcagggctaggcttaatccgctgttggcctcttgatcaaaatacagtagctgcacaagcagacacacacgttagttcattatactttggtacttccataccagtttgacaggaaagactctgcccgaaccaaccttgaatttgcttttgctagatgattctactctgcagaccaacccagcacttacttcctcttctgatattgtgacagcataaaagtgtgcacattgcttttcaacctgtaagaaccatggcatatatgagacttatatggagacagacactcattacatacacagatgagatcattactaggcatccgctaaaaacaacacacctttttagacacagcttgtccaagtacaagaggatcaactgaaactctgccattaagagcctcctccaatatagttgcagatacagatgtttttatcggcacaccaagtttgctaattcatcggaagtttcagaacatatactcagcttgcataaaagggggcttaggaaacgaacagaagtctaaatcaaaagaaacaaacctaaacaaagctgcaaacacagtattcacagctcctaaacttgagagatctagctccagctcttggctttctgcttcaacagcctgtgaaagagaagcgcgttgcaattagcaaagtcttaaagttgatgctagcgtagtattagctgctaaaagaatttcgaagcacaccacagattaagaacgtccctacagaaaagcagtattttctagagaccagggtcctataagagcctaaacagcatcttaacctagactaatacagcatgataactataattcaacagaagacacacacacaaaaaattaactcttgccacacatagaggtcagagtaaatctacaatcccacaatgcaaaacaaatctcacctcaaaaccagctgaatcaaactggcgacgtttctccggatcagataagatgttgtaagaaaacgtgacctccttaaacatgtcagctgcaaccggatcatttgcagtcttatccggatggtacctgcaacacaaaacattaattagggactataaaaaacaaagagagagcttgtgcagaggatttgtaattaccctagaccaaaccatcaccttccctaatgtaattcggattaggcttagctaaacaaatcacagattaacaagtagtcattgactaattcccagacttatcggtaacctaaattgactcaattcaaggttcttcttcatagcctaaccctaaaattaacacagcttttcgaattgcaaatttcaaatttcaaactaggactctaggagagacataagaaaccaaattaaacttacttgagagccaatttccggtaagcgctcttaatttcctgatcggtagagttccttaagactcctaaaacctcataaggatcccgacggagctgcttatcagcatccttcttctccgacttggatctatgacctggcattttctcttcacaaccaaaacccctaataatcaatcacacttcaacaaaatagaatctccagcgaggtgataataatcttctccaattattccttcatttctacaattctctccccggaaacctcaaattgacggcggaagagagctacgagacggttctatgtatctctctatatctccgatccttgcgagagataagactgaactgtcaaaggagaaatcgtcggaggaaggtgagagaaatagtttgagagagagagaagacgaaatttaaaactgtggatatttcacactacagtgcgctggttcggcgcgtgatatcggcgcgtgggttatgagatttgaggtccgcaggttgtttcttgttttggcatctttgtttttgggaggcgcgtagtgttcacgcgaagcaagacagtaggtttccagattaaatcaatcaattaacattaataatccaactcatatgtgttatttatgacctttttttaatcatttctctaatgtttgtttctatttggattggtttagttataagttataacttacaatatggttttcaacaatatctagtacccaacttatattagtggttcaagtttaacaattaacaaatttttatatttactttgttatacgtttttgtaaacagctaagatttttctatgtgacatatatgggaattttaaaaaatataattatggtaaaaacaaaaatagaaaaaggattttactatataggtagggttgaatagtaacagttttgttgactataacaatataataataattatttatgagtataataacagtttaatatttgatttgatgctgctgagtttgagtataatcgaatttaattagcgattaacgtcaaattgttaagtttttattttattttctgtcctatcctcacaaaaaggttgtgatgctggcttgcatcagtgtacaacttttcaggaatattttataaaaaatggtccacatgagattattaattgagtattaatgaaaatgaaaacacaacgacgaggacacttcaacacaatcagaggctcattatcatgttgggttcatttttctaataaatttgtgttcttgccaaatcttttcttgggctttatcgaggatcattttaaactaatgtaaagattagtttgtaacaaatatttgtttataagaatgtctaagaaatactttaccgtttttgattattttagatagaaaaatacattggagaatgagatatttgcagtttcaaaatattactttcacttcacgagatcgggacgtattacattataattaaaattattatcagcagattcctactacgaaaatgattggaactggtcccctttacggtcataagtcacaacaaaacgtcatatgcttaggactgttgacttgtttgatgggtttgtatcatcgtactaaaatctatatattattcatgggtctctaaagtttgggccttacaattagaaacccaataactgaatcgcctaaaatgttaaacctccattcgcattttatcaagcaataagaagggacatatattttggtaattgcatagagtatttttatatttcaatttagaattcagttatctgcacacaaagattgtatagtagtactatagtgtgaaagtttttctttccccatacttcacgtgtattatgcgatatccatttatcactattataacatataaattcagtcatagtggaagacaaaactacgtgattcgttattttaaaaagttccacaattcttttatcaatgttttttggggggtcatctgacctcacacacatattccagattaataacttcaaccaaacacaaatcataaaaccaccacaccacatggatgatcaacttccacgttgtagaataagttttataattctctatcgtcattttaaatttactttaactctatatttcacaaagaaaaataaaactaaacattaaaacaatgtgtacacataagttcgtgtgaagtcgtgaaggtcattgttaataacatagccaatgatgatcaaaactgagaaatctcatatatttggagaacaaatttataaatcgtaatattaaagtgtactccgataaccgagtgttgtaggtttttgactaaaacctaggtagctccattatgatatatcacattcataagtatatagactaataaagagagattagtcataatcacgttatagattgtaaaataagcagttagatagatgaaacccttaagttccaaactttaagagaaagatcaagactcccactataaaccatacaagaataatcagaattagaatcggaatcagaaactgaaacagccaaagacttaacaggcttggtatgtccttccagaaccgccaaacaagaataaccctctttctccattaatcctctcctccaaaccctcaagctcttatccgctgacccactcaacaccaaatcagacgcaactgctaaacacataatcgccttcctgtgtccccttaaagctcccactacagacatatgtaactcctcatcatctccattaatcaatctctcccacacaagaatcgatctatcacacgcaccggagtaaagaaccttcccgtcttcactaatagccaacgcgttcactgccgagagatgtttagtcagtgtagcgaccagagagtgtttcttgtccttcttgttccacactttgatcttcttatctgccgaacccgtgtacacaaaaccgtctttggacactacgatggcgttaatagcatcatcgtgagccttttcgatagagtccaagcatttgaaatcagatgttctccatatcttgaaactccggtcccacgaagcagagtaaagcagagagccatcttgcgacaaggctagtgatgacacggcgtccacatggtgaacccacgtgcacttcttgtgccgtcggacttccacgtagcttttgctactaaagagagtcttgaagcggtcgttcatcgtcggaagagtagctacgcacttgtacttctgacctctgcgattgctctcgtcgatgatcttccatacacgaatcttgtgatcttgatgagcacttattagcttgtcgccaagaatcaccaacgatttaacccctccgtttccgttggcaactacgttacggtcatcgccggtggaatattccggtgagaacggaggttcacgaggccatacacgtatctcactgttggaagagccagtgtagagtaatttatctgagacagcgagagaagatacgtacgaggatttatctttgagcgtggctaagcaatggtgatcgacgctggagctctgatgctgaaaagacagcgaaggaaccaatggaagacttggctgagacaaaagcgatgatgacgttgaggattctgattggtgatgcgtcgatttcgtttcacattctgatcttgtttcattgcaaggcagaggacaagaacacggaagcaaacccattgttcttgaccaagctagagagagttttatgttttgtttgttttgttgttgtcgggaataatcgtggatatgctttgctttataagatgagttttcgtatcccgaggtagggaagatctggggagtttaatggagaattatatagaaaggtaaaagataattaaaagaaaattaaagtttagggtagtgtagggtgggggaactgattgacccatgtgtcgttactgtgatagtgtgatgatgtgtttgtaattaattaacatatctttgtgttcctaacttacctttttgtaattattatatttcccttataatcagttttggcttattataaagttatgtgtgttttgagttgagagatcaaacccgatgcttccaaagttatgttaaattccctttaccagggtcaaattgtaatcattatttctagttataatggtccccatcaatagtgatttccatttaaaattgttattgaatttgagtttaaataaaataatttgaactttactcctaaaaagttagtttgaactttatactttgaactcataaatttcatctcaaaattaattagtaacaaaaaaaaaagtatactattatgttcaaaaagagaaactatgcatgaatgaagaaccaatctaggaaaaataatccaaaccgtgtcttaataatctgtaaattaatgaactaatccaatcatctacactaaatacaaaaataatccaaatataatccaaaaataatactgaagtagattagtcaaaaccgatctagaaccgtcgcttctaccaggagcaccagaatcgccagtgtctcgttgttgagtggacggtggtggagatctagaaccattgaagttaggattcgcaccgtacaaatattggactccttccacgtcatcggtcgttaaatcaactttacgcctacccgtcctgatggttggatacatgatcgaaccttctaccgaggaatggcctaaccctagaagatgtccaatctcgtgaacagccaccgattctagatcaacagcctcagacacggagataaaaccgtcgcctccttcgccggagacgatccagttctcttctccgtctagatggaagtgtcccgtcgggggcgagaacgcatgtgctagcgttctcattgggccgtcgaacggttctccgtctccgtgctctccggagtagaatccgatgctgatgtcagaggtcgagaacctctccacgcgtgtgaacgttagtggagtcacctcctcccaacgagtgaaagcgcgtgagaacacgctcttgacctcttcggtcaacgcgtttcgcgggtcgaaagcgtaggttagatcacgacgatttctcggccaccgtggctctccggggaagaaagagtagtgtttaacggcgtggaagcgttgtccccgcccggcgaaggaaacctcgaaggttttcctaccgctatgcatagttgaggtgccgttgactacgtcggggttgccgcaacgtgggatcacaacgtgtttgagagtgagctcgtcgagtactccggtgacgtttagctggaagtttctctggtacatttcgacggcgttcttgagaatatcgtcgaagtcgtcagtgaagtttccggagagattagtttcggtgatgtagccaaaatgttgaaaatattgtttgagcatatagagaccatcgtacttcttgccggcgtgacatccagtgaaattcaagaatgagttccaggggttcccggtggcgtttcggagaagctgcggcggaatggctgaggagtttgtatagaaaccagcggagactggagaaggagcgaagaacaacaagaaaaccatgaaaacacaaatcctcaccatccaaaagagaaatattaaaaagattaagtgaagaggtattattgagatttacaagagaattagagagatgacatagataaaactaaacaagtttgacgttggagaaagcagaggtcatttctgcgttgcgtttggagaattttctatgttgaaaatgctgcattattcaaaggaaacttcctccgtcctcgtttcaaagggtctcacgaagaaaaagactaatgaagcttctgccaatagatagtgtcgttttatggataattaaagttgattggtggcttggtgcaatagattaggcccgatttagtcttggatgactagaaattgtgattgaccggtggtaaaggaccggttaaatgcaaagttggaaaaagaaccatgcaacaaaaatggttgaaggcggcagaatcaactaaattggttgaaagtgtttttgttttttttgggtcgttgaatgtttgaattggtcttttttctttttgtgataatttttccggaggttgttgttattggttgaaaaaatcaacgtaaaatctccaccttacacgagtaacgccatgacttgtttgttaggctatctaattttttcctgtaatgggtataacatgcaagtctccatcggtaaaattaattgatatatcatacatgcatataaagttttgggccaaaagtttgaagccctttctaaacagaattaggatacatataaacagaaaaatgtagattttcatgttagatccatttaggctaaaaattgttttcagaattagttcaaccacgtttgcaccaacattattaaaacttagaagcctgtaaacgcatagctttattaaccaaaatctaaactaagggacgtttgatagtgtttagtgtacatttatttcgtagttatgatatttttgactgactaattcattttagttacagattttaattacattttttttttggtgtgctttgggttaataatacttaattatattctaccaccaagtgataggttttctttgcatacggttagtgtatgactaatggagtcataagagcaccttcactagaggactctttagagcatcctcaatggacaatttaattgggtgtctttctctattataaaatattaagaaaatttcgtttgcccccaaaaaaaaaaaatattaagaaaatcaaaatataattattaaaatatgatagtgtctttaaatgagagacattcagttaaaatgtctatgaaaagacattatgggaaggagaatttttatttaaagacattttcatattttaataattatattttagttcttttaatagtttattgtggaggaagacatccaatataaatgtgcaatgtggatggtgtaagatgatcttaagaagataaagtctttttatatcacatgaaaagtctattttgttaataaaaaaaagtatatggaaaaacagaaaatacatatatttatgaaaagacagtgttgccctacagagccaatagaacccatttgactgagtaaaatgctgtaaacgaatgccccacatactattaaatagtgagattctaactcaaaaacaattgacaatgaatagaaaactttatatattatatatctatatatatatttttgtagttattttaacaaataaatcttagagttggacttatttacaacccaatgccattagcattaaatatttttttcaaaataattaattttactttaaattcttaatttaaattgtcaatcacattatcaatcaaatttaatccaaacaaacttcacatcaatcccttaaaattagcataaacgtatttgttaacaatattttaaaacaaagttttttgtttaaataaatattattcttactaaacgttttttgtttaaataaataaattctgtatttgaacttatttacaatgtcatgctactggcattaattatttagaaatgaaaatatttaattaacgatttaaatcttctaaatctttgcttttagagttattatgtcattacctaaaagggaaaaaatatatttttttaaatattattatttatatatttaaactttataaaacattattaatatttaaacttataaaaagtttaatatataaaaaaatttaacatcattatataatatatagtttaaaaaaatctcaaaaacatttccgtcatattttgtgattcaaaattttaaaaatgaacatatattgaccaaattggcgaaaaatgtgtgggttcaacatcccgcatcgactaaaatatttagacaataattcataaataagatcaatattaataaaataaatggtttttttgcaggacgggttttgcgggacgggtttggcaggacgttacttaataacagttgtaaactataaaataaaaatattttatagatagatacaatttacaaatttttatatatactaactttaaaaaatcatttgtctccgcggtgtaccgcgggttaaaatctagtaccacttaatttcatacttaattttcaatgtgatatattgttatccttaatacataccaacatgtcgtcttccctctcatttcctctcctcaattttgtttatatagatgcgtaatctaaaatagtgtcgaagtgaactttaattattaagatctcttcattcatttgcctttttcttctcatgtttttgctttttatagatgaacaagcccttgcaacccaagcagaacaccgcaaactcaatgagtcacttacttacatatactttcgttattttatttatgttattgttttgttgattttcatggtttaatacatcatgtcatatgtatattatgctggtgttgtagaagagacgataaccatgagaaggaacttggaaggcataggcgaaaaagctcccaaattggggttattccgagcacttcacgtcatgccgagacaaaaacctctaaatagcaacgagaaagagtgtccttttatagaaagactaagtcttgtcagtgccggtccggtaaaatgtggggctaaaaattcaaaactgctaaattttgtttttgttgctaactatagggcatccataatttttatttcttaaattttcttaattttgggggtactgtttgctaattttggaatatttttgctaatttcatgattttttttgttaattatgggacttaataataatttaaaaaaacatagaaaacgtaaaaatttgagacccaatataaatgtttcaacattatgcgtaaaaggacaggccttcctaaaattagaacattttatatgatatcctcttaagtcttaagtactatcgaagccggagatttctaagttttacttttactaattaagctattgacacttgataaatgccatatttttgcattccctaaaacctcaaaactctctaaacacgtttttgtggacatattaaaatagtgtattttgtagtctcttccaggtttcttccttcttgtcaacgtcgcacaagtccgtttacggatatgggtgaataattgaatattatccatgtttccttattagcagtcgctattgtgggtttctttttggtagtctaatttattatttacttctttaaaatggggaaacagatacaaagttgcattacatatataacgcaatacaattagatcccatttgaccgagtaaacgctaagatccacacaaactcaatcgtcaactcctctctcttctctattctatatagttgcgtgaaatgtaatgaaagtgatcatcattcacttctaagatggcggtatctatagtttcttccatcattttctttcttctgtttatcatactttcacaatatgtagatggaaacggttttgctgcccaaatggaacatcgcaaactcggtgagtcttctacctgtataaatatatatatatatatatatatataaatagattacttttgagtcatgtagtcatgtactgttatattttattagttagctagttcaatatagcttatagacaaattgtttttgaaggtactaagcctaattaaaggcttgacgcgctatatgttatgtgtaacgtgcaggtggaccgaaaaaaacaatgaccatgaggagaaacttggaagaaaatgggcgccaaggctccaaaattgcaactcctgggagcacgtcacggcacagtggacaaaaaaacattgaaaaagagccgtcaaaaacaatttatggtcatcaattacgtcctgatcaaatcaaaaggggaagcccttgcaaaatctacacccgatgtaaacattcatcctcacttccacaacctcctccgcttccaagctcttctatagacacacaaggacttggtcactgatcgcactgtagcttcaaatgccaattctggatcgataaaacggtgtatattttctagtcttcttttctcgatacgactatttgtatattgatacatggaggtttatataactttggcgtgacatatgttgcctttggaatgtttaactatatattcttaagacaaagagaagctcgatgcatctgtttggctaaagctataatgaatctattccacgtacaaaaaacaacgaatgaatccctttcgaggggtttgaggaagacagatgataaacagtgttaagtccccacgtggctgagtaaactaaaacattgacatgcttgagcatgaagccaaaaatattgggatttcctatgtaatatcgcacgttcatatggttcactccttttgatagatggctgtgcgttcaggtcttggtcttttgtctctctcttacaattattaacgtatcttatcatttttgaacgtctgactattcttttcacattgtttcttcgtgtcactttcttaaaccttgtagaaatccctctccttaaagactgatcctttactgaaataaaaagaaacaccactatagtaattgtgatttttttttttttttttttgtacaatagttctcaagtcaagtgtcaattcctttattttgttatttaaaaataaaactattccgtggaaaaaaggattggacatgtaaatatggaatgaaatccacttgatcatacggatacatggtgtgcggagaccataactcaaaaccccacaacaaactaagtcctcatctcgaccaccttctctattctatataaatgcgtaaacgtgagtcggattcagacacatcacacatacaaagtaaattaggtcaattttgtgataagtgatcattaagtaacagagtgattattaagatggcatcttcgacattctattccatgctatttcttcttgtcctcgtgttttcacttcatgtggatgaagctcttggtgctcaaactaagatccgcaaactcagtaagattacatatcgatattgatcatattgaataactatagtatactattaagttatttgacccaattacatgttttcacatagttttttattttattttatttgagaacatcatatatttcttcatctctttttcatattcattttattagtcatttattacaagaataataacgtaaatttatctttttcttttttaaaaaaacattatatatctttagagacttcaatatataccttatgtttatacattcggatttggtgtaatatgctataagcctataatgttacttactatgtcgcttcattaattagtcaatatatacattagttttatatattcaaaactacctgcttgacttagaaattgaagtctgaattgtatgggtacgtgatgcagaagagatgatcacgatgcggaggaatttggaaggcaatattgactacagaagctctaaaaggcggactggagggagtgtatcaaatcaatgccgcagtaaaagttatatcgagatcgtcaccacttatcttcctgaatctgatgattcgtccgccccctgtataaagtgtaaccacgactattgttatagttgcaccaagaccagacagtgcacacggtccactggctcaccctggacgtgcaccgtcaccgagttgtgttgccttatagtatattcatagctttagatttatcggaggcaaaatcaataatctgttgaacatttctatatattttacatttgtgagttggaatcatatgtatactattgtttttatcaaaataataataacaatatatataacgttatataacactttttatctatgacaatgtcaaatcttgatatgtaagtaacaaggtgagtctagctatatataggcttgatcttcatatcttggagaccaaatcaaagcacaagacttagacctttattatatgatatcccaaagagcttaagaaacttacctttctaaaaatatatgactcagttgtttctgttaccaaagaaatgaggaatgtgatgcaaacaaaagtaaaggcaatttttaggcagagttaaataaaaatccgtttcatgtaagtttttcattatagtccttgtacccagaagatgaattttcgtggcccatatttggattctgccacttttgcaccaaattttaattccataatttttgcatcaacattttggttttgcaatttggcagaaaatctcgattgttagtttctatttttaaaccgattgatagttaactttgtaggcgcattttctcgattgtagaccgcaaaacggagttatcattcggagcctaattagtttcaacgtttaaactactattttttaattaaaaaaaatatgtattttggcagaaaattccctctctctctctcaaaagattaatctgtttttcttctgtaaatcatctaaattaaagacctatctctttattgaaataaaagcaatacgaatgtgtttatatttacatacgtttttctaaagtcaattgtcaactcctttattttatttttttctgttttttgttggtcaaatttgttttttttttaaaggaatgtacaaagctgccccgggaaaataatgcaatgaaaaccacttgacacttgacagagtataataaaacatggtgtagagtgcagagaccactaaatatcccaagatcaacaagggacaaactgagtcatctctctctttcttctctaccataagtttaaactctctcttatctctaactctatattccacataaatgaaataaacgtgagtaacagtcattaagtagagataaaagaaagtttaattagctcagattcagctcatgcaacgtcctaaattaggtcagattcagtgattagtgataagtagtaacagagagatttattaagatgttgtcgtcgtcaacagtttctttcatgttattttttcctcatgttttcgattcatatgaatgaagctcttggtgctcaaattgaaatccgcaaactcggtgagttttttcaaaaatcttttactcatccatatattcatatgtttaattacgagttatgttgataatattaatagatgtgatccagttacatgttttcacatagttttttttacatatattatttatgaaaattatattttttaaaaacaaatcatattcattttactagcaatttatgcacctgaataaaagagagcaatattttttaaagattctcaaagtatctctgttatttcaatattaggatctagtgattatgctttttgagttgcttactagttagctttgtaattagttcagcatatagataaactaaagagttacatatcattgaaattttcaatggcttgaggctatatataaattataagtgtgaaagtaatgcagaagagacgatggtgatgaggaggaacaagaaaggtaatggcttcgtaacctccaaaatagatgttccaccaagcgcatcacaacattgcgggggaggtaaacgttttaagaacatggcgaccactaatcgccatgatgatcagttcagtccacttccaggaggcgtctcttcctccctctgtataagatgcgttaccacccaacgttgtgtaggggccgtaggcgcgccacgctcgacgtacacttgcactatcatctcgaaacagtgtgaaaatatacctggccattgatcaggtcataactttgaaatgcacatctatgatctattcatatatatgaatgtatgtactaaagccgtagtgggtttgcgttttctatcttttttcgtttcatattattgggggttgcaatatatatttttttatagatttattcagtgtaaaattaatacatgtacatgatatatactatatatctgttgaatatggtgagtagagacaatgtttataatatactgtaacagtttttatccacggacatatatacatggccaaattctctctggttttaagtctaatgttaaaaacacagagaaactcttgaggtgcttacgcaaatgccaaatggtattgagagaatgcgtacacggaacgcgattactaattacaatatatgttgtagtctgtttggcaatgccatgtgattaaggataatagttgtttaaactggttccataaattttgaaatttcagaaaaatataacgcattgagactatccagatgtatagttttaacctttaaagtatggaagagcgtaaaacaataaaattgaaatagttcggaatgtcatcagtcgtcaatcaaaaagagaaaaatatgaaaatgagtaaatagataaaaggaaaaaggaagcaagatttatttaataatccatttagagatctgacttataagcctgatcagttacaaattattcataaattcaaataggaattaagaggctaaacattagttacctcctaactaaatatatccgaaagcagaagcgatggcaatgccagcctgaactattattacgaaacagtacatgatcgttaggaagcacccccacatcttcacgatacttatgatgaaatcagtttaaacggtaacttatgacaaaatagcttgttctatttttggtgaaggtgaaatgtttgcatggatgatgatcaatttatagttgaaccatgcataaatgatatcggactgttgaaattctttctcttctagtgagacggaaagtagtaatgggcagtcaaatttaaagattaatgatttggaatttggaacgttttgtcataaatgtgcgtagaaccaacttgggctttgaactcatggagtatttgtatatgaaacttattgttgtgtcccaaacattctcatgtctagtgaaacagagtatttaattaaaattttaaaataaatcctctaagaaaatttaaatatgaacgtggacgagtactcttatatgtcgtcgtacgtactatagaaactgattgaaaatgatatcgaggaaacataatttgtcgatcggtgttggaaccttccatgcatgactccaattagagttctggaacttttggtttctcattagtcatgactctgattggacaagttctagtttttaacgactcatgactcttcacatgctccgaaagttcatcaaaacatttatcaaagttttacatgtttttgtgaacaataattatcttataaaaacatcaaaacatttatcaaagttctataagataattattgttcacaaaaacatgtaaaacatcatatcattttgtgggtttatattcaggtttaaagagtgtatatactatatatatatatatatatatatgtcataaaaactatgaaaaaagatccggcgacaaagacgaggaacgcttgtctttaggaaaataacaaaagtgatttgttttgatgatatattttcgtaaattcaaaacagaaagaatacgttatgtaagggagctaaatgagctcttaagatgcttaagaaaatggaattgtgatcgattgcgtacaaaacgtaaattcctatctaccatttctagtggtcggtttagccatagaatggccaatgtgattaagacaattgttgaaaactggtcacatgtatgttacaatttccggtactatgttcaaacagagaaaccagaatggattggttacctacgtatacatacttttaattttaaaagtttagagagcgttagatctaaacagttaatataacttaaacgtaatttggaatgtaacatcaggagtcacaaatgaaatgagtaaatagatagtataattaaataagaagcaagatttatttagtagacttaatagccagatcgattacaataggacataataactcataaatccatataggaatgaagaggtaaacattattaacctcctaaatatcctaaagcagtagccatagcaatggcagcctgagccatcattgaaaaacatgatacgatcaccaagaaacatccccatttcaacattttcacgatatttataaactcagcttaaatatgaaattattacaaaatatctttctggtttttaggtggggctgaaatgcttctagcatgatagatcaatttatagttgaaccatgcataaatgattaaatgatactatcagactcttcaaaattctttctcttctcgtaagttggaaattaataaaggacagtcaaagataaagaataaatgatttggaaattggaacattttgtcatgaaagtgcgtcgaaccaatttaggcttaagctcaaattgtatatgagcttattatagaggcccattcattttgtcaaaaagaaatttttttaaatatattttttacttcctcctctgcaaacatgtaaacgtgggacgagtagtcttacttgccgtgtaaacttaaatattggccatgtttggtccgtatcaatacaagaagtcaagaagaagacgtgttaagaaagaaattgaggaaacaaagcggtcgatgtggaaccttccgtgactccaattagggttctgaaacttttggtctctcatgcatgactccagttatcattagttcaataccaattctagttcttgacgactcaagtcaagatcattcagacggccttttaaaatctctttaacgttcgagacaaagataaaatccttttattttttcatagagaaaattgtaaaagaggataacaaaatagagagaatttgcttttaggaatttccgattgaatatgtagttggtaaagcctagttttatataattatatgtggacggaaaaagattcattatctcgcttatataaaaacataccaattaattatagtctatagtcacaattcatcatatattctagactttaaaagttgattttagaatttctgagaatcgagaggcaacaaaaaaagtctacaaatttgactaagaagaagcaggcacatccgccttgacgaagaaaacggtttggttgggaatgatggagttgaccggtagacaagtttcgtcgaagaaaacaaaaaaaaatagaaacacaaaatcgggtttaattttgcaatttcgcttcagtagaagacttgttgaattcaataacaatttagtttcgttcgacgagtgtaataacgcgttgagcattaataactatcgaggggccattaagcattaaattaccatttaattacgaattttaggggttgtttccttcatcgtagcttatcaaattacacacactcatacgttcacaccttcccatttttccaagaaaaaacttggttcatatttcttctaattcatacgttttgtgatagtattttcaacttttgttttaaagtttttcaacatgtattaccaattcaatttggtaatccaccatcatatatttatatattgctcgaaagatccggtagcagttgagtctgtctgacaaattaaaacactattcacgatttttttctacagttttactttaatcttaaaaaccaatattattacaaataaccaagtcaaagataaggtcaaccccaccagacaaaacttagttcacggcacaacaagactaagcactgaagtctttgagaggaagattttgaaaatctcgtgcaaagactaaaacatccttctttactatatatatctttcgctccactacgaaggttattttcgtaattcgacacaattccttacagagaataagcgaacagatcaacaactactctgctcttacaggcgacgacgtcaacaacaacccaaaataccaaaaaccctcaaaagtctcaaacaaaactcaaaacccaacaattaaagaaacaacatttcaatatacagatttacttccttttacagattttcctaaaaaaccgaaattgaaacaaacaaaaccaaaagacgttaccttttttccattgattcctcaattctctaaacaaatgagttaatcttccatggctgccatgttgatgcagccatggccaccgtttcttcctcatctaaccctagttttcttaaccctaatcctctttttccctaatcaatccttttctcaatccgattctcctcgaaacatcgaaacatttttcccaaatgacacaatcacccctccagttcaatctccggttctatcgccgccgcaaaacccatcatcttcgtcatcggattcagacagaggaaatatcttgagggctgtgcttataacagcagcaagcactttacttgtagcagccgtgttcttcttcctcgtccataaatgtaggcggaggagaaacagagtcggtggcgttgacaacacccttcaaccaccggttcctccgttggcggaagcggctttagctcgtgaagggtttactcgattcggcggaaacgtaaagggtttgattctagatgagaatggtctcgatgtgttgtattggagaaagttacaacagagtcaaagagataataaaggtggaagctttaggaaagagatcatccacggagacgatgaagagaagaatgtgatttattcgaagagtaagaagaaatctggaccggtgacggagactcctcttctcagaggaagatcttcgacttctcatagtgtaattcacaacgacaattaccgaaatgccaccaccactcatcctcctcatgtcaagactgattcttttgaattcgtcaaaccagatccaactccaccaccgcctccaccaccgccaattccggtgaagcagagtgcaacaccaccacctcctcctcctcctaagcttaagaataatggtccatctccgccgccacctccaccgttgaaaaagacggcggctttgtcatcatcggcttcaaaaaaaccaccaccggctcctagaggatcatcttcaggggaaagttcaaatggtcaggtaaagcttaagcctttacattgggataaagtcaatcctgattctgatcattccatggtttgggacaaaatcgatcgtggctctttcaggtaagatccataagaaccctaatcgtttctttcaatttgaagggtttagtcagataaaaatgccaactttacaaatttggtttcttcttcttcttcctacagtttcgatggcgatctaatggaggctctgttcggctacgtggcggtcggaaagaaatctccagacgacggcggtgataaaaagcctagctcagcctcaccggcccagattttcatacttgacccgagaaagtcacagaacacagcaattgtgctcaaatccttaggaatgactcgtgacgagcttgtggaatcgttaatggaaggtcatgattttcatccagatacactagagagactctctagaatagctccaacgaaagaagaacaatcagcgattctccaattcgacggtgatacgaaaatgctcgcagacgctgaatcgtttctgtttcatcttctaaaggcggtgccttgtgcgtttactcgtcttaatgcgttactctttagagctaattactatccagagatctcaaaccataacaaaaatcttcagacgttggatttggcttgtacagagcttaggtcacgtggcttgttcgtgaagctattggaagcgattctgaaatctggaaacagaatgaatgcaggaacagctagagagatgctcaagcttttaatctcaccgcgcttttgaaactttctgatgttaagagtgttgatgggaagacgactttgcttaactttgttgtggaagaagtggttaggtctgaagggaagcgatgcgtgcttaaccgaaggactaaccgtagctttagccgtagtagcagcagttcgatctccgaggttatatcgaaggaagaacaagagaaagagtatcttagactcggtttacctgttgttggagggttaagctctgagttcaccaatgttaagaaagctgcagctgtagactatgacactgttgctgcaacgtgcttggctcttacgtctagagcgaaagatgctagacgagtgttagcgcagagcgaaggagataacaaagaaggagtgaggtttgtgaagaagatgaatgagtttcttgattcggttgaggaagaagtgaagttagcgaaagaagaagagaagaaagtgttggagcttgtgaagagaacaacagagtattatcaagcaggagctgtgaaaggaaagaatccacttcatttgtttgttattgttagagattttcttgcaatggttgataaagtttgcgtagagatcgcaaggaatttgcagaggaggtcatcaatggggagtactcagcagaggaatgcggttaagtttccggttttgcctccgaatttcatgtcggatagatcaagaagtgattcgggtggatcagattccgatatgtgagtttgcaaagaccatttttaatcttgatgatcatattgtttagaggagaaatgatttgcttggttgtaaataatagaatcgtttggggtatttgattatatttttttcctacaaaaaaaactttttgaagtgttaataagatttgatagtccgagactccgaggtatttttctgcatagtgttcataagaacagagtattgcaatttgcactaattcatattatgaatcagttttaggatctttggttacattttcaccaacctaaaatctgatggatgaaacaaattcagcccttttacaaatttctcagaagcagtctaggtcaagattgctaatgattattctattgtttttcatttcttgccatgtcgtaaattcctgaatttttagttttagacttgataaagacagaccacgaagtcaagactttgaatagacaaagaaaggttgttgatttgaatattgtttggtacagtaaaaaaaaaagaagtcattctaacaagtcgcaaccaatatttacatcaggaaagaacaaaacaagaaaagcaaaaaatattctgctgattttctatggtttaacaacattagtactcagagggtggtgcagatcttaaccacgatggcttattctgcttgacgagtccaccatattcacagctagctggtcaagtgttttacaacttcaccttctggttcaaggactcaccagatggaatggacttatctttctcctttacttttccctacgaccacacttcttggtcttcacatattccaaaaccaaattagttgatgacacaaaccatgttggtattaacataaatagcttaatatcagagatatgggctttggttacttcaaagatgatgctactttcaaaagcatctctcttgacagctgaaactctacgtagctccaagaacagcttaatgctactacatgctactcgtgtgtctaaaccacctctacttacttttctgtacaggtacatttggatatatatcactaaagctctcaaaaacagcaagaaagcacaagctctgatgaaatcacatttggtgttttcattctggagactaggtcgaagactgatatagccaagacatcattgccaatggaacagttcttattgattgggtgctagactgttaagtgaaaggatacatactgcaggttgcttgatgagaggctcaagcctaggtacccagaggagcagctggcagtagttttgcgtggcttcctttgtttgcatttggttgcagctttcagatcaaacgtgtcgagcatcattcaattcttagacaatgtggctcagttttctcacaatttgcttggcatggtgaaatctccaaaaataaatggagccaactcaaaccacataatcatgggagaagatcaaacccatgatggtaacactaaaatatcatcagaagaaactgaatctacaattctatctaatggggttgtagaataactgagtaaattatctgctgaacattaacaagattgaatcaatccacttctattatcagaacaacattatcattgggttctatacacatacataggaaactgtaaaatataactatctcttattactcttattactccttccacgactaaatactggtaactagagacttttctatataacaacaagaatacaagatcattggctctataccccaagactgatggaacaacattggtggcgatctttgccagaagatcagattaataccggatggatataactatcataacactttgtctaaagagcttttcgatacggtccgcattggaagagaaccctgcacaggttttgctttcggattaagagagtccctccgcgttttggcatcaatcactcctgcctgttacacaaaagaaagcaatgagaccagaatatatcttccgggattcaaaaagtgaaaaacttagtaaacctttgggttcttctgcaagcgtgtcttctctaaaggtcttgcaccagacttggaaatctgaaaaccataaagaaagcattagagtacgcagagattgttagagtaaacctccatgtttggtttggttatgagagagatattacctccttttgttgtttctcagcggtttcattgcttttgagtccatgagatggagaacgataggcggtagtaccacttctcttctccatgctacttgcttttgtaggcctgcttatttaggacaagaaccaaactttaagactcaaaacataagatgatgaccttcagtaaaccaagcaagggaccaccagtcccatgagtatatatacctgccattttccttctgacgagtagctactgacggaataattgttggctttgcaggattctggtttttaagaagatgatcagttgataatctttcacagttggtgaattacacaacattacttaatactactgtacctgctttactgctgtgtttagcccgtcgacagaagacttgaagtcgaaactcttttgaaatgatttgaatgcacgtttgacaatgtctttatctcccattcgctccatgatcaatgattttctagtgcttggaagagcagtaggatcggaagcaggtggatccagattcatagagatatgcaatgactttggagcggtttgttttttactcagtaaaggcgagaccttttccttcttcaacgaagagtgagatgtagacaatgaagtttttgttggagctggcttgtacactcttggagttgcaaacccttgtggggattttgacattggtgctgctggtttctttgttgctttcatcatgtttttcatctccttgctcggtggagttttcctactcgttacagttttgttagtttccggttttccccccacctgattaggctgtagacaagaaagcaatagaccaaaatgaagacacaattacatacaagaactacgctctttatctctattttaaacacatctgaagaatttgaaaactttaccttaagagagcctctcgtaggattaatccgcacatttccatcattcttcttgattagattaggctttttctctttcttcaccaccttcttcgtcgtttcatttgcatccacagtatcattttgtaatgaaatgtcgtctctcacttcttctcttacttctgtctcttctttctcatcctcttgtaaaacctcttctgatctctcctgcacatggacgaccatttctatcttctcttcctcaagagcaatctcctctgctttctccaatactggactatccacactgtccttgacttcgtctttcaccgtatcaaccgagctttgacattccttgacaacaatagtttcttcattactctcatcaatactcacttgattcactttagcagtaatgtcagtcacatgcttatcttcatcacaagataattgcccattacaaccattatcaacctcagactctaccaccaccccgccattttcgcattccacactctcctgatctgaaacaatagatctaaaagatgcgttctcgtccattagtttctcctgatctataatctcagctttcctctcagcaatcttcttataatgagcttcaaaataagccttcttttgagcaactgatcctggagtagcacacttgccaacttcctccaagtacttatttggagagaaagctgagaacttctcccatgaaagtgaatcattctcaaacctaccaaaagaaaccgacacttgcaagctcgggttcgatgaagccaccgcctttacttgtgtatcctccatcaaaccataaaaaccctaaaccatggacaaaatgaataacacccaaatcaagtccagaacgtggaagatctcacaaacacagagaatagtcaaatgtgtgaatagtgaaattaccttatcgtcaatagtggcaacaccaacttgcatatcacccattaatgctcagcacaagaaccttaattcacacaaaatcaagtaaatttgaatcaaaccatagccattaatatcttgaagaaagatctagtagctactttcactttctcctttttgtaattctctaaaccctcttagtgagcaaactcagattcttgtagacagtagtgtgtacttaaaaaatgaagaagctttcaaataattgaagaaacaaaaagaaagaccaaatcttccatcaatgattgaaaagtaccaaacttcacttagaaggagagagagaatctaagagaaaagtgaaataatgatccaaaccttaccagaaaagtgaagataacccacaaaccaaaattgttgttaaattcccaatgatgatccacctttttcaagctcttgtagttgctgcttctagtggacacacagagaaaaagttctctatagtaaaaaaaagttgaagactttgaacaaaaaagagaagacttgtcaaaagaataacaattattaaatagttttggttcactcagctgaagaaagactcttaaatgcagatttaacaagggtgagagagagagagatgaacacaaaagcaagaggaagaagaagagattagatccgactcagatcggaaatgaagacaagagtcggtgggaccatttagtagtctagtagtaatatgcaagtgataacttcgaagcaatcaaagagagagatcaagagacaaataacactgttaagtactacttcacgagcttctttatgagtaaaatatttgattagaaaacactaattttagtaaatataaaattggtgtaataaatgttatgcctcctcttctcaggacacctgtgtggatgtcagggtccccatagattcttcttctcagcggtgaaactcaactacacacgaaaaatagttatgaaccaatggtctttgaatctgacccgatttttgattagccataacaaaaacgtaaatgggctttaatacagcccattagtagttttcaaatgacggtgttttgtcatgtaactgttttgtaaccaaaacatttatgatctttcttgaccaggtttaataacattgcgagaagacttggaacttggaagagataaatgaacaactataattgcttctccaataccaaagcttagattcccaatgagtcaaaagccatcaatgtcatcacaaaccttgtcacattgatcataatctttttagccatttttaagacatgtacacattctagactacttgaatggtctgaatgaaaagtatctcaaaagaacatgacttaggctctgatagagattgatagagttcgttgtgaatatttctacggattaattcaaaatgagaaaacagagtatgtactagattaaacactatcaaattggcacttcaagatgagttttattaagaagaaaagattgaaacacaagagcgccagaatgacaaaagaattctcaacaaaaaggatcatcaatggcttttccacagcctaatatatatcttccctctctaaaatagatttgtacaacagaaaatcaaagaatcactcacctgaacaatgatatttcatctgtaatacaacagaagatattgaaaaagaatgtaactttaaaactctcacaagaagcttgaatcatcagtcaactccgacagagaagcaaacccaagcagagactgatctttagctctctcaatcttatgcttatacaaatcatatggctcccaaagatgatccaacggacaaggcctcttctcatcaagtctaacccatggcttacctttaccactccaatgcaacaagctcacaggaccaggatgcaatgaccgacaacttcctcgtatattgtctcctcctaaaccatgttggttccatctatgatcaatagcttcaacattacccgcaaacaccaaaagaaacggtggtaatgatccaagatcgtagattctcatcttcttctgcaattgcatccattgctctaacttctctctgtaattcccttctctccatctaacaagatccatcaccatcactcctgtgttgaaatagcaaggcttttgacccgagattagacccggtaaagccgggtctgaccagaacccggaagtgaaatactgagtgaagttcgcgtgacaatactccggagctccgatgactcgtgacccggtcaaaaccgtgttccaaagctttgtgatatcatccacagttataacatccgagtcaagataaatgactcgttcaacacttcgatcaagaatatctccgagatagttccgagcatagttcaacggattctccaaagctagtctaatcgaagaagatatgagattgatcaccgtatcttccctaaaaatgtagactttaaagttcaacgaaggaaaagtcgacctcacgagttgactcagaacacgaggactcgcagagtcaaactcagcagcgatgaaatggaagaagacgttctctggacaagacgcgtggcgaagaacagaatgaacggctgcgattgatccacggagatactctgagtccaaagtcatagcgatgtgaacaagcgaaggatcattagaactagaagaagacgacacgaagttctctctgttcactgatgaagatacacactccttgccgtttctatactccggagcttccataaacggaccaagtttactaaacccattattacctcctccgccgccgccatcaccgacactcgtgatcctcgccggaatcaaccgtataccaacaacaaacggtaacagagcaatcaaacacaccaccgtcaaagaaaaacgcgacgacattactaaacaaaaacgcgtttgaatgaatcaaagattaagactttatcaacggctaatgatttagcattgtgaaagattaagtaaagaactgaaagaatgttcctttttggaagttttgtgtctctccacagagatggagagataaggaaagaggaagaagaagaagaagaagaagaagaaagattggttatgaaagagtcatttttgctcattgtcattgcctttaacttttgatgattttgttttcctaaattaggagaatacgaatcacgcgcgtattaaaaaaacgcgtgagacgtcattaaggcttagtcgttaagggaaagtgttgaagaaacaaatccctaagactgtaattaacgaaaaggttaattactacaagatttaggtgagttttaaggtcttggcccattaaggcggtgccagctgtgtaggtcgagggaaacagctggatgattcgctttttggtaattggacggttgagattaaacgatgagaactcaacttgtcacgtgcgctgcacacctatttgcttgtaatgtagtaatggcattggaaaaatgtttgctaataaatgtttgtttgccagtggaaaaatgttttattttttgtgattttcgtactggcaagcataataagcaataattaccctagacaatatttccccaggaatgtttttggaaaataaataaaaataatactatccttttttgcctttaattttatagatatcagatttttgacagacaagcaaggtatatgttcataaagagtatatatttttcctaaagaatgttaaggaaaattgaataatttccttttacataacaaaacggtagagaaaagcactggattttgtacaaccaaacaaggaaactatagattcactcacatgtctcaatcatttaacaatgatttactgttataaaagttaatgcaatttcacaatttgtagaaactagtacaagaattttaagagaaatcaatatcaaatgttaggatagttttttaaactatggtttcaccgacgaataagactcgtgactatcattcataatttgttttctcagaaatttcattagaaaatatatatgtttttgttgtcggcacattttattgggatattaaagttgaagttttgttctcttcttagtgttagtatatatattattgggctgttggtagcgactaccaagccaattaaatccgaatattcccgttgggtagtgcagctcatggtcagacgtaacatcttattatatgaataacattttcaataataccattcatgtatcactttctcgagtttttcttaaggactttttctcggatatgagaagagaacacgatgaagattccgttgaacatatttgatttgatgatatagagagaatattcttgaataagttaaaacactgaacactatataatatataaacttgttacttgtcaaactaattatttaccgagtaaaaaactaagcaaaggtttgtttggtttctattggcttacagagagaaccaaatgcttggttaacaaaggaaaaagcaatcaatcatcaatgttcttttgtagtgattagttgttgcaagaaatctaatctaatttaagtattaagaaagagagtgagtggcgtcatagagtttacctattcaataagatttggtgttgatgtgggggatgatgagaaagggacttgtagagtagaagcaaagattattcaagttaggtggtggagacataactattcatgtggttttattggtaccgacgcagaagttggttttgcctttttatttttatatatattagataacgaatttaacacggggtcttgatgattttgtaatcacatgtcgacatttttctacttgagacaaagaagctgatgatctttctcttaactactctctgcttatttctctaactttatctcacagagtgatatccgaagcttcttttgcttggtgtcaaattgaagtgtgggaaacaaaagttggcaaactggtgaagcaatggctttacacttgaaatgaaaatacaaaaaaaaaaaaccagaaatatttttggtagcaagttaaaaagatttgtgtagccttgccttctgatttattgaaccaatcatctccttgggaagcaagattctatggaagtgttactttgagttcttttctgtctgctccaaacgactgcaaatttcaatggaggaaaatgcgtaaatctctagattcatatgccaacaactaccaacgccacagggttacaaaagaaataaatagatgtgaaagagtgggatgtgatagtacctcaactccgcagtctttcacgtacatgtttgtgaatagctcagatgcatctggtatcgggctctcctgaaacaagttaaacagcaaggaattagttcgtgttttgataaataacaaggacaaagatagaaacaattaagattattaccttggcctgagctacggcgtcatctacttctttccttatctctttctccatgtcctttaatgtcaaaagaattttgtcatttccatagtcaagtttgatggttgtatgtataatttttttcaagctttttgtctggaatgggaaggtggtgaacagggtaccttaagctctttttcggtagctatgtcatgagttaagagcaactttcgcaccctttcaattggatcacgcacctaaaggtaacaccgatgaaaactttacagattaaaaagtttcaaattgcatatggttggagcagtagtcttacaaatgaacaaagaactaacctgtctcacgccagagatttcatcacgagtacggtaagtgcttcctgggtcagacatagagtgaccgtggtatctgtaagtgtccatctcaaggatctgcgcaaataatggcaatggtatgttggtcataatcactaggtagagaatggattataaaaatacgataaatgtcaacgctatgtgattgaattcacaagatccaaaatgcttgtcccatttgtgttggtgacaaaatgcaaaaaaggaaaattggttggaagctgaagtcaacatggtataatttcacttcataagtaggtacacaccaaaaactccaagagatattagtgatatctacttatctagtacttttaatagaaatcctaggagcttgtcaatcacgcctgtcacactctcccggaaacagcaaacaaattaacaacataggtacttaagaagtcttgttttctccaaataaacctcgttcaatccaaatctaggctaggtagaagttaccagctaaccattctccccaaccaaagtagcatcacacatgcaagtaataaatgattctacgaattcttaatttgcataaaatgctaagagtcatattgattaggtatcgatttcataaaaccaacaggagcagctgtaatacttacaataggaccattcttgagagcatgctccttggcaaacttgcacgcctgtttcacagccagtgcatccataccatccacctagaaaacaaagcaaaagataatcattcgttagctttaagttcacactctcaccaatcagaaaaacaacggatacaattctattgggtaaagtaataaaaaactgaagcaacttctgtaaaacaacaaagatagagactttggagacaattccttttggtagttctcacaaagttacacttgatccgaacacacaactgtgaaggtttgtcctttctcattcaatttgtgtctaaaaccctatcctcactacctagctgttccatagtcgacccagtggtctaaaacacacaaggaaaccctgtatcaactaaaagcgtgctatagacaactcagtctcatcaaagcaaaagcattgtaaagctcaagatcatgccaaaagacaactcagtctcaccttcaagccaggaacataatctccacgcttgaaataagccggagacttagccgacctccatgtagccgttcccattccatctaaacatcaaacaatccaaatcaacacaaaagtctcaacaattccaccaaacaaattacaattaaccaaaaaataaactcacaatggttattctcgcaaacaagaatcgcaggcaaatcccacaaagccgaaatgttcaaggcctcaaacaactgtccctgattcgcagcaccatcaccatacaaagcaaaagtcacagcctcatccttattatacttctgagcaaaagccaaaccacatcccaatggaatctgagcaccaacaatcccatgtccaccataaaaggaagcatctttcttatagaaatgcatagatcctcctttaccatgagaacaaccagtttttctccccataagctcagagaaagcatcaacaagcttcccaccacgaccaatgaaagtacagtgatcacgatacgatgtgataatcgcatcttttttggtaatcgccgcttccattcccaccgctaaagcctcttgaccatcgtacaaatgacagaacccacggatcagcttcgccttgtaaagagaatctgctgcgatctccatcctcctcatccgagccatgtcacggaaaaaggctaagatctcctccgatgaagtctcgacggagcgtgacggtgattcacatagatgcgatgtgaaagggacggcggtttcgattgtgatcggtgatgagtctgtggaaacatgacggcggatggaggagggcaaggcggtaatcgccggctttaggaaagtgttggatcgtgaagaaagtcgtgataacgccatcgccgaagctctccgatttgcttttagaaattctcttttttgcagtcaaaaatcgaatctttttaaagtgagggaaagagttaggagagggcgaagcgtcgtttatggaaaaggtcaaaccttttatggtcatttgactcatttctatataacataccataacaaaatgaaatttttgataaatgttacaacaacatacaaaactttacaacaagagagtgaataaagacaaactttacatatgtaacatcatttttgtgagtgattgttttctttttcagtcacagacaacaaaaagccaaatcctttgttgcttcttcttcttatgaagatagagaatgcagtttggctctatccggtgaagtcaacaatggagaattgccacttttgtttttgttttgtctctgttaagttggagagtgaatgaacaagttgagttgatttggtatccttcttccagattgttacaggctggtcacaagaagttatttttgtaatattgtaacctcatttgccttacccaagaatcctgattgtggcacaaagtttttcttctctttttaactcgcaccaacaaatcttctgtttctagtacataggagacctgcaagagattttcaagaacgtgctttcaagtgctggtctctcatggatatactcataagcggtaagcgtgatatagggaagaagataaaagtgttacctttgaagaaccgcaagctatcttacactccaaaccatttttgatcttaacttcatctgtgctgtataactgttcatcttcacgacaaactttgcgcttgttcctggagaaaacgaaaaatggcattggctttgatgagtgacccactaggtttcagagatcaagggacagtcatttgttcatgttttacatttacctatttaaatagattctgcgatcctcccttgcatttggttgtatggagaggaagtcattgtggagataagctgcaaaggtcgggtcaatggatacagatgtcacatcgggcttatcaagaccgttgcacataagctgaatagagagtttcgctggggttgataatctctgcatacacatgaggttttggagtccaaaagcatgatcagcagtgcatcgacagaatataagtagctaatgtaagatgcagcaaaaacttacacattcaatacggtaaatattctcatcagggaggaggacacgggtattatcgtaatacacagcatcaaaaatcgtttcaggccttctggatttctcataaaaataaagctgaagaagcttgttgtccatctcatcagctactactacttgtagctgaagaatgaccacacgtatgttagtaaaaagcaagtaaagatagagaggtgaatacatagagaaaacatcaaagagcaaaaatactcacatgcttgatgaatttatggatcagtttgtccaatgtgaagagaatataagactgagtcccgattatcgctcggcagtcatcttcaaacttggcattatcagatgtaccatcaagtaagttgtagagtgcagtcatgaatctgttccacattaattaaagttataagtatggagcacatatgaatcccagaaacacacacaatctctgcaataaaaagcaaatttcacctagcataggaatcagtaggatttttggtatttgaggtcctccactttccttccggggatgatgagttaacttttgctgatagtattctctcatacaatatctgtcaagagtaatagcgtaaagttagctagtgaaaactctttgtactttagattatactgtttataattttttcaaactgtatatgatctttagctcttacccggtgcagcctgaaaagcacgtaaaacgaatcatttccatagaaaacttgggagttcttcagagagtctttgtccttgtcatgcaaagctatagctgaaggaacatactttactaagggctttacatgcagcaagaatcgtgctgaaacgggtaaggcagacccattttcttcagcatcatgtgcatcagccatacattcagcctcaccttcgctttctcctttgttattgttatccaaatcatcctccggatcttcaccaccaccagattccgttccagaaacatcaccgttctcatattcatttctgctgtcctctgatgatcttgcggcgttttcgtcaccttcagcgtcattctcagcccttgtctccagacaagatggttccccttctctacttctatctccgctaatgttatttccagtactatcattcgctttgctgaaggtctcaaaatcagtttttgcataaactgcaaaattatcttcctcaaagtctccatttggagaaagttcaccttcttctctttcaactttggatgttcctgccatctcttggtcacttgttatttctaccgcgatcccatttgtcaataacttcttgttaccaacctgtgagacaaagtttatcagtaccacctcttggttaacacagaactaagggtgtgtaacttcaaattttaaaactatctaagttccatatgaaggacctaagcaccaagtgcaaacaatgggagatattgttccatatcaacaaaattcggtccttcatttgaaatgagtcatctatatagaaagtatcagatcaaaatataagatgatgggactaaaacgtgcttcactgaaactatacctctaattttggcccattaccatcattcattttcaactccaactctgttccacaggtcacaggcttcagattattattgcaatgtcctgaccaagtaaagaggaaactattcattaactgtacaaagaaaatgaaaaattccaagagaactaacttctaagcaagattttgaggtgttaccggtcatgtgtactatactgcttcctccattactttgatctaataatccatccacagcgagagcagttgaatcgtgtgcacgctcaatagaaacagcttgcttgctttcaggcttttcatcagacgtaactacattcttcagcattttctcatgctgagcagtctcacataaggcatctgatgtcctaccagcggcgccatccctctccgaattactagtttgccccaactgactatgttcattagcttttcgagatgactttgagcgtctagagtcggcaacactagcgtaattgtgaggacttccctcactctcgccagcacttgaactaccgctctttacattctggttcatggacttgacaacgtcttcttggtcttcagcaccttgagggcgagaaggaacaccaaatatttgttccacgaaagttgtccaaatcttcattaccttatctaactgttcggtagagcacatttctgcacacgaatatttgatcagctggtaaagatcttcatgaaggtcatgatccggataatcaaactccaaatctggggaaatggatagtctatttccggctgcaaatgcaagaagtgaatcatcctctcgcttcttttcagtaatctcttttatctctgccaacaatgctacagaaaaaatatagtacataaagtcacttgcttgatataatagaataatgtgtgtaataggttacggacaaacctttcatgctcagcttctttgaatcctgctgtttgaagtagaaacttcgatgatcaagcgacttgtagtaattcttagcatatatctcagcccagactttgtcaaaatcagaacgacaccttgcccactcttcttgcttctgtttcaaacgtgttaggataacaggtaaagcaagagacacgttcttcttcagcacatccatcacatcgagcccgtgatcaccatacaaccgttctatgcatcttaagtttagagctacaaagacagtaacaaagcaatccattaaaaaaaaaaaaaaatttaaagagctcagctgctagtgatttaacatccatgctgcttattgttttacaccagcttatgttacctgtgaggtgatcctcgacacggatgggactgttggttttcagttcattactgttaatttttgtcaataattcttccacatgctttgtcgttgaatttacagactctaatagcatgtccagctcaaacctatagcataaagagaggaataatggctcacaatttgacacagaaaatggctcacaataacaggtcagtaaccaatttttttttttaaagtatggaatataggtttccagtccaccattagaagttgattaaccaacctgtcatcctcacatttgaagaggctctcttcatactggttcttacgcatgtggctaaatgaataatcttcacttcctgatgtgacggagacccagtgatcattaagaaccagtttaccgatctctgtcttctggcttgcaatagaaattgggtactgcaaaaagtataatgtcttacattagactaatgaaacaaaagatgaactcaagaatagtagatccacatataaaaggctgcagccacatacattctttggaagtaaccgataactaggagtgcattgttcacagttcgagagatctagttcactgattggctttgcccatttcagatttgcagctgctttttcaagcctttccttttcatgatctctatctctaagcccgtcatctctcttatgttcctggtctctatcattgtccagtgacggttgaggatatttgccttcactccacaaggattctgcagtatagtttagaatggatttgttttcttttcagaactagaaatggatatatctggaaagaagatcaaatttcatagtggagttgtgtagtttcactactcgtgaatacttcaaatatatctcagcatcagattcatgtacccttgcaaaagataagtagacttactcttagtcagaataccagagagcagtccttctgcaagaagattcaaaaggttacaaatctgtcttttttctgaaatcaatgaatgtaggaagagagaaacatagatttgcctcgttaccattcttttcacattgcaccaaaaactctataaaggaatccatgaggtcaggatatactccgattaaattccctacctgatacaagcacaaatgttcatgaatcattgcaaacaaatgccacagtgaaaatttaagcattttatttattcataccaaagattgcagttctggtcggctgattatctcttttgaaaagagattaagacaacgtaaaaactcctggtactctgaggcgttaagcttttcctttactctatcgacaatagctagatcttgactgtaacctgacatcacatcaaacaaatataagtacacatggaatagcgaacgacaaactcactccttatctttcaaattagttgtcataaaacgagaactcacttttcatggcacctttttcatcataagtagatgaactaggaaccgctccagaaagtttactttgattggaaatttcagcaggatcatcgcctctaatatgtagtttctgcttcttgttgagaaattgctcttttttgctatgtggttcgaaatctctggcatccctatgctcattttctttgttagtacctctcatgtgttctttattttctttcttaataggtctctcccggtcctggtcaatatgttcagtaccatagtcatggtcaggatgtggagtaatgatccggtccttctgcaacaatttccaatcaaatgatgttcaataaaagattagacatatagaacattgtatttctaggaaaataaaagtctgagaagaaccttatcagccagagaaacccctctctcacgaactgaagttttaacagatggaatagaggccgttgctgaagtatcaggtagaaagtgagtaaactccacgagcagatctgaatgatcccgaaataggatcgcaacctgagatagacatgtaaaacctaagtacagaatagcaacaaaaaaaagatacacataacagcatcaatgagcctacctcctggtagacctcagtgatggacttgctatcccttctgtacatgtttaaaatgtctaaaaatgatttgtatacacgatcatctccctgaaaccttgtctgcaaatcaatgaatatcgaagagagtaagaaagggaaaagcagtaatttccttgagacagtttagcacataaacatatatataccttaatcttgttaacaaagctaatagcttcctcaaactcaacacgtttcttcagtggaggttgtccatcctcaggttgaagtgtgatctcaaaacccttaggcaagaaagtattaaaccccaaaatcaactcttggtgtcctttgaaaagttcttttaccctagttatcacaccagctgtatcaactctacaatgaaaaacacaattaagcaatcagttctcagataccaagtttttaacctaaacataacaaggagaagaaaaaaactatacctttgagatttaaaattcttcataacctcgagaaactcgtcatattttccacgttgatcctgaaatttgtccttcacggctttaagatatgcaagagcgtcgtttgtagttagcttctgagcacttcctcctccaaccatggtgtttgaagttgaacagagcttcattaccattaaaaaaaacagatcatttagaaagctattcaacatctcataagaccaaagaacgtttctttagagaattcaagtaaaatttgggattcagcaaaagaacaaaagctgaaaacaactttcttcatgttcatctacaaatcaaaacctagtaaaactcaaaatcaatcacataaacaaggaaaattcaaagaaccgaacttgaatttcatcccaataagcaacacctgtagatctagcagctacagaaacaatttatgaagaaaaaacaaaaggagacggaccagaaaaaatcgatcttaacttaatcctcagattatttcacattcagttcacgattaaaattgtaatacccaaaaatcaaacagaaaggataaaaaacgaaagaagatcatcatcgtttatgtgttagagagtttaccgaagaaattcagagaagacgaagaagaagaagaagaagaagtctagaagaagaagcttcctccgacgaaacagctgagaagacaaaaactattcaacaattttcagacagaaagaaaagactcactgagcaaacgagagttttatgtttttatgaagaaaggattgagatttctctcaaaggagttttacgtcttcttaagtaaattaaaatctacatatttaatacactttctcgttcgctaaatttttcgtttacttacttatttcatttttctgttgacaaaaaataaaataaaaatcaaagttgtattttcttgtttttattacttccttttgttggttgtatcattttaggagacttataatttatcttcttcttttattatttttaacattttttttcttttggaagtttttatctcctttggtatgtgagagagacatacttaattttgaaaatttttgatataaaataaattattcattttttttggaaataattttgtaattaaaaagttttagatgattaatcatattattaatagatgttttttttctctttattttggtcaacatagatgttttttcttaaaatttctaagttaattacttaatgcaaaacctatcaaaattattaatggggaaaaaatgttctaaaatcattgatgtaaatggaatctatattacattacacggttagattttgcttaaatctaaaaaataatatttggctaacattaatagaagaataatttaactctaacttgattaaaaccataaaaacggaacatattattcgccttttaaattcattttttttttatcggcattactatctttccggtagaccgaaaactttgtcaccttgttcgtagaataattccgataacccttatcctcatgttacacatagtaaactcataggtaagcattgaaataactaggtaaaaaaaaaagcattgaataactatagatgatggtaattttgaattttgatagtggctataatttatagggaaaagaaagctattaatcatgcatattaaaaagaaaaaacctctactattatctctgacttgtaactttaaaaaaaaaaaactacttatatgtgaagcgattgaagtaacatagcaatcctttcgtcacaaaaaactctgagaaatagttggcagaaagcaatccaactcttcaagcaaatcaggatgatctatgcaaaactgtgaatgcaacaaggctgttgctggagtagctggagtagcaggcagaaagtgagtaaactccacaagcaaattgttatgatctagaaataggatggcaacctgataagataaacgtgtgaaactaagtaaaatattagcaataaaaaaaaaaaaacttagtatgaatcaatgagcctacctcccggtagaccgcggtgatgggcttcctatcctttctgtacatgtttaaaatgtctaaaactgatttgtatacacgatcatcgccctgaaaccttgtctgcaaatgaatgaataactaagagagtaggaaagggaaaagcagtaatttccttggacagtttataacacataaacatatataccttaatcttgttaataaaactaattgcttcccctaactcgacaggtttcttctgtgaaggttgttcatgatgtgtgatcatataaccatttggtaagaaggcattgaaacccaaaagtaatccttgttgttctttcaagagttctttcatccttattataacaccagatatatcaattctatacaacacaatagtcggtaatcagttctcagaaaccatggagttttacctaaaccaagaccaaatgcaaacataaaagtagaaagaactttaacctctgagttttataatctatcatgatctgaagaaactcgtcatatttttcacgttgaccttgaaatttagccttcacggctctaaggtatttaagcgcgtcatttgtagtaggcttgtgtgcgcctccttctccaaccatggtttgaagtttaggaaagctttattgttcaaagagaggcagccaaaaaaaaaggtgaaacattattagaatcaaaagatggtgcaaggtttcttcaaaaaatattggatccttgaacaaccccaaagtcttaacaacaaaacaattcattcctcaaggtgatccattattagttatcacacgtaacctacacatgtgaagtagtcaattcaaacacagggcaaaccagtcaagtattggatttagatatgtcctactctcattcttaaccaaagataccccaattcagagattgccatagtattaagtctgacgggattagattaacactttttattggggacaaaacaaaactcatatctagttttgagacttcaagttgattaaacttcatcagtcggatttgatatcttatcacatattacgaaaaatatattcaaggaactcgatatcatcccacgaatacaaattacaacaagcaacagatctagcaactacaaaggcaatgaacaaagaaaataaaacttgtagtggacgtaacgaagatcacacaaaaaagaagaagaacacatgtgtataggtaccaaagacgaatgaagaaggcttcacgatcacgagcacgaagcaggggagacgagtttctagtctcggtagggttttgtttatgtattatgattccaaggttatgtaagattttctatttattttaatgatttttttttattatttggtgtattttaattaattatgtactttttttaaaagggttaaatcatccatttttgtaactttaccctccacctccaatatatgcagattaatcttataaagtttaaaataatacgcaatatgacatttatacgtatattgtaaacgtttttacgatgatatacattagaattttaaaattttgaaggcagagttgaactcttcatcgtgagggtttagatttaatatattacatgtcaatattttacaaaattaatagtaaagaaaaaaacaaagaagggttacaatgcgtattattttagacttcataggattaatctcaatatgttggaggtgaaggataaaattgtaaaaatggatgagttcgaagtgtttttttacacaaaaccctttttttaacaaccattaattaagtacataacaaaactaagaaatgagttttaaaaaaatgtttgatctttcataggtttttcatcagtaaaattcaacataaacaaaataaggttatgagaagtatttttgagttttgtgacactttgagtttcaatcatctgagtatatcaaattcaaatctcatcctcttcatggtgaaaagcaaagatttaaaacctctacaaaagaaactatacactccattctcattcataaaaaatacatcactcgttataattgtagtagtagtgatgctgttgatacagggttctttgtgaaaaatctgagaaagtcttcaatcaaatcttcatgatagaagagaacatcaatgacctgcaagataatattatttctaaccaaatcaaacaaagagaaccaaaaaaaaaaaaaaaaaacacaagtacacaaaatagcccaccaagaacaaacattacctcctcttgcacctcctttaccgacatctttccctctttaaacatcttcattaacccgcgaattgcccccactacatgagtatcaaggctctgaaaccgtgtctgcagatggacaaatttgctctagttagtaaaagaggaatcaaaaaaggattttggtgtttctctccaaggattatttgtcattttagcatgtgtttaccttgagcttgtttataaaatcctctacagaaacaggtggaaggaagacactgaaaccaagaagaagatcctgatgatctttcatcagttcctccacccttgcaatgacactatatttatcgactctgcaaaaagagactagtaacatcagaatcaattcacagttgaaagtaaagaccaaaccaaatataacagggaagaaaagaatacatacctatgatcacaaacaccattcaagagcttgataaactcttgatatttcgtaggttcatcatgaaatgtttccttcacagcaatgatgtatgaatgcgcatcatccttagttagagcaggtgatactcgtcttccaaccatggtttgaatctagccttttgttatcaaaagaaagagaagatttttgttcagtaaaacagatcacatcattgaatttaacctagaagctattattaccacttgaagaaacagaacctagagtgcagaaatcttaataacattacttaaatctatgatttgcctcaacactgaaattgaacaagacataaagctgcaataagctaaatttctcaaaatccaaataattgtcaaaaccaaaatcaacaacaactaattcattcccatcagaaccaacgtgagaacttgtgtaaagtggccaatatcaacacagagcaaaccaaccaaacacttagaagtcttaaaatctcagtcttaacaaaaacaataagaagttaattcgctaatttgagggtttaaatcggatttgatgaaattcaggtaaaattgatcacacaggtacgaaattaaattcgaagaacccaattcgaaatcatcccagaaactacaaaatcattcaatgacaataagagaagaagatcatcgtatagttaccgaaattcgaagacaaaaagggcttccctagcttacgagttacgacacacgatctcgaagaagcaggagactagaactagaagaagagatttctctagggtttagtttccgacacttaacgttggattatataattaaggattacatcaaaagtacggtttaaaaaaggaaaaaggcaaatcttcttcttttttttaattaattaattaaaactttttaattgagaaaagtaaaaaaagtaaaaaatgtgaaatgctaattttagtatagggatgatctaatcgaaaatagagattaatgtttagactaaagagataatttccccaaaacatatatttcttagtttgactttgacataacattacatacatatatgtgttaaattaatttgatatggttaatgtttaggaactacagtattttctaatacaacatcacattcaacaactctaattaatagtcaatagcaacacctagtatacattcctagtataaatttgataacaacacctagtatactttgctttttatactatgtgttaatgtgaagttctagcgttttaagatattttgaataataagagtaacgagttgaaaaaagattaatattatgaagttaattgaaagcaacaaagatcatacagccttatttataaaacacaatggctaaattcataacataattcctaaataaataaataaaagaacgaatcacaaataaattattcaatttaatacaaatctaaaccgaacttggtttagacgaacgaagaaatcccacaacatcacctacccatctcatgccccaatctaataattagatctccaaccaatctggtaaaaatacattgaaaccagaaaccaagtcttggtctccgttaagcagttccttcaccgctgttatgcaatcagccctactaattctgcaatgaagttataaaatcaaaattaattacttcttcaacacgaaaaaattgaaccgaacatttttagtcatattttccaaaaactatgtatatcacatacttgcgaactttaaaatctttcataatcgcaagaaagtcttcatatttttttctatcattatgaaaatgatccttcacagccttaatatatgcctttgcatcaattttggttggcttcggcttgtctcctttatacacaaatatactgtctccttccgacatggttttcaattgatcgagctgtattttccaaacaaagagaatgattttttattattatttgttttcactgaagaaattaattatttaattttgatttctatcttctcaaacacattacctcttttctttaaaagtaacttaaaatcgttggaaaaaagaacaggaatttgcatcagagatcttaattaacaattactcggattttttaacagtacatgcaataaacatgacaataaccaactttagatcggtaaagtcaaagaagaattgtaaaaatacttcagagtaacaaaccataaaagtaaaaaagttcaaggaaaagcaaaccagaaatttactacgggtagaagcttcaccactaggacatgaatcgttttgagttgtatggggtgtctttatatatcaaaaaccttgcagaaatcagtccatttgctattaatatctttgtagcaatgagatataattgtattgtaatattaaatgaaataaacacatgtcagtttgtaaataaaatttgacatttattaaaatttacagatttttaatgtaaatttagtaaataacaaattaaattgtaaatttttataagcatatctgtcaaagctttattttattacttcaactttttcgagattttaaaatcacttttgttacaatgtaggatttactattacaattttttatatatattataatattacaatgtagcatttagtattaaaattatatatttagttgatattaaaaaatagactacatgtcaaaactcaaaagaattgatgccatagatctgaaaataacttagtaaatttactttcgtagtttttcaaatcaaagccgactagctgtaacttagtttctgtatgattcgtgacgtgattcaagaacagaacaaattaaagaacgatttatctttattataactagatgaacacccatgttacgcatgggtttttgtttttaaaattgttggaaaatatgattatggttttttgttgattttgatgttcattttgataaatttatctatttaatataattattattttttatgattagattcatctataactcgaaatatcaattctactacaatatgtatatttatatatttattattctaatatttcactatcatgatcacatactacaacaatatatgatatactgatacaatgtacagtatgtagttatattacttatgtgttttgaaacttgtctaacttaattgtaacaaacgattatttattccatatactctctcgtcatctagtacacaatcacatcatgatatgctagtaatttaagtcaacactgtaattttcatccctaccataaagtcatatagagtctcatttttttttttgtatgtctaatgtcttggatgactattacgtgaaatgtacataaagaaggtcatatgataaatcaaattcacaaaacataataataaaaaaatatccaactaaaattactaaattaatatgaggttaggtagcaaacatctaaactccaacacaagtaaaattttagccattatgggttaataactattgataaaaaaattaataaaataagtagaaaagaatgaaagtagtgcttgatacattattatgattttttatttattgattattcttagaaaattcatttaagagtgatattaatggagaatttaacacaacaaaagacttttgattttttctcaattatttttgctagtttttttaatttaactaatgtataataacacatgtcattttcttgtatgataatgtgtcactcatatggagagtattggccaactttcatatatatgatttagaaactcactcaaaactaaatctctctaggtctttagaacaactctctaaagcctcttaatctctctcttgtgtcttatggaacatctctccataagcgcttatttatagttattaaactactcctaatcttataatgaatagaaaaacttacgaacttatccaacttgacttttatttgtattttctattttcttattatctcttctaaaatcttctagagagattacttgctgctcaagtaattggaattatccaacagttttttttcaaaaatttattcttttttttggtcaacaaatactagtaaatttactttataatgtttcgtaataaattaaaatacacaccatcttatggtttaagttttagatatttaaggtgtaactttaatattattttaagccttttgcaaaaaaaaaaaaaaacttttattttcttttgtgttacgaatttaggatgatctcagcttgggccgaggtgcatatgtgcatttgatgatgttgtgttctctccttagactaagaatcaaactaaactcaaatgtcttacaaaagaaaactataacactctcttctcgttagaagctctactcttttccatctcttaagaacctattataggcagagattccactgaaatagtcgccaaactccatgactaaatctacatgattctgaagaagtgaaacgacctgcaaagttaacaaatcaaatcaaaccaaagaactaagagagtgaaacatacaacacaaattgtcccaccaagaacactacctcctgatacgcctcatctttggacttgtttccctcactgtacattttcaatatctggagaactgagttaactacatgactaccatagccctgaaaccttgcctgcacatggacaattttgttacttaaaccgcaagttaacatatactaaacatcaaaatgttgtttccattagtttaccatttcagcaatctatacctcaagattctccataaaattggcggaacgttttttttgtttttattagactcagctggagggatggttctcttagcctttggaatgaagaaggctaaatgatccacaggacgggtggttctcttatcctctggatggatggttttcttcgcttcagaaggcatgattctgtttctattagcctctcgagggatagttctcttagcctctcgagggaaggttttcttcgacttgggagggatggttctgttagccttgggagaaatggttctgctagacttgggaggtatggttgcctttggagggatggttctactagcctcggaggagatggatctggcagcctcttcgtattgcttagacttgggaaagaagacacttaaaacaagaagcagcctcgggtgccctttaatgatttcagccatccttgcactgccattagcttcttcgattctacaaaacatcagaaaaaaattcacaaggtgtgtgtttgtcacagttgaaaaacttggtaactaagaaccaaaccaaacgtaaaaaaattcatacttatgatcacaaacatcattcatgagcctaagaaactcgtgaaactttgcaggttcgtcaagaaatgcttccttcacatcagcgatgtatgtaactgtttcacgtatagtagaagcgatctctaaacgataatcatcatccatagttagcttcagtgatactctgttcattagaaacagagcagatcatcatcattcgatctctacatgacaaatcaagattacattctaaaactaatcaaaaaccaaatcaaacaaatcattggcttcaacacatcaatgtcacgaactcttacgcttattctctagtaccattcatataagtttcatcttctagactaaagattcatgtaaaatttcatcgatcagtatctttagaacttagaagagaatcaaatgagaaatcgataagagtatttgagacaaacgaaccagaaaactcgatctattaacctaatcgtcagatgatttcacgtgaacgaagaagaataaggtcgtgtagttaccgaacgagcaagaagcttcctcttcacagtgtaaacgacttcaaagatttcaagaaacaaatgcactgagactgttttgacgtattgagttatattatgtatttatacttttacaatatggaccattaactcgcatttatatatctcagaagaatttgatattccatattaacgacctttcttttaatcaaacagagaaattactaattcaaattgtttaataattagttggattggatagttttgattaggaggtatttgagtctattatcgtagtaattcaaataaggttctttagagtaggaataaaactaaactcaaatctctccaaaaagaaactgtacattctcttctcatcgttttatagacaaaaacatgatagagaatggtgttctctaactatcgttatgttctgttctacacatcatagaaggggacactgaatgatgaaactatactctcaaactatctactgaaatagtatactagtagagatgttgatgcgaaaggatccaagtttaggaaagattctggtgaaatccgctctcaaatcttcatggtaatagagaagatcacagacctgcaagatgtattatataaccaaattaaaccaagtactaaagaaagaaatgcaaacacaaaatagcccaccaagaacctacctcctcgtgcacctctttccgtgacttctttccttccttatacattgtcattatcgagtgaaatgacccaactacatgagtatcgattctctgaaaccttgtctgcagatccgaaaattttgttatataaactcacaagttagcaaaggaggtaagtaatatcagacatggtaccatcattttatataccttaagcttgttcataaagttcaattcatcagtgtgtgtaggtttctcagcctcggaagggatggttcttctagcctttgttggaagcttgttcataaagttcaattcatcagtgtgtgtaggtttctcagcctcggaagggatggttcttctacgctttgttggaagcttgttcataaagttcaattcatcagtgtgtgtcggtttctcagcctcggaagggatggttcttctacgctttggtggaagcttgttcataaagttcaattcatcagtgtgtgtaggtttgtcagcctcggaagggatggttcttctagcctttggtggaataatggttatcttaagcttcacagggatggttctgctagcctcgggacgggcggttcttttacccttagccttgtgaggaattgttgatttagccgcaggcaggaggatggcccttaaaccaagaagcagattccggtgatctttcgtgagttcgtccactcttgcaatgacactatcggcatcgagtctacaaagaaattagtaacatcagaatcagttcacatgtgtgtttgttgtgtagattgagacatgaaattaagagaaaatcaaatgtacatggagaaaataatccatacctacgagctttataatcattcaagagcttgagaaactcggcatattttgcaggctcatcatgaaatgcttccttcacagaatctatgtatgaacgtgcatcatcgagagttttctctagtggtacactttttccaaacatggttcgagatttccttaactctttgttcgcatcaggagggatggttctatcaaccttggataagacgagaaacttcttgtgcaccttctttaccgacttcttcccctcatcaatctttttcgtcattgggggaaatacaagactatcaaggcactgcagatatatatagatttgcttaatacaaaacacaagctaggaaaagaggaaatgtcaaaatgatatttccataggagtattcatcatctttagcgattctataccttaagcttcttcttcctatgattctcacgattagcacgtttctttttggcatcaacagactcatggcgttgctcaaccttgggagggatggttatctcagcctcgggaaagaagacttttgaaccaagatgcagcttggggttcccactaataagttcgttgattcttgcagtgatcctatctttctcaactctacaaagagaactaacaacatcagaaaaaaattcgacaagatgcttgttttgttgtgtagactcgcagttgaatttaagaccaaaaccaaacataacaatacatacctatcatcacgaacttcattcaagcgcattctaaactcgtcaaattttgcaggttcatcatgaaattcttccttcacagattcaatgtatgaaacagcatcagccatagtaggctcctgtgatacacttcttccaaccatggctaaaccctccaagaaaaaaaaagaatttgtgttcagtaaaacagatcaaatcattgaatctaaacctattaatactttttctttactataaagtctcattactcaacaattgcatgtatttgtcaaaaccctaatcaaatacaacattggattcgaagcgtcaatgtcactctcaacgatatataagtcaaaaaattaagcgaacgtcaggggaatttcatatacagcagcaacgagccaagaactcgatagtaactaaaccctaatcgtccggtgaatacagaattcaattgaacgaaaatcgaaagaggaaccaagtataattaccgaatttggcaaattagcaaggaggttcttcttcgttagagtaatggagctttaaggtttcttccagaagcaaatccacagagactgatttgtttttgtttttttttggtcaaaagagtttttatctgctttttatacaaatctagagaaccttgaagatcaagtaattgagaaaactaatggaggatatgttcaagtaaaataaattattttaattttagtttaaatccaatggaggatattaatgtacatatttttagggatatcaatgtacatatttttagggatatttttagtaatttttagtagataatttacaaaacaagtttgaattagatatttaaaatattttcaataaaaagtgtgaataattaaaaacatatttcataaaaatcatatttgaacaaaatcataacaaattttacttgaattatccaattgactactaattatttgaaaatttgttgttattagacttacttgatttttgtttaaaaccaatggaggatattaatgtaaatttttttagggatatattccaaaactattttttcgtggataatttacaaaagaagtttgaattagatatttaaaatattttcaataaaaagtgtgaatgattaaaatcatatttgaacaaaatcataataaattttacttgaattatccgattgactactcaaataaaataatttcttttaattttagtttaaaaccaatggaggatattattgtaaatatttttacggatatattccaaaactaatttttcgtggataatttacaaaagaagtttgaattagatgtttaaaatattttcaataaaaagtgtgaatgattaaaatcatatttgaacgaaatcatgataaaatttacttgaattatccgattgacttctaattatttgatttgttgtgattagatttacttgatttttgtttgctctgtaatttttggccatatatataggtttgagtaaaggctctgttcctctctctttttgtttctacattagactaagatgaccccaaaatctcatgtcttcttggtaagatttaacaaacgaaatcatacactctcgttttagtctcttatatttacccaaaccattatgcatctcattgatctcaaatatagaagcatatgagtaagaatcaaactaatctcaaatgtctacaaatgataactatacactcacttctcgttagaaagaagtactctttttgtctcttgtaccccaaacattatattccaagcatcctaaaataaagcagagacagtcttctataatgtactcatctatctctagcagattttgaccctgatggaccagtggttctcttgaaaacgtttgaaaactccatgactaaatcttcatgaccctgaagaagtgcaacaacctgcaagcaaagataacaaagctaatcaaaccaaagagctaagaagtgcaacacacaaaatgtcccaccaagaaccctacctcctggtacaagtcatttacggatttgtttccttgttggtacattgtcaatatctcgagaaatgactcatatacatggccatcattcccctggaaccttgcctgtacatcgatgaatttgttatcttaaatcacaagttagcgtagaggaaacaccaaaaatagattagtttacccatttagcatcctgtatataccttaagcttgctgataaaatttgctacacgtattcttttgttattatcaggctcagcttcgagaggggtggtttttgtatctccagttgagagcaagacactgaaaccaagaaccagattccggtggtctttcatgagttccgtcatccttgcaacggcactaggagcatcgactctacaaagagagacttagtaacatcagaatcagttcagttcacatgtgtgtgttgttttgtaagcagaaattaggagaaaatcaaatataacatggagaaaataattcatacctacgggcgctataatcattcaagatctcgagaaactgagcatattttgcaggttcatcacgaaatgattccttcaaagaatagatgtatgaacgtacatcatgaaatgtttccttagcctcagctggaaggaaggcattgaaacgaagtagcagattcacgtgatctttcaagagttcccgcatccttggaacgacggtagctaaatcgactctacaaagagaaaaataacatgagaatcaatctctcacatgtgtagactgtttaagagcaaaccaaacatacctattagctcttaaatccagcatgatgtcgagaaactctcgatattttgcaggttgatcagccccaaatgcttccttcacagcattgatgtatgacgtcgcttcatcaatagtaaacgccggtgataagcttcctccaaccatggtctaaaattggcctaatccataaagattgaagaggtctcaactcattgaagaaacagaaaatagagtgcataaatacaaatcttattcctcaagaaacttaatccaccaaacaacacaatagccgaattagaagaatcatgtcaaattcatcgcaacaggatccttaagaagatccagaatcaatctcgagtagaaagaaaagaaaacaaaaccaagaaggatgagcaagaaactagaaaattgctcgagcgccttttaacctaatcgtatctgatgatggaaggagaagatgatcgtaaccctaatcttccggtgagcgaaactatgttcaatcgaatgaggaagcaagtatgttaccgatatataagcagaccaaagacgacaatgaacaagaagcagcttcgtcttcgtcttcttcgcagagtaagggagttcaagatttctagaagcaaagtaaaacttcagagactttttttagagtttttgttcacgagtctatatttatactagggattatcatatattcatacttgacttcaatttttgttgtagttgtaaaactataatttgtaagagaaaattgaaacataaatttataaagatttctatatatcaaagacgatgatgatgtgatatttgtattaattttaatccttggtaaattcttatataaattcgtaatttatataatttaggaaacatatttgttgtcattagatttacttgatctttatttggtttgctctgtttctctctgttttcgtctatacgttgaactctgctttgacttttgagtgcttacactctcgcctctcggtttctaacaaatatgaccccaaaccaaaaatcatatatgtacatgccagaagaagaatcgacctgaattcaaatctctataatatatgaaacaatacaatcacttttcacctcaatgttttttttttgttaacattgaggttttcatatgaggtcatatcgattttgttttgaattattttagattatgatttctacatggatagacaagagttttattgtaagtgcatgtatgtaatgatgttctgttctctatacaataagcatcacactaaactctttctagcaagaagatgtcaaagaaaaaagaaaggatgtatttgataaaagcaaaaaatatcaggggtatatatgcaaattaccaaaacaaaaataaagaaacctgaaggagcaatgacaagggatttgtttttctcaaaatctctgaaagcttttggatatttgtgatcgcatagatcgattccttttgcggagaaatgcaattgattcgtggcagtacaaggttgcttcagaggcatcgtttctccatctccaacactcttcctttcacttcttcttcttgtggaagctggtctgctaatgaatcgaggaagctaggctttgattctttccctagtactagagctgcgacatatctcattagctcgttgaaaaatgccggcttttcctctttggcagtagtacctgtaagccattgtccttctctgtctttggtttaagattgttttttacttcgtgtggatttgtagaaatgtagacgaggttttggttggtaatagagatcttatgtctaaattggtttgaaaattgctaggaatgtaagaaaaacgaaaactttgatcttgggttggtctcgctgattactgatgagtgtagtcactctcctagcttcagattccactgaattcatcttccaaaagctcagagatcactaaatagaaaatgaacttaatcaatgatctaaagctttgttgcttgtttttctttttaagctctttgttgttttacttgcaagagatgtagatataaaggaaccaacttcgtgctcttgttacttatttttcagctttgacacttaagttttatgatttcacatgttgttgttctactttatatgttttctctatgttttggtcaccgtgatatttggattaggcttctatgggtttaagatgttcttgggaatatttttttggcagaaacaaaacttttcgtcgaggtgtttttccaccactggagattctgttcaaggatcccctgagtcagattgtgttgtgcctcagagaatcaagtttaagcggcttgataaaaccgctaagcatattatgcaggtactacaactcgaacttgacacttgtatttagatatatcatgtagacaaggaagcaccgatgtcacaatcctctgcagattgtagacaaggaagcagttgaggaagtgagaactcttagagagattccagagataaagcctggttacattgtgcagctaaaagtggtaactactgttggcctaggttgtaatttctttttcttgggtgagtaagatcaaactatctttcatcttctaagtgaaacctttcatttactttgtttgaacaggaagtgcctgagaacaagaggcgtgtatcaatcgtaaaaggcgtcgtcatagcaaggcgtaatgctggtctcaactcaacatttagaattagaaggcttgttgctggagtgggcgtcgaatccatgttccccttgtaagtaacttcaagcttcaagcttgtgcagccactttaatctttttctctcagacttttgtatatgaccattaagagccattattataatcaagagccaccatgttttgtatgttctctttgtttgccttggtcatggaaaatactgatgtaagtggaggtgttttggtgacaggtattccccaaacctgagggtgattaaggtggtggacaagaagaaagtaagaagagccaagctttattacctcagggaaaaggtcaatgctctcaagaagcattaacagccttaataagaattagcagtctactcttgtctttaagaattgaatttgtgtaatcgtgaatctcttcaattctcttgataagccaatcatcacaagcaggttaaattgatctttcatgagttcacctctctgtttttgtttctacgttgaactctgttttttgagtgtttcccttctcagtttcttataaaaagattaccctgaaaatagcatattgaacacctcaacataaaagaaacctcaacaaagaaactatacactctcttttagtctcttatacaccaattcattgtacacctcaacatagaagcatagcatatttttgaatgtcatgttaatcaaacaaaactctaatgtttgcaaaagaaaactaaaaacactctcttttcgtgagaagctctactttctttttcgtctcttatggtatattacagtcttccagtactctccttagctatctggctatctctagactccagtaggtggatcagtcaaaatttgtgaaagctccatgactaaatcgtcatgaccctgaacaagtgcaacgacctgcaaaagataacaaagcaaatcaaaccaaagaactaagaaagtgcaacacacaacacaaagtatcctaccaagaagcctacctcctgatacgcatcatgtttggacttgtttccctcaccgtacattctcattatctgaagaactgagtcaactacttgactaccatcgccctgaaaccttgcctgcacatggacaattttgttacttaaaccacaagttaacatataggaaacatcaaatggtaactataagcactctataccttaagcttcgtggtaaaactcgttgtagctgaaaggaagacacagaaaccaaaaagcagattcaagtgatctttcatgagttcctccaccctagcaatgacacaagcggcatcgactctacaaagagacttagtaacatcagaatcaattcacataatgtgtttgttctgtagactgaaaaaatcaaacataacatggagaaaagaactaatacatacctgcgagctttaaaatctttcaagagcttaagcatttccccatattttgcaggttcatcatgaaaggcttccttcacagcaataaggtatgaagtcgcatcatctatggtaggctccggacgtggtagacttcttccaaccacctttggtggtactggtacgcttcttccaaccaccttatgaaactcttcgctagcctcgggaggtatggttaactgatactcaggtggaagtaagacatttaaaccaagacacagactcgggtgatctttcaagaggtcctgcatgcgtgcactgaaagtaggcataccgatcctacaaagagaaaaataacatcagaatcaattctcacatgtgtcattgttctttagactgtttaagagcaaaccaaacacacctaggagctgtaaaaccacgaaagagtcttacaaacattccaaatcttgcaggttccatttcctgcaatgcgacctccacagcattgacgtatgcctttacatcttccaaagatgacgccggtgataaacttcctccagccatggtgtgaaattgaccttatccatggttcaaagataaagatttgtgttcatcaaaacagatcagattgatcattgaagcctttcttgtatctcaagaaacttaatccataacaacaagaagatcagaccagttcgtcgatatggatgattcatgcaaagttcatcgaacaagatccttaagaacatctagaatcagtctcgattgaaagaaaacaacaagatgtgctgatcaagaaactagaagataatcatatacgaaattaagaaattcgatcgttaacctaatcgtcacgtcacatgatttcacatttcagatgaacgaaaaaggaattgaaaagaagaagaagaagaagataatcaccttacgagtaagcttcgtcttcgcaagtgagaggcttgaagattcccagaaacaaacgcactctgttttgagctcttcggtttttcttttccagcaaaacctcagagactgattcgagtattattcacgagtctatatttatagtaggaatctatcatatttgacttcattttattattgtcaacttttgtttgcattgatcacataattagcataagcttataaaactataattggtaaaatctgtgaaactgaaattttaaaaactttctatatatcaaagatgatgagaattttttttttgtgatgattggaatacagatatttctatttattttagtccagacatatataaattagatatttaaaatattttcattaacttcgtaagataattccaagataaagtaattaaaataaatcgtaaataattcatataacatttacataaattataaagcatatttgtggttgagaaaaataataattataaagcatatttgtaaatggatttacttgattttggtttggtttgctctgctttttttgggcccaattatagggatgagtttgggctctgttcctcgtttattgtttctggtgtgaagtgtgaattttttttccggtgttttctgggaaactacatggcccaaatctgtattctagaagatgaactaattaacaaggacaaatattttaccaagtacaataatctctgaactgaacttaaacctctccacaaaaggaactatacactatatagccaattagtgtaattgttaaaaatatatgttcatatattgatgaatctttatgatatatttaaaaaatgatcaattgtacaaaagttatttagtttttttttttataaatatagttgacatattactattattttgaaaaacaatccgaataaccctagttactaaaacaaacaagaaacaaaatatatgatcaatgagtatgagaaggtagtaccttcctcttggaactctacaaactcgttcataatcattaatattcatattcacgggatggtgacaatgttcttgtgcattgttagcacatgcatatagccgacactgttgattaactgttgaaatggcgttagaggatatttgtcatatggtatctcgtccctttgttcactgttggcaacctaaactcaaataataaaaaagggttgttcttcagacaagaattacgatctcttagttacttgacggaaattttctcccggcttttcttgcatagaaacttcgtaagtcatagaatatgcaatacaaacttatataatttgtcaacatatacatcaagacttacatcaaaaagatcacaactcacatctttaagtaaaaacttgtctgctaacttcacagtgtgactttcattatagcctactgtggttccctgcataatatacagttttacctgaaactccttaacaatatctgtgttgaaaaaaatggctccaaaaagaaccaaaactggtaacaagttccccacattttttattcgaatatttttatatgtttaacaaagccatgagtttttggtttgttcggcgcatgtggttatgcatgctttggtttgttctatagttcatgggttcaaatccacccttcaacattattattattcttatttttaaaatgcttaaaacaacatagttttgataatttgacttatactgtttctaaaatctatacacgaataaaggttatacgggttacttttgatattgcggtattgaattgcatttatttaaaatgaaaggttaatttgtttgttttttttgcacaaaacccaagttataattatatgtatagcttttattaatggtgctttaaattttgaagtgaggaacaatgttataaacagttaccaaattttgcaatggcattaacaaaaaacactttaaatctattgtaactaaagaaagatgaaaaaaaaaagttgataaaatactaggactcatgcataaggctgattcaagaaactgtaggcccattaaacgcaagcccattataaacattaggccgatccttatctcattgtttacggccatgtccctctctttttctctgaagtggatgatttaacctgtgtcaatctatcttttcgaatgctttatctgatgtttgatttccgttatagattaaaaggagaagatgatgatgaaggcaacgcggcagcaagctaaggccgtaacatcggtcttctgggatatcaagacgtgtccggttccctctgagtatgatgctcgtctagttggtccgtgtatcaaacgacatttaaagaatttaggctactccggtcctctcactatctctgccattggcctattataaacgacgtcctgcgagccgtctcttctactagaatcgttctcaatcactcctacttccgttaatatttgttgtcatctttatataatggatattattttccttgagtctcaagtcttttaagtctttttctgaaacaggtcccacaggcgttttgcaaaggctttgaaaatttcactacccatctctctagtcaaaaacatgaacagatggtaattcagcatcatcctagttagccattttttgagtcaaacaagctcttaccacaactagtttccctttgggctacccagttggacaaggatgatgtggctgtaacaacagtcttttgggatatcaataggtgtcctattccccttgactgtgatccttgtcgggtcggtccggcttttagacagtatttagaggatttacgctactctggtccgctcaccatctatgccattggccgactaacagacatctctgatgacatcctgcaagcggtaattatgcttccggatggactttttgtatcaatactttttttcattgtctgatctggttttgagtcaaaacattacatcttaccacttgtagtttccctttctcacttgtagttttgtttgccttaatttgaacctctgttatctttttccactgcatgagcatttggttttcaagtagatgaagccctatattgggagcgatgaggatgaggaagacgaagacactaatgaggaagacgaggagtaagtaacttcaagcttgtgcaacgacattaatctttttttctctgtatatgaccattaagagccattactatacatcaagaggcaccatgtttttgtttgttctcttggccttggtcatggaatataagcattaacaaccttagtaatagaaaagcattctactcttgatcaaacaaactcaaaattcaagaaacgcttccttagatcgtaactctaatcgtcgggtgaattcacatttcaattgagatcttaaacctatgtttaaggtatctgataaacttgtctatcaaatcttcatgataattgagaatatcaactacctgcaagatatattagaaccaaatttatcttcttctctatagtaatactccctctacaaaagtatagatatagccaaaatgatataggtggggcctacagatacataagcagtggccagtgagttgctctttaacaagagagataaacaagcggtcccttctcaagactcaaacaaaaaaacaccaaatagatagtgtgagactgtgagttatatcgtaccataaatcatagttaagagaattggttagataacatgcataaaatgggagttattttaaaagaaactggatcaggaagtttaggagtaatgggtaaaaataggaagcaaaattgtcgaaaaaattattgaataatagaagggcataaacattacacacacacatgcacacaagacagaaaacatgagagaggtaataaaatagaaacatcatcttaaaaatgtcaaaaaaaaaagagagggattgattaagtgagaaagattcaaatagagttggtgtcataaggtaaccaacccaacatgtaattattcacacttggtcctgctcccattccatcttgttgcccctgatacctgctccataaaatttagtagtttgagatactttcttaagaaaagcttataatagaactcaaatcaaattggttatactagtctaaagttacccgatctgaagaatgggttcacattccaaaggctggaagaaagcttgggagtgttgttgttgttgatgatgatgacgaccgtagtgatcaacctcttcttggttagggttcagctggagtggcatctgatacccatcagctaactgtcacatatgtatatacacacacacattataaccaaatttagtgatgcattaatttggtgatatgagaatgtatattaattacccttagtcttagagttttatttgtctcagtcagcatgcgttcctgctccaaatatttgtgttttcttggttacattacttttagatgaggaatttagagaggagaatgagtgtttctttatttaccttactctgaagatcgttgagctggtcaagcataaactgtgtctgcagaattaaacaccaaatttaatcttactatggaaatagatcagtgtataaagatattgatgaacaaagtagtaccctgagagctctgatctgcttcaaggaagaatcaagctgtctctcaagtgactcaagctcctttgtacttagaggtccaagatcttctcccaacagattcctatttcaacatcaaaaccatcaaaaaaatctactaaaaaaacaaacactctctgaaggtagctgaagaagctaattagtttacctttgggttctctgtaaggcgtcataacgctccttaagcttgagatactcctgctggctactaagttcctgaagtatatgacaaattataacattaatcatttgactctaaaaatcaaagtaaaaattgagagtaattaattaaggtaattagaagaaagagaagagaattgggtacaactgctaaggcctctcttgaaggcacattgggttctggtgctccatagttacacttttggtacctctccagtgtccgaagcatgcttcacaccacacaaaaacatcatttcttccattaatcttactcatcaagttcaaaacatgtttttaaaaatgggatttttaactgtttcctagggtttacaacaaaatctgttagtcttttaagagaagatctaaagaacccagaaaaaaggatgaatcccatccccaagtatacatatccaacggactttagatgaatttgacattagcgtcaattcaaaacccaaaattggaaacccctaagggttactaaaatggattgtcgtggaaacaatatccccctatgaacttatatcaatctgacaacaaaattgagtgatttgatcgaattggacgacccccagaatcaaaaggtggaaactttaagcttatgtgaattaaagagtactcacaagagaaattaaccctaatttcatatcagatagattgttcttctctcagataatgtgaattaagtagacaaacaaataagcaataaaatataagaaaaaaaactttgatagatgtaaagagaaatagaaaaaaaatcaaaaacaaaaatggaaatcaaagagaaacacaaaagaacatcaaaaaagcaaacttgttataaaatgatacagatttggggtatcccaaattttttttcctctttgcttcttttaaaaggatatgatagaacacgtacgtacgacacaacaacacatcacagagagacccatacatacaagacatttttgtgttacttaatatgtatataaaatgtttatgttataagtaatatatatacaaaagtagatatatacctcgaactactgcaaaactcgtacagctttcctctatttgagaagatgatgagagcaacttctgcatcacatagaactgaaagctcgtatgctttcttcaaaagaccattccttctctttgcaaacgtcacttgcctattgatcttgttctctatcctcttcaattctactctccctcttcccattttctttttctttctcctctcccaaaagatatctcaatctctctctctctctttccttgcaagcaattctatatatatatgagcctctctctttctttctttctttctttctttttttctttatattttttttatctatcttatattgctttttaaagtgtacatatacatttgtacaaatctcacaacacttctctcaaagtacatataaacatgtcagcttcattacttgaaatattctctttctaatatactctcagactcaactatataccctccaattattgtgtaccaaagaccctcataggatttattcaaatattgcaaaattgaaagaaaaaatgttaattaccctatccatgcttagatattttcaaacctaaaaatttggtgcatttttgtgtttatacataattagtaaaggagagaaattagagttccactctcaccaacactttattctagctagtggtttaatttttcaatttcagtccatatttagtttagagaaaaatgtgattctgccaagaaagtttgatgcttttttacttagttcatcgaattatagagattaataattgaaaatcctacaaaaaaccctaacatttaaaaccatttttatttaatacgttgagagagacagagatattaaaatcgtatgattcgtaagagtgtgatgttgaaaatgagagattaataatggaaggtggagatggcgcgtgtgcgatgagtgattgcaaccctaaacagaaaatagtagggcaatgaatgagtttggacacgtgtcgacatctcgatggtagggtctgataaatccacctgatttttttatataaaaaattttgattttataaatttttcttttttacttataaaatcgagttcagggaatcatgtgacctaaccttaactaggtgaagcctcgtacgattttcccaacttacggaactacccttgtgattggttaaaaatgtaaagtaaaacactactcgtttgtgatgttttcatgatatctaaaactcttactgctagttttgataaatcttactgctagatttgcttttccttttccaatctatagtactgctaagattatttttgttagtgaaattaacagaaatgtcttttgtattagtctactttataaaccaccattttgatgtggccaaaaaaaaaaccatgttgataaattcagtttggtaagagagtctgatgagacacaaaaaaaattatgggaaagaaagaaaacataaatggataaaataaacagagatttgaatataagatatagtttattttggttatcttagggttcgtccgatgttagagatcatgtctgaccgaaagtcttagtgctttttggttgcagacgtaattgctttattctgaccggtaagtaggtgatggacacaaaggtatgattcaattagaaaaactaaacatagcattattattctgtttggttatatttaaacccattagcttcttttctcttttgatttgcacattgaatcgcttattaatctcacttggtcatggtctcatagaagcattttaagcaaatttgcacgagttttatatattgtcttcatgtgggactcaagatttatgatattttaatttgcttcaattggttttagataaaataaaattaaatatggttatataattataagttacaatcaaaattagttagaaggacgtatgagaagaaagggaagggcaagtacgaattcacttgttatcagatctggtcgtataattcaatgtaagatgatgacaattgatcgagatgatgtgcattaaaccaaaagagaaactaaagtacattcaactatttatttattgatgtcataccaatgaagttaaaaacatatatcttctatcttttccttctctttttgtactctttccttcgttttgtgatcccccaaaaattttcaaatcttccccattgataatatatgtggtgaattacaaggtatgagaccaacaatgatatatactatatttagtttttaaacggtttcaagtgtcaaacatttcaagaaaataaaaaaaaaacattcttcaagtctctttaagaattttcccaaaaaacaatctgtaaaacatataccattagagaaataaaaaaaacttagaaatataacaatgatgtgatataaatatttttgggataattttactttccacttaattgttacgtaaagcgtgaatgtttttccgtatttatctgtaccatataattttaaaattaataaaggttttattcagtttaatttctacggttctacctaattgtgtacatataacacgtaattttgtttacctatttagccatctatattatactacttgataacaacacatcgcatcattatcacattatcatttacttaattgcagtctatgccaatgttatatacaccgaattaactcaaaaaaatctagatcttgtaagaagtatattcgtaaaagtggatatggccgaataaatttcttagtctaaagcataagaaaaaaaaaggttagtaagaaagaaagaaagaaagaaagaaagcacttggaaatactcttttggctttgggatcatatgccctggatggagcacacacaggtcccatttggatggatggatcaaccaacgatgagagatccaacggttctaaagaaattctcaaaatcaaaaatgctattacacgtaggaaagaaagaagaatctcgatgtgaagctaaagagacgacggtgatcgataggggaccatatcaacttgcaatgtttgcactacaaactagaacaaataaatgccacgtgaaatcctacacgacagctaagttgcggagtactggtgatatatgtggtccattgggcgtgagatgagaatcggacggctttgaggcaatgtcgtgaagggtcgaagaaagaataagaaccgttggattaatctgctaaaaatagacggacagggtccacgtcaagacgtaatgggaaggggacctcgttacccaaaatagaaagatggagttatcgtcaaacaagtcacgtctgggtttattgagtggggttaagtttttggaccagtctctctactttttttttcacccctcctctaatatatagtaagttactgttgtcatagactcttagtcattatgcattttaaaggttttcacttttcagcgtgcaatgaaaaatttggttcataccttatgccgtaaactactataatggattattatgttatttaaaaactcatgtagatgttatttaagtgttgtatcacttatgtacacactaataaatttcagattcataactaatatataagcactcaaactagttaacattttgtcatttgattaagatagtgactgggagtaaataactttcatccttgtaagttgtaaaacctcatgacaccattaaaaccatagtttagatgcctaatccaagataaggatagcatcagaagagaatatatagtccatcgaactagatttggaggagtgttgaagctagtccatcgaactagacttttgacagtttgatccacttttttaaagatttgagatagtagaacatcgtagttgagagtgaatcttgttaatcttgtcaccgtttcacgccaaagttcgtagattgatgaatgccaaagcaggttgaggatatagcacctggccttaggtatgttttgggccggggcgagataaccaagtacaaatgtacaatcatcctcttgacaagaaattttgcttagatttttacatatataggctgttagaaaagagaatggaataggaaaccaactcttatagtcaagtaatgatatagtaagaaaaacaaacatacaaacatatgggcctcaatcactactcataaatccttaaaaaaatgtgtaattatacactagtgaatgaagctttaatagaagtggtcagtggtcttcattttcattttaacacgtagaggcgtaaggcagttgctgcacttggcttcctttagaaccggccatgttaacatagcattgttatgattatgggaaccatatgtttagaagtaagtaagaggatttgagattatatggattaaaaaaatgagacatatttgggctctatgctacatgttgaattacttccattttcaacttttttttttgaacatgtgagggtgagatcttttatcttcccactttcactacaaataagtttaattaaattgctggaaattgattgaataatcccttagctagtgtgcctctccaatatcaattgacacatttcaatactttttgagacataagatatgacagtggacttcactttgttgttgctcaagtatgtcttaggtgaatgaatcgtccaaatttgagaaaacttgggcatttgaatcatccccaaatgcccaagtgattttaataatggaccaatttgtctgtctctattatgaatttatgatccgtccggttattgcctcctaggttttaaaacgaacctaatcgtgatttagaccgaatcagaccggacatttcggttcgggttttagaagcaactctgttttgttgcctcaacaagcgaacaatatagtcgcacgtcgtatctctctcgctgcctcacttcatcgtcccaaaaaacgcctctgtttcaccggtacgttcctgcagctctctcttaccaatactctcttagatattctcacgcggattcgtttgccatcttagttcttcgccgtataagctcgtctctagccatggctcttccgctcgggaagctcaccatcctcatcggtgcaggtcggtacttttatagggtatttcttgtagtgactgtgctctagttctccattgcttttttattggtttcgtctatgggtaatcgcaattagaggataagaagttagtgtttttcataaaccctttgatcagtgtacttgactggctcaaagtttaagactttattggagtatagctattctctgaatacatctgaggagaagtttatgtttagtttctctgtgaatgcacctactagtacaattattgtgaacttgctgagtcgattgatttcgtgtacatgcttaatgttcgtccaagttactgcaattactaactatactgtgatttttgcaaatgttactttaaggtcttattggatcagcattttctaaagaagggggcttaccagatgtctccaatttggtttctggtgcttttaaggtattctaatttctatattgtgcaaaagctttggcgacttcacatgtgtatgatgcggtttggcaaaatgaggcaatgggttttgtttatgtggacagatggtattcaggcaactgaaacaagacgaacctagcaaatcagctagcaaaccccacgatgatgtacttgtggcccaggtaagtttcacattaatctattggcgatgataagctatcggatggagctggataatatagacttgctgaggacatagatttatcgtgaatcaatagtttcttgcctgagctctatttatttttgtaggttaacagtcttaggcatgagatacagttgctggggtcaaacagacctatcaccattgtttcaccttcaggatcaggtcctctggagtttttatatttttttatattgaagttttgttttctgttctgcactagaaatgtcaaaattggtttgatatgaaacttgaataaaggatttgcacacttagatttctagacattgtattttgaaattatatttcaggttttattctcttttgctacttttctcgcatcaaacaagacatactttgttctgataagtggcttttctttgtagcatttaggaaggcattacattagagacttagagtaacaccattctttgtttactgttgatctaaattcggaagaaaacagttaacactttccttcaatgtacaggtggtagaaactatggtttgatcattatcgttggggtgataggctacggatatgtgtggtggaaggtaattatacttcaccatacccaagctactgaaattagttacttcctcatttgaagcgctgttggctagtcaagattttgtgtgtttgggaaacatttcatgctgttctccttgttaatgaatttgacttggtttatttatttgtagtttctctctttttggagacttactgcgcactaatttattctgcaacattatcagggctggaaacttccagattttatgtttgcaacaaggcgtagcttatcagatgcatgtaataatgttggcaaccagatcgatggtttttactcatcactcaaggcaagctctcgagcactcttattcactgttcgcttacttatttgtcttcatttgaccactgaactctattcttttcagttatgatggtttctttcgtgagcgaatccatccaaatgatctagtacaattaagtataattcaagtgcataagatcaatattttgtctcattttgtttctgttagcatttcatgacagggtacaaaacgagagttaagttcagaaattgatatgatgggtcgtcgtttggatgcaaatacagaagtaattcaagaaacaatacaagaggtatgtagattgaatgttgacaaaaacttctgtttcactgcagtgtcaagactttctgatgatgattctaactgttttctttataatatatcataatgtttaggtggctaagctacaggatggtacatcatttataaaggatgacgttaaggctgttttcgatgcttttgaaaatctggtgagaaaattcattgattgcatatgttcaccagtttgttctccctacaaaaatccaaaaaaaacaaaacagagaagtgatcttgtgatcttcataattttcaggcaagcaaagtgtgtcgtatagagggaaatcaggtaacagttgtagttggaattttgttttgctcattaggcagttgatttaatttaaatttcttggccatccataaaggatatcacacttagaggagttggggctctgcatgctcagtgtcaggagaaccaaagaattcaagagtccaataaggcatgacccttctccattgtgcagtttattttaaagaaaattgctacatatacatgttcatcttatttacccagacttcttttataattaggctttgccatcaacttcatcactgccagcccttgaggcagctcctatggcaccctcttcaaaggtaaatgacttcagtcttttatctggtgtcatagagaattttaactgttcatcatgctatcgggatcattaccgatcttgttctgttctattacttacttgttctggtgttttgatgtaagcagactctgtctttacctcctgcttctcccgatgaatcccagtccccgtcaacccctaatgtagctcaaaaggtttgttctctctcaaaccagaggttgttgattagaaacaaaatttcgttatacagagttctgacatttgttttggacagtcacggggcctacttcagcacactcaatctatgtctggtttgaaggtaaagatttttttatctcttccatatcccttaagttttgagcatcaatatgcgtcaaacttaacctaatacaattgtctattcattcggttcttaggacataaatgaaagctctagtagccacaacacgtcttcaaatggaatatattttgggggaaacggtgcatcaggatcgagttcgggcgtgcttggtaggttctcaatagcaagaataatgaggactcgtactgtggtcaacacagtgtctactaactgaagagagagtttgttttatctaattattaggattaacaaagaagggggcatgttgtatctagtagagtatttgaatagattttgcttcttatttttttttttgacaatgctataaatggtgcataatttttttaagaatgcagcttatatttgaatgggtttataggtcacaattagcagtttgttactgtttttttcgaatacaagaggtcgacgatagtttctttgattaggtatgttctgttgaaggagcttttggataatgagaagaggttaaaagttaacttgcaggaacatgagcccaaaatcttgctggaaacaactttcaacatgtctaatggctactatatctcttgctactataatggtcttgtatcgtcccagttactttgcttgttttaaagcataatcacatcataactctcacatttaacttaataaaagatgagatgatgtttctaaaaaaaaaaaagaaaagaagatgagatgataatgtcatagccaaatggaccagccttttattcaatacaaaaaaaagaaggaaaagtagagacggccatacaaaaccatcgtcgacctctctgtataaactgaattacgaaagggcagagcaacatactgattaattgtgacatataatccaattaaatataagctgcatccctacaaaaattatgcaccatttatcacattgtctacactaagcaagggatcaagcatagacgcagcatgatctattcaaatcctctactagcacttaaccatctctggcttgctgatcatttgaatgatcaaactctctcttcagtattgacagacgactattggggtccaatggagttagtaggcactgtgttgaccacacttcgagtcctccctattcttggtattgagaaaatactaaacaggccagaactcgtgtttcccgtagtttctccagaatgtgttccattttcgcttatctcctgagacccaagtttataaaagatagtttcaggttaggtttgacccatactgatgtttgagacttgagggaaagggaagagggaaataatatttaccttcaaaccagacatagattgagtgtgctgaagtggaccacgtgactgcccaaatgtaatgtcagtattcactcaaaccaagttcagtttctaatccaaaactctagtttgagatagaacaaacctgttgagctccattagaagttgaaggcgactgagattcacggggagaagcaggaggcaaagacaaagtctgctaacattaaaacaccacagaggaataagcaatagaacggaacaagaggtaacaatcccaataacgtgataaacagttgaaaatcattgtgagaccagtttagtcatttacccttgacgatggtgtcataggagctgcctcaagggctggcactgctgaagttgatggtaaagcctatacacaatagaagttggggtaaataagataaaattgtagattatgtagccaatttcctaaaatgcactgcacaatggagaagcatcatgccttattggactcttgaattcttttgttctcccgaacctgagcatgcagcgccccgactcctttaagtgtaatatcctttatgaatggccaaaaaatcaatttcgatcaacaaatgcctaatgaggaataatttccaacaacagctgtgaagttttgtacctgatttccctcaatacgatagactttgcttgcctggaaaacaaagatcaccaggtcatcatctctctttattttttttagggagaacaaacaggtgaatgtatatgcagtttactcaattttcttaccagattttcaacagcatcgaaaacaaacttaacgtcatccttaatattttccgtacctctttgtagttccatcacctaaacaattaaataaattatcaagataacatttagaattatcagaaagcccttgacaacgcagtgaaacacaagtgtttgtgcacattcatctaacatacctctcgtcctgtatcttgaataatttctgtattagcatccaaactacgacccatcccgtcaatttttgaacttaactcttttttggtaccctgtcatgaaatgttaacagcaacaaaatgagacaaaatactgatgttctgcaactaaattaaatacaggtactttatcatttggatgaattaggctcacaaaaggaactatcataactaatatgggaagtaagaacttgccgagagtgatgtgtaaaaaccatcgatctggctgccaacactattacatgcatctgataagctgcgccttgttgcaaacataagatccggaagtttccagccctgagaatgttgcagaataaaccagttcccagtaaggttttttaaaaagggaaaataactacaaacaaataaaccaggtctaacttacaaacaaacaagccaggtcaaattaattggcaaggaaaacagttaaattgttttccaaaatacaaaatctagactagccaatagcactctaatcgagtaagtaagaagctcaagcatggtgaaatattattaccttccaccatacatatccgtagcctatcaccccaattataatgatgtaaccatactttttaccacctggaaaattgtaaggaaattgttaaaatggagcagaaaggaatacaaaacttccaacattaaatctctagaggacctgatcctgctgtggtaacaatagtgataggtctgtttgaagaaagcaagctcaattcatgcctaagactgttaacctacaagaaaaaatagagataagacaagtaaatctaagtccaagtcctccacaaatgtatcttatccagctaaatttaataacctatccacataaataagtagcttaatatcaatcaaaacctgggccattagtgtatcattgcggggcttgctggctgatttggcaggttcttcttgcttcagctgcctaaataccatctatcaagagaaataaaccattactccatttataaataaacatcataaatacaagcttttgcacaacatagaacttagaataccttaagagcaccggagacaaaactcgagacatctggtaaactcccttctttagcaagtactgacccaacaagacctaacgtaaaagcaagtgaattgaacattaagcatatgtactaaaattaatcgaaacagtaagacattaaagggtaaattcatcatctttggtgcattcacaacgaaattaaacataaactagtctccaataacgctgaataatctcccctaacacatacaagagagtaaaaactgttcctttgttcaatttctgattggtcgaagaaacagatgaaaaccaaaagtgaagcacactaaaaaaatatcaaaagacttgaaatttgagctgaagaagattcgatgattgaaagacagtgaagcaacagtgatcattataaaagggtttatcaaaaaccctaatttctcatcctctaaatgcaattccccatctacgaaacaaatgagaacccgagagaggagtacgagcaccgatcaattaatcactaaaaaagaaaacccccacaagagtactgacctgcaccgatgaggatggtgagcttcccgagaggaatagccatggaagacgaaaactcaatccggcgagcttgtacgacgaaggattaagatataagaagaagacgcatgagaagatctaagagagaattggtagaagagagcagcgggaaggtgccggcgttaaagatgatgcactcttgcgacgacggagatagagagagagagaaagagaggcggagaggagagagaatagagaatagagagactcaaaattgttttgtcgaagggacagtgttgtgttcctcaagtgacttgacatacaatacttttattttattaattttcttattgggcctagaaaaaggccttagaatatgctctaagaagatgcccatgaggcataaggttattgagatttgagactttgaccaattcgagataacaaaacaacttgagaggctgagagcagaccacacatgacattacaaaggcgtttttgctagagttataagcttcaagaagttgtcctagtaattaatagtttgtttcatctattccacatacatatgataggtcgcaaatgtattattaaccgtcgacgtcctgtgcctatctacctcataagatgctcgagtttcgatagatcttcttcatttttataccaccaaaaggaccaaatcttcaccggaaaaaaagcaatacaagtccgaaatagagtaacatgaatacatgataggaaaagtgtttccttccccaaaatatctaaacgagactctctttggactttttcgaagtgcctaatcaaacaaagacacatctcttttggcccaccttccgaaactaagacatattcaaacatacactcttcttttgaggttgttaccaccaacccaaaagaagaaagaatatgcaaaacctgatgcaaaatagcacagtttttcaactagctaaccaataaccatatactcttattttgaggttgttcttccgatatctctatcttcttagctctcttcttgtttttcttggaagtgtgggaagcagagatctcgtccctggtgagatgatcttcaaaggcttctatgatctggttgatgagctcacggttagacgaagaatcccatttagaccagtaacttgtgtagcaatcaaaacattgacagtcaagcagaggagctttatggcttctcttcttcttgcaagatacgacgttagtggtgttgagtgacctggtgattaagtaagcaagaacttccagatcttcggcggagagaaccgagactagaactagaatcgcactctggagaagcttaaagacagaaagagagtcatctccattcgaagaagaagaagatggaagaggaggagatgggtgcactttacctttcttcattactttcatggctgattttgaggaatctttcttttctagatagagagagagagagaagcagaggagagagttttctttgctgcgattattgtttctttccttaatggctttcgcagataagaggaaacagagtatagagccttttttcatgtttatgtatttcaccctcattaatcattattatgtctctcgctcatcatatacatgcatgattttttttttttttttaacaaattcaatcaattcacaaatgagctaaatcacaatagctccagcgaaaatgcatgatttttaaaatgcttctttcaatgatatagttttattgtaatggaaaaatatttagcaaatagattataaacttacatgagacaagtataaataattattataaacttattaagtttaagatcaaggcttttgtgcaatgtatcaatgaatgttagatgtgatatgatgaaagcaatgttttaaacacatacatagtcattgatcggaatgtgtgttattagaaatgcatgcctaagccgatagggttatctatgtttggtcttggacattatagccaaatttcgaatctaattcttccaatatatatttttttttttttgcttagggccactactagtattgcttatcaattttaagagctcatgaaaatgcaacaatatagtagttgcaaatccttgtttcaagagaaatcaaagggccacttgtgaattgaataataataatatttgcaaataacctttcactaaaccataccaacaaaaccacacagatttggcaaagacataacctttgggagacgtgaaaaggctcaaaatttgacaattgtccttacaaattcgctcattagtgcaattgtgagatttgtttgcatccaaatccaattcataactcacactcgtctcaaattcgaaaaatgtcgtctctctcctgccctacctaccgctcccgcacttcgtcttcgtctcctttcttgtcgaatcatcatcattcttcgctgatcaatgttgttgacccacgccgctcactctccttccactacgcttctcctcaggggcttaatctagctgagctctgtgttgttagatcgcagaggaggtccgttcagagttctgttgtcgtgcaagatggtaactttaattggattctcaattgggttttcttctttatgccttgctttgccggtaacttgaaagcttgtatatataggattgaatcctgtagttcagcttggttttagatagattttcttatagaaagtatccgactttagacaaaacattgcatgtaatgaatgttctctaatgcgcttacaattgtgtgtttaggatcagtagccaccgagtcaagctcgtccgaggaggcgaaagatgtaggggtgttaacgattccttcacttgaagctgacaaggttgtagcagagtctgatggcggtgaacaactttcaacagttagtatcacggtggtgggagcttctggtgatcttgccaagaagaaaatattcccagctcttttcgcactttactatgaaggctgtcttcctgaggtataaataacttcttctatctttctctctttctgatgattgattgttatattgattgatgtggtaagctgtttttggtcgcagcattttaccatttttggctatgcaaggagtaagatgacagatgctgaacttagagttatggtcagcaaaacattgacatgtagaattgataagaggtgaataattattgtagcttttaaaaccaccaagacattagtccttatggtttctttcccttggtactttgtcagagatgggttgtttaacatttaactgtgatggttcagggcaaactgcggtgaaaagatggaagagtttctcaagagatgtttttaccattcgggtcagtatgattctcaggaacattttgttgcattggacgagaagctcaaggagcatgaggtattgatgttttcctcagcttattgtttttttctgcattcctcatgaattccttgcaaccacattgcatcattgcctcatttttctgaaggctaattgaggtcatgagttaccttggtaggtgtaaggtgatatgctgtagattatggcctgaatacagaattaggaaaactattgttgtttctgaaaaattagtaaaaactagaaaactttggtcttcttacattttttctttcttatttgcccttatccatcacataactatttgcagggtggaagactttcgaaccgtcttttctatctttcaatccctccaaatatctttgttgacgcggtgaaatgtgcaagctcatctgcttcatctgtcaatggatggactagggtcattgtcgagaaaccttttggccgggactccaaaacctcggctgcattaacaaagtctcttaagcagtacctggaggaagaccaaatatttaggtggagagatcgtgtttatgttattgtaaattttagtgatgatggtttaagataccttgctgatacgaaaagttgatttttacaggatagaccattacttagggaaggagctggttgagaacttgtcggttcttcgattctcaaatcttatatttgaaccgctatggtcaaggcagtatataaggaacgtgcaattcattttttctgaggatttcggcactgaaggacgcggagggtaatccttgttgtcctctgtctaatattttatttctcatgtgtgttgaagcctatgttttgacacttttctactcttcaaatccaggtacttcgacaattacggaataataagagatataatgcagaatcatctgcttcagatattagctcttttcgccatggaaacacctgtgagtttggatgcagaggatatcagaaatgaaaaggtctcctattgttccctttcttataattttgttgatttcaaggcagtattttgaggtcctcgcattaattcaggtaaaggtactacgttcaatgagaccaataaaacttgaagatgtggtgataggacagtacaagagccacagcataggaggagtcacttatccaagctatactgatgataaaactgtgccaaaaggtagtctgaccccgacatttgcagctgctgcactcttcatcgacaatgcaagatgggatggtgtaccttttctaatgaaagctgggaaagcactaaacacccgaaggtaccaaactttggaattttttttgcaaattttctggtttgcttgtaataatataaatatatctattgaaacagtgcggagataagagtccagttcaggcatgtgcctggaaatttatataaccggaattctggtactgatcgtgatcagaccacaaatgagcttgtcatccgcgtccaacctgatgaagctatctatttgaaaatcaacaacaaggtccctggtttaggaatgagattagatcagagtaacttaaatcttctctattcagcaaggtaagctaagaaataataaagacaagctgtggtgttgttttgtatatgtaatccttatgttcttttttgcttatatctagtttcacataacttttttctgttgaaggtattcaaaggagattccagatgcatatgagaggcttttgttagatgcgatcgaaggtgaacgcagattgttcataagaagcgatgaacttgacgctgcttgggcgcttttcactccattgctcaaagagatagaagaaaagaagacaaccccagaattctatccttacggcagtcgtggtccagtcggtgcccattatctagccgcaaaacacaaggtccaatggggagacctaagtcttgatcagtgaaagagtggaagaacattttttgttcatagattcacgtcttagaattttcattatttgtgtggtttatggaaactttctttcgctttcagagataggagtgagttttgttcgattttgtatctggaataataagtaagaactaccctattcttgccaccctttttgctttcaataaaggaaacacaaatttaagtgtagcctctgcaaagacttgaacaacatgatcctctatacatcacataccaaaaagagagaaaaaatactggttagagcctgtgttcttgatcttggaaatcgcctgaagccccttctggccattccaggaacttatgatgcagaagagacggaggtagatatgtctgacctgcagcagaagaaggatcactgggaggatatatatactcttttccatagccaagttccttcattaacttggttggagcgttcctcaggtgtagaggcaccccttcattctgtccaaccgagtctttcacaaccttctgtgcagctccgattgctcggtaaactgcaatggatttaggagccagtgccaagtaagcagtgcattgggcgagaatgacattgcattcaggcatacccaagaaatgtgaagcttgatagcacgcaactgcctgagtaagagctgaagggtcagcaagtccaatgtcctcgcttgcaaaccttataagtctccttgcaatgtaaagcggctcttcaccaccctcgagcattctagccaaccagtagattgcagcattagcatctccgcctcgcatagacttgtgaagtgcgcttatgaggttgtaatgttgttcccctgccttgtcatatgccaaatgtttgcactgaagagcctccttcgcatcatcaatagacacaacagcatcagttccggctcgagtggtagccatggtagctgagatttccaaagcattcaacgcgacgcgagcatcaccatcgcagttattagccaagaactctatgacagaatcatcaacctcaacgctattggggagtcctctctcggaatcatctacagctcgtctaagaagggtctcaacatgattgggtttcaagggattaagagttagaactctacaacgtgagagcaaaggagtgatcaaatggaaagaagggttctcagtggtggctccaatgaagaggatactaccatcttcaataacaggcaagaatgtatcttgctgtgacttgttaaacctatgaacctcatccataaacaacacagtcctctttctaccttcaagattaagccttttggcactctcaacggcgtctctaacatctttaactccgctcgtaacagcagacaaggaaacgaagcgatacagagacgggtccttagaggaattgatgagagactttgcgattgaggtctttccagtgccaggaggaccccagaagacaatggaagggaggcgattggattcgacggcggaacggaggagagagctgggagagaggagatggtcttgacctacaacgtcatctagagtgcgaggacgcatacgctccgacaatggctggtgttggcggtggctggatgatgagagcttgtgacgcttgttggaatcatcagccgcgacgtggatttgggttttgggattggggcgcttgctggaatcgtcacccatggcgggggctagggctttgggatggagacggaggaagcggtcgagtttgggctgtaacgtggccgtggattgaggggaagaacggtgggagagaatccagtcggtggctttctggatggaatctccgccggtggccgttaaagcctcggcggccaaatcgctggagaaacccatgctcactagctgctccatcttctacttctactgtgaaaaacaccaaagctgtcttagttagcaatagcatgctccattgactaaactttgttttgtcatcttaaagataaaaccttcaagtaataagaaaaaatgtaacattacgaactagaccatttctgagctaaaaaaccaatttcattttatttctgtgttccgatgtgatggaagatatgtataatcttctgtctgtaaaaaacctatacgcctaagcttgagaagctaatctttacatgtaaagattttgtacaaaaagaaaaaaagagttaaaaatcatcagcacggtggatctcgcccataatgcgattgctagtgactttgaaaccaagaagagctggatcgatctgcctccctttcttccctttcttcttcccgccaccacctttgcttccttctgttacatcatttgactctgccgccaccttcttcatgctattactcttcttcaacatctcactgaacgatgtcgcctctgacgttgaccctttgtttcccgctgctcctgattcccgtctcacaccgcctgataatatatttgcttacagacttgagtcacattttccatcgataatgcccaaaaatacaaaacgatccttgagatagatatataccttcaattccactatacgaacttgctgctgtcctgctagctgtgtcagagatacgctctatcaatccttcatgcgatgatgaagaatgggatgagggaggcctttttaacaatactgaattctgtccatgtgatggaactaccaacctacaaacaaccacgcaaaatttaatcggcaggaatatagaggtatgcgagttcaaggtgttttgtatatctaatctactggtgcttaacgtagcagaatacaaacttacctatccttccttctatcttctccaaccaagttgtcactgtattggtctgcagcaagacaatatcaggataagccttcatagtaacaaagcaaaaatcaaccttccaaaccatgaattcccggaaaaagcaaaatcttaaaagatgcaattactctgaaagatacataccagagatatttaaagaagactgttggccaggcgtaacaacaggaagctccccatgaaccagtgagtctaatactgcttgcttgcccattctatcttgggcttcaaatgacatcatccttcccattccctcatttttaggcggcacattgttccaagttttgatgtcattcgcgtctttgttcatagcatacatattactgaaggcttgagtttcattctgagttgaccgcccaccatcaataattccagaaagcaaggaattattacggtgcaatgatcccatattgttcctatctccggatgatctgttgatctgttcatcagaaaatgctcgagcaccaaaagttgaaggagcgttatgactaccaccatgatctgaatagccgccaagtgtttgaatccctggggtaaggccagaaggagccatcctgtcaaaggattgcccacggttcatgcttggtgattcagcagattgatggccgggtctctggtggagcaactccataaatagctgttttgacctgtcttctgtagtcccacctaacatccatgagttggaatcttcacccattctcctactttctgacctcattttatgatgttcagcatcaatatttgatctatgaagttgagattcggcccagtcaccaacaacctgtgtgtcagctccagaccaacgtccttccattgattccaactgtgaaaaatgaggttcacctattggtatacggggattctgatgattaaaacccagagtagaattcccaatctgcatgtgggtagtagcatcccgcaactccagaccttgagagagtccaagaccatttactggatccagattcatccccgatacacttacaggtaaggatgctgatcgctcaaatggcagaccctgctcgaataattcttgtcgaagctgttgctgatataaaaggttccgctcaagttgaccaaactgatcctcgaagggtggcctctgctgctgttgatgaaagtctagttgtctaaatcctgtagaggatcgcgaacgttggatcccaggatgacttcttagaagctgatcattatggtcagatggccacagagggtcaatatgtctctgttcctccaatagtgtattgtgcctcactccgtttgccaattgcatcagctgctcttgctgcagcagttggtactccaaagaccgagttggttcagattgcagttgtccgtatggagattgcattggtccatattgagattgcatttttgttgaaagtagctgttcaagtagttccctctgatggccttcatgtggcaattgaccaaaatttccagcggcaagttgctcaatgtatggtgcaaaattttgtgacggatggccagaacttttctgcagttcattcattagctggtgttctaacaacatctgatcaacattgttggatcgagggaagtcatgtgactgcccaaaccttgaatcaggagtctgtccttgtagaatctgttgataatgtaattgccgagcatgggactgttgttgctcctgtaagagcttctgatgtaactgatgctcttgttctagttgatgctgttgcagctgcatcttctgctgctgttgcaactgaatcttctgctgctgctgcaattgaatcttctgctgctgttgcaactgaatcttttgttgctgctgcaactggagagttattaaataatccagatcctgagcttgatcacctatatgtgaatgcgacagcatatcccggttttggaattgctgttggttatgttgatttgatgaaagttgatccccaaggttaaagcggttggaaagatgttcaaactgcgacatccggttagaagccagaccatcaagggacatgttgggatcaacttgtgtatttcttcgggaatcaatgggccgattgtctattgcaccagtaggctcccccattgcatcataggacctgtttggtaacaggttaactggtacgttactgctctctagctcagaccacaacacaccaaacggatgcagcttattctcatgctgcttttgagtagcagccttagtggattcaacaggaatagcagactggccagaaacttccataaaagcatcatgcatacttgtagaggattttactgacgcataaccagaaactccagctcttcctgggaatacaatttctgatttagaaaaaaaagtacaaataaggttgtttagttatgatgaacacagaagagattaatatgaacttgaaagcttctatacatgtatatagaaccccaaagaaagacaagtgttctcccacacaaatgcacacgaaataagaaaaggtcaaagaacaaaccttcatcctgagtagagaagtccaagaaacttcggtcctcagtatgtggtggtgtcgcataaaattctgactcagactttctttgaaaattatcctgagctgaggggttgttatacactgaaaacgaacgagacgtgccattcatagaggatgaatcattagattctgctactggtgcaattgataaaccagtgtctgaatttgcttttaacctagtctcttctagctcactctcttggttactgatatgggcatgggcgctttctgtctttaaatatgacatgaccctgcctagatcttgaaaaggagttccttctggagcatttgccaagcgcacctgtaggtctgtcccaaaaaacccttgttcaaaccatgaaataatgtcagaaccaatgaatggtccctgaattactccttgaggatcaatatacaagaataagaaatcctcaggtggcatagccgcttctgactgatccacttcaacatctggttgctgcagcttgcccatataatcttgctcgaacgacccaacaacagattcgctcccatccaacacaggggacttagtaaaaactgatctaactgcttcaggacttccatgagaaacttgataaccagctccaaaagatccataactttcagaagccactgaattcaatcttgggacgctagaagctgcccccagacctccattatgactaccaagtaatcctacaacaatagttgttggacttttagacagaatatataggacataaaagtgcacgtaaactgataagaatggacgttatctaataaatacatgatacttaagaccaagacccggttaacacccatcatgcacataccggaatcattatttttcatggagccattgtcaccattcataaaccctagcaaagcaccatccacttttgtctcacctgactcaggtatgcggcatttcactgcagtacatacaaaagactaaggtcagagaggcattcgtcatatcatgctaggtggaaagataagaggccaagtaactagagacaagataacatacacagactgttttcacctaaggactcttccccagatgaagtgtaaacttcactactaatgatccttcccttccatatgccgttaatgcttgcctaatagaaaatattaagatacccgccaagaaacacaggaaaactcagttacaatcaagaaacagaaaaattgatgcacacctatgaaaaagggaaatggaaacaagttatcagtggggaccacacctcttcttcggtatcaggtgcgataaaagcaagaggttcgatcagagccacttgcgttatggaggcaacttcatccatttcagtcggtatcctacctagggaaggatcaggcttctgttttctatacatatcaagcaacttaccccttggataccgaaacacaggggctgaagcactaccagcaccaattaaggaagttgaagaacccctcccaatagtagatgcccttcctcggccaacagtgaaccctaaatttgggccctcagctcgtcctctatcaagtccaaacccaggtgcagtacgataagaagtaggcacaccagactgcgattccatcctatgacgtggcctccatttgtcacgagggtcagagtcccgttcagaagttgcacggacattgctaacaacagattgactttcactctgaggctcttccttgtccttgttaatctctaccttctcacaacgggcttctttctctttgtcatcaggaccccaccgagatgaccatttgttgtcgcgacggggttcatgtacagcagcacgagaattaacatcattccacctatcagaagcagcagtagttttaacttcaccagtttctctgcttgagacattgtcaatgcgacgctctgtttttcgtcgatcaactttcctagcaccgagtaaaccagtttctctttcctcttcacgccatctgcgattagtttcattctcagacacaattttcttccagtcttttttgtcttcgggtgcatccaagcgccatgcatccttcagatttgggtcacttggatttcccatgggcataggagtaggagatcgaacatcctacaagatagcaagaacatcagaagaagaattaaaagtaaaaagtttaagaacttgacactttctagatgcgaagaacagacatagcatcatctgatacaataaggtgaaaaaaagacaagaaacgtatatcatcattctagatgaagtattaccatcttgctctcgcttgatttcgtgtaaagccactgcggagacaacggaatgctgttatctgaggccaattctgcagaatagcataaacaaggtagtcaataggtgaaggaaatcagagatatcaaacagatacaaagtaagaaaaccactagtagatgcacaaactaatcattcgttcttaattccagatcccaaagtatagaataagaaacaaaagagaattccgtctctcgtattaatccaacatgaaggttctaatgcatcgaaagcggacataacaaggttaataaagatagattgaattcgtagaaccctaaataacacaagttaggtcaaaattcaaagctatacatggctgccgcatcatatggaattcagatccagaaactaaacgattacatttgtttctacgcaatcaaatcgatcgagagagaaggaaattcaaatatccaaagacagaaacaagtcgaagattgagaggaaagtacctttcaactgatcagaagatttggaaaggatgagatcgtcaggcagatcgaacttcccttcggccatggcaggattgaaacaacgggacttcgagattacgtatgaagaaggagacgaacgagcgaccgcagtagaagaagaagcaaaaagtagataggagaaagggttttggagagatttggcggagaaactttttgcaggttttcgatttttgcctttggagaagaaaagctttcgcgttgagatcgagagagagagatgaattagtgagtgaatgggcgacaaaggaaaggctaaggaggacttcgccaaaaaaaaaaaaattatcactgttattttattgttttgtattttaagttttattgttgaaacctctgatatgtatcttcaagattaaatatgatgaattaaaaatataaacaattatagtatcatttatatctcatgttatatattttgttaggatatattcatacagattgtaggtatttaaaatctttttaatatatttaaaaataaattaaaaaatctcttaactttatcggggaaacaaatatatagacataagtaaaaaaaaaaaaaaattctatctttaaaaaaggttaaaattaaggatataacaatatcaatatattaaactattaacgttaaatttattcgtattatttttgttaatacattaaaaaggtaataatatttttacccgaaaaaataaaatttattaattttattatataagttgaatattcttaacagagattggcatattacaaaactgtaattcataaaaccgcgttattttcaattaatttattagactataatacatgttttagaaaatgcctatcattttttttattttaaagatagtgatagagtggataaattgagatgatatttagatctaattaaaagtctatttcgactaatcgttgattaagttagaaaaaagttggataacgaacattttgtttatgtataaacaactcatatgttaaatcatatattacttcaaaattatgttttcttaattctattattttaaattttatacaatctgtaaagtaaaattttggggattaaaacccgaatatattataaaatttatagttgatcatttaaaatttaatatgatatttgtacaatggcaaaaaaaaacttactaacatttctataaaataaacaattatcgattaaccattgtataacgcatgtccttatctagtcacgcttcttttcctcaattatggttaccatgtaaatccaccaaatcactaatcaatattttttcaaaaattataaaatctaacaaatcaatccaaatatatattaaaaagtccctcaaatctctccaaatctaactttcatcaaatcttctaaaattcttagctcaataaatattgaaaaccaaataataaattattgataatatatattgataaataatatatagttttggttttaatatatttataatatatcgagtatcctcgacacactctcatccttcatttttgaatattcttcactaattccaaagaatgagtgagattaaagaactcgtgcgtattgatgaaagcgttacacgtaaatctacatctaacacaatggagatctaacgcgtagaaacaaggtcattgtagtatcaagcactcctcatccgttccacacccctcaccttcttttgaacaacatcgttggctttgatgtatgcaacatatatacttctctatgcagagctccaatatcccaacttatgcaacattatgtcctacaatatcgcttccgaagccaaacgagttcatgggccattgtacatctattttcacatcacattaatcccgcaaatcgagactccatgacaatcaaagtctaggataattcatactaggattaggaagtaatttaaaataatatttagattttatttatttgtatatatagatgatattaccttgggaattaactaagtttaaaatatattaaaatatatattttcacatattctacggtaaaaaattaataatatattaatgtacgtatagtttggttaataattttctacatttaaaaatgacttaagaatctggggtttaacatgatgaagtggtatatttgagttgaacaaatcgatcctctcaaagatttagtattttaatttgaatgttatgtgtggaacaattcgattctattaaagattagagttgaaatagatatttgttatgttattctctcttattttattttattttttgtatagtatagaatgtgtgggataatttctacttatttcctaacttagagtttagaacattatagtagttgatgttttaaggtaagatagataacaaatttagtttttgttgttttgaatgattattatcaaccaaaaataagatcaattagattttaacctgcggtacaccgcggagacaatttattttttaaagttattatatataaaaatttgcaaattgtatttatctataaaatatttttattttatagtttacaattgttattaagtaacgtcctgccaaactcgccccgctaagtctgtcccgtaaaaaaaaaccatttattttattaatattgatcttatttatgatatgtttatgaattattgtctatgtattttagtcgatgcgggacgttatttttcgccaattggttaatatatgttcattttttaaaagtcgaatcacaaaatatgacggaattttttttgagattttttaaaactctatatattatataatgatgttaaaaattgtgatatattaaaaaatttataagtttaaatatataaataataatatttaaaaaattaatattttttggtttttaggtaatgacataataactctaaaagtaaggatttagaaaatttaaatctttaattaaatattttcattcctaaataattaatgccagtagcatgacattgtaaataagttcaaatacaagatttatttatttaaacaaaaaacatttagtaagaataatatttatttaaacaaaaaactttgtttaaaaatattgttaacaaatacgtttatgctaattttaagggattgatgtgaagtttgtttagattaaatttaattaataatgtgattgacaatttaaatcacgaatttaaagtaaaattaattatttgggaatttttttttaatgctaatgacattgggttgtaaatcagttcaagtataggatttatttgctaaaatagctgcaaaaatgtatatgtagatatataataagtgtgtattagttgaagatttaattcttattatttcgtaatagtaaatggtgaattaagtgcagaatcgtccgaatttagtccgatatacaacatacctcacaccattcaaagcctaagtaagtaatttattctagtttttccatcatacatggactaggggacatagtctaaaatttcaaaaactaaaataagtttgttacttgattttctcaatatattcggcaaaatcaaaagatatgataattgaattgcgactatatttcatggaattcatatttcgtaaataaataaaacttataaaacgaaaaaaagttaaattaaattcaccaagatacatcaacataataatttgtgttactcttttgatttaatcttaataaagttagttgatgaaagtatttgaccaataagcgaaagatgaacaaaaccctaaacaatagatgactcacggaaaccaacgccgagaattccgtcgaacacttgagctgcgttttaaagttctccaaatggcgccttttgcctactaaaaaacctttaccttcttcacagagatctaacctctccttttcccaatgttcggcactccgtcttcatcgccgtcattcggcactccgtcatccacacccgcctttggcacatcttctccggcgttcggtacaccgtcagctacgcctgcgttcggtacgccatcgaatccttccttctcctccggcggatttggctcttcactcttctcgtctcccttctcatctcaacagccacagcaacaacaacaacaacaacagcagcagcagccgagttcactgtttcagcaacagccatcttctaattttggttttcagtcaccattcaacaacaccgctcagcagcagcagcaaacgcctttcccaaatgctcaattgactactcagatggctcccgttgctccaattccttactctctcgccgatcgtgatgtccaggtttgctatttctttgattccagatctacaatccctaaaccctagtctttccattgattgataagccttgattttgatttaggctatcattgaagcttataaggaagatccaacgaatcccaagtatgcttttcaggttagtttaggtggaaaattctggattctttagctatgtggtgatgatttttgtttatgttaactgttgtttcctttgttatgtagcatcttttattcagtgtgactgaaccacagtaccgggtgaagcctgcagctgtatcagatgtgagtatcttcttcatcttttctactatatcatggaaatgtgcagctttcttgtgtttaatgaatcttttaaattagtttctatatgatttctcggagatatttctgaaggttttactcgtatttggtggtagataatgtgggcagaggccatgagcaaacttgaaggtatggattcaacagaaagagagcgcctttggcctcagcttgtgcaaggtttcaaagatctctctcagcgccttaaggttgatttcatcaactcccaagtttctatgctttttgtttggtggttttgtgggatgcttaagccaatattgtttttcttttaagattgatatccacaatgatatgtgaacaaatcattcatttagcacactggacaaatgaatcttgacactattttttgttgggttgatgtagcttcaagatgaagttctcgtctcagatagggatagaataaaaacgactcagagcaatgttaaaatggtgagttatcatttcaccactctctttctctctcatattattaggagttaatttaacgagaaattgtttgattttgtttctacagcttcagagacatttgcaagcatcaaccttcccatctattgaaaggttgagacagaaggagcagagtcttcaaagacgcatgttgagggtaagagaagtcatcgcattgaaagatcttaccttcttatatgagtccagattacgttcaaaattacatttactgttgtgttctggcttgtgtgcttgaaggtgatgaggattatagaaggcttagaagggaagggtttccggttacccttgacgaaaggagaggccgaactgtctgagaagttaactgcaataacaagacaggtttttttcattttttaattaaaatttctactcgatgtttacaaagtttgatgtaaaaaatgggtgtggattctcaggtgaaaggtcctggagcagagctttctaggagggtgcaaagtctgcagacgatatctcgtgctcaagcaaattcaattgctgctggtagttccctttatctccctgggtcaactaaaatagacgagcagagcttgatagatatgcaggaggtatgatatacaacatcttttgtcactaatctctggattggcatatggatatttagatttttctttaggaagctacatcaggacattatgtaacggttttaacattgtaaataggtattgcaacaagagacagaagccataggaagacttgggaacgtattgaagcgagacatgagggatatggaaatcatggtggctgaagatacagaaatggcactagactcatagaagcgaatctgcaattactctagtttcgaagttctcttatcctttaccatctcctggatgcgcacattgttatgctcagaaacgacaaggctagctttggactttaacatgtacgtagtagctgagctataaatcttgatgtattgtgatatagttttcattaaagcctttgaaagagactgccttattttgttcacaaacacgagcggatagtttttgatgttcaaagttacaaatgttggtaatcataatggtttttaaaatagagggtattcttcggacatgattaagaggataagtgcagaccaaccggtgaagacacgtgcaccttctccagttccttttgtttgatcgtagtgttcccagataattccagtctggtcatagtttctaaccacgttcctgcatcaacaacacaatataagtaaggccatatatgctcagatatcttcaactgtacctaatacaagcatgcataccttattagattgctccttagttcctcgtaaatcgttcgtgctttgctgttgtacggtccatccactgtagagtaatggtgcagggaagaaagaatcatgtagttcatgttcatccatatagcacctctccagtatggtgcttgatgctcactgttatacttcatgtacaaagaactgcatgaagaaaagcgagtagttatggaatcatagaagaatgaaatttctcaggtatgtttgttcttgcaagctcacctagttttggcaagtgaaagtagtccatagtcactccatacgatgttcccgtttgaaatgagatcgagctgtttgtcgaggatcgaagaatcctttcatcaagcaacaaaaatgtaaagatttatgtttatgttgtcctccacaagggtttcaacaatcatatggataatggagcatattaaatacgaatgcacaatacatataactcacagctgggatgattctaaacatgaagggaaagaagctgacgtaaccgatatgaggaaccaatcttagctctggcttcccatatgtctcccttacaagctctcgagataaatgtccatcttcgtgaattacctctttccagactaaccgaacctggagaatcaaaccgtaggatatatgattcagtaacaaattatcactatcatgacagtggatatataaccttctctgtgacacaattctttcaaatttccttacttcttctgtatgattaccaaagtcaaggtaagccccatggtccttgtcatagtgcatctgttgaagaagagaggagagtgagagaacaagagttcatgcgtagccttgtaggcattttgcattgaaatatataaacctgattcagaagagtgaaatctgaaagcagcttggcaattgagctgtaatcctcctgcaggatacaatgtcataaatatgtgatgaacaaatttagagactgtagtctattttcatgtcatattcttcttactgtcacaagtatgtcatttttccccataaactcttggatggagttcatggaatctgctgcaagatacatccagcatctgaggtcaacatgcctctcatcttcatttggatgtgaagcccgaggataatcatccaaacccgaggaaagagactgcaggaatttgtgaaagctaaggtattatctttgaagtctctttgattcaagtagcagaattaagtggtaaaccaactaaataaaaggaacctaggaaaaaattcccatagtaacatttttgttaaggatcaagaaagagtacctgagggtttagttccctatttgttatattgtctctgccatgccaataataacttcccttttccttacctggtgttttaatcaagtcattaatatatgatgtaggacactaggagtaatgtattcaatgttacttgtcactaagatgcttgaaacaggaaacacagaagctgttgaagagtgaacgcatcctgcaactctataagtatgactccatgttgttacctatctgagaagtattgaaccatttaaaccatgcatctagccgtacaaaagcccggtcaaggaatgacaatattttatctctgtctgcctcgttgaatttctctgtccgtatcccattgatcaaatctgaagaaaataaaaatataaggaatgtcaacatggagttgatttgatttgtaaaccttgttctctacatcgcatacgagaagactcttaccgcgtatgaccaaaagtagtgtaggtggattgccattacttgggaactgaacaacgtactgctttggaatcttactgcagcagaagaatgttagaatccataatagcaacaagcagtaatgatgaatattttgtggctagtaagagtgtatgatatatataacaacctgagagcttcagctcccaaaacttgctcacgtggaatccatccatctatattcattaaatctaaccagtttccaactatttccaaggttatatggacatcccaacgcctgaatccatataaaaacaataatcgtttaaagtaacatatcaagaaattgtttagcctattcaatgatctataatgactaaccagatcaacaattgatggaagccttcatcccacaaaaatcccctaggaaaccggggccggcttggaactgctgtgtatagctcagctggccaatatagcaagaaatcatcctcacttttagcctgcaattgaacattgttattaactctatgaatctgtttttggagtgcaaaaaagcaagagaactataactcaccagaggacttttaggaaaatgaatctttgattgaccatagaagtaaccaatgcctccaagcatgttcccgattgctgctttaccaaccaccaaagtttcaggatcaagctggagtcacataaagagagagtcataaataatgtgcaaaagagatccttcataaaagtatttttgtgtgttaaggaaaggagtagaatcacaccttgtcagaaaggttgaagcattcattgaacttagcattaaatgctatatgtttctcttcaagtagactagagagtggcaaacctacacgaaataaagacggaaacttagcttaaaggcgtagaagctaagtacacaagataacatgaatcccagctaatcaaaaatggtgttagacaaaacatgttattatatggaaactatgctcttagacctacaacagagaaatggtgtccactatccaaaactattaacattttgcttgttgagaaaatgtaggccatataaacctgtaagactcattatacgattttccatgttggacgtttcttcttttattccagagacaaaggcaatgtctatagttgattggttcgtcgtggaaatctgcatagcaaaatgaggattatagatcaagaaatcatagaattcatatgagttatttagggatgctagttttgtttttaagtaaatctgtatttgcatatcttgatcacgactgattacctgaaaaacataaatgttggaagagtcctctgatgagtcagagagctgaagtagtccagacttctcttcctgaaaagtgaaaatatacaagccaagatgaatataactacgcattgtgtggttttcataaaacaaaaaacacatgtttggaaactagcaaaattgagatattaaatataacctgagcagtgagattttgctgaacaagaccagagagattgacaatgtcaggcgtcttgaatccacaataatgtgtttcaagatgattctgcaaacgaagagcagatacaatggttattttcttgcaaaaacagtaagtaactaataaaaacagtttcaaatcaaaagttacctgtgattttaagtgcatctgccagtttcctacatcttgacgtgaacctgaagctaagacagaactctctttaagccttaacacatctttgcctaaattcacaccattgcaaccttcatcagctagatagaagaagagatgtgtacttctctttacttcatcatcattcaacatattttgaacattgattctaatagaccaatctcctccataaccaaggctgccttcctcagacttgacaaaacttgtctccaaaaccatattttgttcaaacagctcttgtcgcccaaaatctcttccattgtgttctttccaaccaaatgacttaagatcgttagagttttcacagaaatgtctcataacaggctttccatctttcataacgagccacatcaagccagcaacaagggacttgggagttctgcatagtcatctacaaaaacttagcagcttgtacaagaaacgaacactagctcttttagtgcttatatatgacaacacagaaaaacaaatcaattccttcaaatcctctgtaacagtagtcgtctagtggtctttgacttttaacagaataactgattcacatacacataatacagtttggtgaaagttgtgtatagaatcatatgataaagttgactaataaaaagcaacaaataatccgttaccaaataaatacctggctcgaactccaaaatacatctgaggacgataagttccccaatacaagctttccttgtgctcaccttgaaactgttgcaaaaaaaaaaaaagttccaaaaagtcaaactttccactgagaaaacaagaagaaaagcaaaaagagagttaccatggacaagtcggtgagtttaggagaaggaaaaggagtgataacacgaggtctctgggattcatcatccaaaagtggtttgatatcaccagatgggcttaatccggtcatctgagtatagatttgagaaatgttgtgctctgtaaaatgatcgttgaagctgagaaataacaagctaaagctatagtaggtggacttttgagctatttgaccaaatgtagatcgtgatagcaactgattgtcctttttaaatacttattgttgttgccaagtctttttataatacagaaattagctataaccattttatagtatttgtctactacacaattttcgacatctctctcgtatcttatcatgaagcctttctctttgtggctggtcccggtacgttctttcaccaaaattattttcggtaatccattttttttggtattgttgttgccacttttccacacgtgcgttaattttcttattccagctctttttgtttttgttttttcttgtcgtatcgagaactcgtgtctggttcgtgtttcaattactaatcgtagatttttgcgagttttgtggagctgacacagttcttctctttctcatcatcatccccattttattcgtctctcttccttccgttatgctccatttcttccgtttttcgtattttctcttctctttttatttttatttttctgggataataataaaaactctttcttggaacaaggtaatcgatttctctttggtttttgtttccaatgatcaaatttggttttcttgttttcaccacgacaatgattcgttaatttggaaatgagaaaggagaagactttgcgtcggatatatcattaattcgtggttcttctgtcgtcactgattcatctctgtttcatgtcttcaggtttgtataaagctgtggctagctaattagagtctccagattgagttaagatcatggatgttagcgagctcgaggagaatttgttcgctgctagcgatgccaaggttatattctcataaatggatatgttttaaccatctctatctctaagattcttgtcggtagttgttggaatctaatgaacaagggatatgcttagtatgttattgttatctccttttttgtgttttggttttggattgcttctattttttgatgttatagagttttgattctcctgaattcagacttgcccctttgatccctttccctgttaattgttagcaaatcttgtgttgagagagtatatgggaatcttagcggcattagtattatttccattcttgttctatgatgtaactctttcaatttgatggtgttctctattctttgctaaaagttgtgtgctgggtaaaatgcagttacatggagatatgtgcaaggaactatctgcagtttattgcaaggtattgtccatcttcccttcgttggaagaagcaagacctcggagtaaatcagggattcaaaccttgtgttcgttacatattgcacttgagaaggcaaagaacattcttcaacactgttctgagtgtagcaaactttatttggttagttgctctttctttctttggatacattattctcttttgtgtgtttggtctctctcttgaattcctccacttttatatgttgagcaggccattactggggatgctgtactgttaaaatttgagaaagcaaaatctgcacttatcgatagtcttagacgtgtggaggacattgttcctagttcaattgggtctcaggtaatgtatatatcagtgcacacaaaatctttccttttgcaagttaataagtgtccagggcttatgtgctagatattggctttttttgtttattgattttagaattctagttgataaaatggtttatgctaatgttatttgacttcttcagattttggacattgttggtgaactagagcacaccaagttcctacttgatccatcagagaaggaagttggtgataggataattgcactattacaacaagggaagaaatttgacaacggcagtgacagtaccgaacttgaaatttttcaccaggcagctactagactcagtataacttcttctagatcagctctggcggagcggcgtgctttaaagaaagtcattgacagggcacgtgtggaagaagacaagcggaaggagtcaattgtggcttatctgttgcatctcatgagaaaatactccaagctatttagaagtgagatgatggatgagaatgactctccttgttcaacaccgtgttcccctactggtcaaggtcctaacgaagatcgtgttaatgcgtttgggcgacaactatccaagtttggttctattaactataagcctatgaacagtaggaaatcaggacagatgcctattccaccagaagaacttaggtgtcccatatctttgcagcttatgtatgatcctgtcatcattgcttctggacagacttatgaacgggtctgtattgagaaatggtttagtgatggacataactcttgtcccaagactcagcagcaactcccacatctttccctgactcccaattactgtgttaaaggtttgattgcgagctggtgtgaacagaatggaatcacagtccctactggaccaccagaatctcttgacctcaattactggagattagccatgtctgactctgaatcccccaattcaaagtcagttgatagtgtaggattgtgcacaccgaaggatatcagagtcgttcctttggaggagagtagtactattgaatctgaacgacaacaaaaagaaaaaaacaatgctcctgatgaggtggattctgaaatcaatgttctagaggggtatcaggatatattggcaatcgtggacaaagaggaggacttagctaaaaagtgcaaagtagtagaaaatgtcaggatattgctaaaggataatgaagaggccaggatcctcatgggagccaatgggttcgtggaagcgtttttgcagtttctagaatcagctgttcatgataacaatgcagccgcacaggaaaccggagctatggctctatttaacttagcagtcaacaataacaggttagttattatcacatccttcctgtctttgttaccaatcaaattccttagcaatgtcactttctaacatcccattcatggtgctcttcatttgcaaaccttgtcataatctcttctgtttcgttcttttggatgcactgcaggaacaaagagctgatgctgacttcaggggtcatcccactgctagagaaaatgatttcttgttcccaatcccaagggccagcaactgcgttatatctaaacctctcttgcctcgagaaagccaagcccgtgattggctcaagtcaagcagtttcctttttcgtgaatcttcttcttcaggatacgaaaacccaatgcaagctggacgcccttcacgccctctacaacctctccacctactctcccaatattcccactctcctttcatcaaacataatcaaaagcctccaagtccttgcatcaacaggtaaccacttgtggatagagaagtcattagccgtattactaaatctagcctctagccgggaaggaaaagaagagatgataacaacacaaggaatgatcagtacacttgcaacggtgttagacaccggtgacacagtcgaacaagagcaagcagtttcttgcctagtgatcctatgtacgggaagcgagtcgtgtatccagatggtgctacaagaaggagtgattccgtctctggtgtcgatctcagtgaacggaagtccccgaggaagagacaagtctcagaagcttctgatgctgttcagggaacaaaggcatagagatcagccatcaccaaacaaagaagaagctcccaggaaaaccgtatcggcaccaatggctatacctgcgccagtttcagctccagagtcagaagtaaaacctttgactaaatcaatctccagaagaaagacaatgacaagaccattcagtttcctctggaagaaaagccactcgatccatcattgacactcctatgtaaagttgcgttttcttctgtcgtccttaacttcttacaagtcatccgcatagagaaaaaaaatatttgtacaggtcacattgtgatcacaccattttttgctaacgaatcctctctcgcgagaggtatccatgtagatagtctactgatgtatcaggttatatatatgaaacctcacttttcagtacaaaaacagagtcgacaattcttgaaaactctgtttgacatctgtttattttgacggtcgattcacaggtggaccaattctagtggataaaactagtgccacgtagtatgaataaatactatataataatacttaaaatgacaagatataataacaaagccccaccatcacctgctgtcctgcgcggcgtctccgtcgtctctgtcgccgcatctccgtcatcattttcgctaccgcataatctctgtctccgccgtcactgccgcagcctagaatatgatttctcgtttctgaaacccttgtataaggtagaaagagagagaaatcatccaaagcaaggaccttccagcgactttcagggtttaaggtttagcttctcgactatggcgattctagggcttatcaagagggttacacgaataaccgtaaacaattcgagggtcagagtgtacccagtgaggtacttccaaaggaaggacctttcaagcacaaatctattcaatggtgaagatgctgctaagcttcctgttctgatcgtcggcgctggaccggtgggactcgttttatccatccttctcaccaaactaggtacaatttttctcataatttctctaattttcatctgaagttttgagttttgagcttacattatcaagttaagttcacgtctttgatcgaattgaattctcacatttatgttaggagtgaaatgtgctgttgttgacaaagccacaagcttctcgaaacatccacaagcacactttatcaacaaccgatcaatggaggttggattttttgtgtttcctgccgttaatattgtttttggtggttttagatttttgaactttaatgtctcagttctcgtatacttagatcttccgtgaattggatggattagctgaggagattgaaagatcacagcctcctgtagatttgtggagaaaatttatttactgtacatctctctccggctcaacactaggcacagttgatcacatgcagcctcaaggtgtgtttcttccgtacattttctagtgttaatggttctcatagagtaatacaatttatgttgaggaaaaatgcagacctttcacagaagttcttgtggtgtttatatatagattttgagaaagttgtcagcccggcttctgttgctcacttctcccagtacaaattgacaaatttattgcttaagcggttggaagacctcggctttcatgttcgtggttccaaagagtcggatggtcttgaggctgactctgtggttgcgaggcaaattcttatgggtcatgagtgtgtggggattgatgctaacaaggacagtattactgcaactgtttcttttctcaaaggaggcaagcatatgaaaagaaacattcaatgtagtctactggttggtgctgatggtgctgggagtgcagtaagaaagctcacagtaatagaaatgcgaggggaaagagatctacagaagcttgttagtgtccatttcatgagtagagagctcggtgagtacctgatcagtaacagaccagggatgctattttttatttttaacaccgatggtataggagttcttgttgcccatgatcttctacaaggagaatttgttttgcaggtagctatagccccgacccagatattcaaggatactttaatctgattttgtacttaaaagtagtgttatataccgtagcttagcatatattcatttttttttattgcagattccatactatccacctcaacagagtctatctgattttagtcctgaggtatttactatcattacctattaaagaatggattttcacttgtgaagactcattcacctctatggttttatctctgtcccagctgtgaccaacttcaaatgcgagtttgttttcaggtctgcctgaccgatgattgttttgtagatgtgcaagatgctgatattcaatttggtgggacatgagctttcagacttggatgtagctgatattaagccatgggtcatgcatgctgaagtcgccgagaaattcatgtgttgtgagaacagagtgatacttgctggtgatgctgctcaccggttcccgcctgctggaggttttggtacgtgttccaatatttttgaaaaggggaaccatacactgcttctttgacagttttggcatgtacgatggttataatttcggaagaaatctaatatttttatattgtcgtactaacggattgtggtactaacggatgccccagacttggaagttgatcttaaaggatccttgttctcagtttctttttctaagttataagaatctagtggtggcaagcctcagtaattggtttgattttgatggacattcttgatccaaataaaagcagaaaaatattttgatttattaaagtttaaaacatcagcagtcttgaaaagtattttgatagcaaattacatgattttttgcaggaatgaacactggaattcaggatgctcataatcttgcatggaaaatagcagctcttgttcagggttctgcaaactcttcaattcttaaaacttatgaaacagaacgtaggccggtacggtattcatcttttataactttttcttgccatcctttcctcctaacttgattcattaacacatatcttattgtgactgctagattgccctttccaatacttcactcagtgttcaaaacttcagagcagctatgtcagttccttcagcgctaggccttgacccaacagttgcaaactcaggtaaactaaaactagcttgtcttcttgctcatttcatagttccatgatcaggtttaaagcaattatatctctatggtgttgtagtgcataggtttataaacaaaacagttggttcgatccttccaactgggctgcaaaaggcaatcttggataatgtctttgcactaggtcgtgcacagctttcagaatctctgttgaatgagagcaatccactgggaaatcagagacttagcagactaaagagtatcttcgaaggaggaaaaagccttcaactacagtttcctgcagaagatcttggtttcaggtatagtcaccatctttggaactgtagaattctaactctgtatgagtagtaccaagaatagaaaagagatagaaagtagggtttgctgctttgtaaactgatatcaggggtttcatgacacggagagtgtggtctttaatgtttaaaccagtgtgtttctcgcattatatttcaacaaaagatatataaattcaaagtttgagtaacagaagctactgtgtttactatttaggtatttagagggagccattgttcctgataacgagtctgaagctggtgatcccgaagtaccgagtggtcgtagaagagactatgtcccttgtgctgaaccaggttcaagactgcctcatatgtatgtgaaaatactgtcagattccacaagagaggttattgtttctacactggatcttgtttcgacagagaaagtggagtttctacttataatatcgccattacaagagtcctatgagctagctcatgctacattcaaagtcgcaaaagagtttatggctagtgtaaaagtatgcgtggtctggcctagtagtgatgatggtcttgaaaggaagagcaattcagcattagctccatgggaaaattatgtcgatgttatggaagttaaaaaacaaaatggtgaaggaacttcgtggtggagtatttgtaaaatgtcagagagaggatctattttagtccgtcccgaccaacacattgcttggcgagcaaagtctggtattactttggatcctactctgcacatgagagatgtcttcaccatcatactagggaaacaatgatgaacatcacaattttattccacaaattcctttgtatactacttattttcaaataaaatcacgttatttttgtaatggtgtttcacgatttctttacatatggtaatggtaatgttaaacaagaataaatatatttttaactcggattcggttgtaaatctgttttggtactctccagtggcttcaataggcaatgaagcagaagagttgtgtctatgcatgttcttgacgttagcttgtagctatcctgaaaaataagtatccggtgactgctgtagcacttccaagcattccaccagcaacgacctgaattctcagcaaatggaaaacagaatctgatgagaactagaaattcattgatatcaacacggttacaaatcaaagagtagttcatttatcaaccaaagtaaacacaaactagggtctgttctagagttccatcagctcacacaagcctccaaaagaccctcaactctgttcccaattacacgatccccctcaccgattccttcagcactctatttgtactcatgatttcccctaactctgtaactatcttgctaaatgtaacagctaaaagaatctcatatcttgctagtcatatatgaaaagactttttcaagtcatatgtctacatacctggggaggggtatgaccaagaagttcccgcaaaggtctgctttcagccagcggatgttctgcaggaagttcatatacaatctgattgagaacctgaaaaatgaatcagaccccagagatcaggataccagagctcaaatgcatcatgacaaaaccaatagtggttcttttatcaaaccagtcaagttagaagatgaaacaaaggaaaggttagagcagcaatgaacaaacctcagcttgacgaccagcatgtaatctaacaccggtagcatcatacatcacctaccaacccaaaccactcacatattaatcgtcacttgattccttaatagccaatttgattaaactagagaaagtatccaacttacaacagatgccaaaatcaaagcaatggcaaaatgtgatccaccaaagccttcttgtaaaccaatagctacagcgagagctgtaacggtcgctgaatgcgaagaaggcattcctccagacccaataagctgtttgagatcccatctccgttccctatacctacagaatctaggaaaccatgtaaagatcctttctcatctaacgtatactataatttcctatgtaccgtttcgaaccaaagattgaggaaccaggcacatatagatttaatcggagtctgatccaaacagagatataaagagagaacgtaccaggaggtgaagagtttgatgaattgagcgatagtgaaagaggtgacggcggaaatgagaggataattcgtgaaaatggagaaataatgagtggaagacgaagacgtagccgtggctgtagaatcctccatggccgatgatggatctagtcaggctttaaatcgtgctagcgaaagaagaagaagaaaatgacaccgaaacgacaatgatccataaaacgtcgactaattccctttcaaactccaatggcgtctacgtctaccgttcaatcctctttgtctttctttttttttctttgaccaattttttttttaaacactgctccacaaaactatatattatacaattacccgcatccgaacaaatatgaaccgtatccgatacaaaacccgaatacctaggtcagttctattcgtgaaatcgagtctcctcttattcgacgacctgccccaactataaacatgacttttacacacttgacataacttcgtttgtatcgcttttttgaaattctatatattattattgtttgagcagaaactaagacaaaattaagacttttctctcttcttcttctccactgggtcgatctttacgaggttcacttgtacggattcactttaacaacagattcgccatggccgccgccgtcgcagcaccgagactcatctccttgaaagccgtcgcgaagctaggtttccgtgagatctctcaaatccgacaattggctccgcttcactctgcgatacctcatttcggaatgctgcgatgtagatcgcggcagccgttttctacctctggtatattcattcctcttctctcttcctttgcggttttggcatagatttgatctctctcaattctcaacatttttgtggtattacagttgtgaaagctcaagctactgctactgagcaatcaccaggggaagttgttcaaaaagtggaatctccagtggtcgttatcactggtgcctcgagagggattggtaaagcaattgctctagccttgggtaaagctggctgcaaggttaggcttaacactattcggaatattggagcgccttgttgttagatttgatctgtatatgtactcttcgagcattcaatttgcatgatattactagtcttgagttatgaagattttaacacaggattgctttcaatttcttttgtcattatagtgatggagacatcaataggtttatatccgtaattgctacacataaattttctgatctggaagcaaacactctgtttctgttgcaggtcttggtgaattatgctaggtcagcaaaagaggctgaagaagttgctaaacaggtgattcattgccctggattagactgcaatttacatgattcatgcaccaagtatctagaatggttttcagctctttccttctttttctgcttcgggatatcggtttagaccaaataatgcataggtgtttggtatggaaggatgttgttgttggtacgaaaataaatgtggtacctttcgagtttaacgttgataatacctttaaacagttttggtttctgggacaagaaatgtagacaaatgaattttctggacctggaaaatgtttcttattgccctatgcttctcaaatgcgttttgtgattttgctcttgatccacactgccaaatgaaatattatcttttggctaacaaatgtcatctgcagttaatagtgttttcgtttacaatgtcaacttatttcatgtaatctctgacatttcttctctgtgcaactgtagattgaagaatatggtggccaggctatcacttttgggggtgatgtctcgaaagcgactgatgtggatgcgatgatgaaaaccgtgagtgatcaactgtacaccatcttatattccctaatccttatacatcttttcattttccttttgttatttttctgcaggctcttgacaaatggggaaccattgatgttgtggttaacaatgcaggtaaatgaaaaccttggttcccattaagttttacttagtaccttactgacgtggctacatattttcaggaattactcgggataccttgttaatacgaatgaagcaatcacaatgggacgaagtgattgctttgaatctcactggtgtatttctctgtactcaggtttgtattcctgcaatactgctaaaattttgatactcggattttcagggactgatactcgtttactctctttaggcagcagtaaagatcatgatgaagaaaaaaagggtaacactttttacttgtcatatgccatgtcaccgtctatatcctcacacgtttgtcattggttttgacatgttactccttccctgaagcatagggagaaatgatatataaaaagacaactacgtttttttttttttgagctcttctataagattaagaagtgatattatgacaagcataattcatggtatacttaattgcagggaagaatcatcaatatctcgtcagttgttggtctcattggtaatattggtcaagcaaactacgcagcggctaaaggtggagttatttcgttttccaagactgctgccagagaaggtgcgagcaggaatataaatgtatgtgacctatctccctcatcatattcgtcttttttttaaacttcctggacatgattgtgaaacttgttccgtctacaatttgctctattccaggtcaatgtggtttgccccggattcattgcatctgacatgactgcagagcttggagaagacatggaaaagaaaatcctgggaacaatcccattaggtaatggacatttcatctcttacatttgttgctgggtaatttatatggataggatgtatctgagacatgaaaaaattgttagataaaaaagaattc

SEQ ID NO: 57 - DNA, 99383 bp, Arabidopsis thaliana
gaattcatttggctttttttattagtcaacaatacttttagacattatctattattaactaacatgtttgtgtttcaatttaactaattcattaaggccataggaaaatcgtcaaatactaaccacacaaaataactatagatactgtactttggtgtcattaaattcaaattggactttcatgttacccaaaaaatgaatcgttttataatttttatgtttgttattgcgacgtattttggattgcttgtatcagttctgtcttgtaaacgtaacacaattgaaattatgaacgagcttggtcccggtttggttctccagtatcattgtcattcaagagacgacaatctagacgtagcaaatttataatttaaggaaataaaacaaatccgtttcggagacaagctaggaagaagaacaagatggacttgtcttttgaaacacggcttatacatgcgatattataaagaattcatagcatatagagcaggcaacattgaccgatgtggtgctctgcgtcgttgggttgttagaaatgatggaatttaccttgtgagggatcgaaatcctcaaccaaagttccatcatgcatggaataaaactaagtaatgttgatgacaatacaatttttttgtttttgacccaaaatgtgcctaaatttgtattagccccgtataatctccattaattgatggattacatgaaagctaaatgagataatttgttgtgttttttccattcttctgtattaaaaaataagacaaggcctgaatgtttccatgtagagacaactcgtaggagacaactaaaaaaaaagtttgatgcctgatcatttatgtacgtagcatatgatgtaaagcacaataaaaatgtacaaattgtgatgtacaatgtcttaaaccataaaagaaatcagttgaaattcgggaaaactataaaataaaaaattatatatgtcaaaccatttgactcaaatgatacatcaatcaaaataaattcttgagacaatgccaatgcccaacctaaacttctaaatatctagaaagtgtccagctagtctacgacaaaagaccaaaacacgtgtccaatttaagcatatgggttccattcgtgcgaaaaggacaccctaacttgaaaaggaaggtaaccaacaagatatattcactatccgcaaacctaaaacaagaactcatccaacagcaaaacctttctcattccatgttccagctaattctctaacacattttacctcccttgtcctgatttgaatgtgctttcaagctcggaaggtcgcgaaggtatgctcgtcagagtattatctccaaaaaaacacgaatcaagaataagttgaggaagaggagtgtcgtaatcaattccatagatatcttccgagtcactgcttcgttctgtgggtttccattgtacaacaagtgagaccaacacgttgacaacgtgattcatgtcgggtctatctcgcggttccctggagctacattgattggcaagctcagctactatgttgatgcttctgagtgtctcttcgttgacctccattgcttcgtctatcgcctttgggaatgagcctttgttgataaacattctcctaaaccatgtggcaagatgtacttcttcctcagatcgtgcaacatcaagagcttttcgacccgttagtagctccatgaggatgactccaaagctgtaaacatcaacctttgttgtaactcttccggtcactgcaatgtacatagagatttcaatattttacatttagtgagtttagaacgagtagcaacatacaaaataagcataaaaccatacctgcatactctggtgcaagataaccaaatgttccagcaatcttggtctcaattgattgtgtaccttctggtgcaagccggactaaaccaaaatcagcaactttagcatgcatgtcatctccaagaagaatattagaaggtttaagatctctgtgtatgaaactttgatgtgctaaagtatgcaaatactcaactcctctagccacatccaatgcaataatcaaccgtctagtccactcgagaggcctcaacccttcttccttccaatagaaaatatgcctacttaatgtcccttgtggcatgtactgataaacaagaagtctctcattgccttctaagcaataaccatgaagaaccactagatttcggtggcgaactctagtaagaacagcaatctctgatttaaactcatctaaaccctttccacttataatcgaagattccattctcttaaccgcaatctttgttccatcatgcaactctcccttgtaaactattccaaatcctcctctcccaagtatattcttctcatcgaaattatatgtagcatccctcaaaacttgtattgagatcacaatatttccagcttctcctagatgagcgtcattaccactgaatccactttcactaacaccagtacacagattctcaattgtaatcttgaacgcatcttggtcactagattgttgttgaggatgcatcttatgatattgcatctttttcttgaccaaaaagaaaatagcaacccctataagaagcaaagctaacaaaataccaataacagaaccaacaattttcccagcattactagatgctttctttccagcattgccattaggacagtcctcaaaattcccagtcgtgttaacaatagttgtgttaaaacgaggtacttcaccacacaaccgattcttcgaaacatccagtgttttcaagttactcaacttagcgagctcttgtggaatagtaccattaagattattctgagagagattaataacacgaagagacgcaaaatcagcaaatcgtggagatatagtgccgttgagccccaagtttttgaagttgataactgtgatatcagttccagtacaagtgatccctacccatccactacaaggatcatttcctttccatttctccgcaaaattcaccgggtaaccaaaggcttcaacgattgaaagcaacgtgttgacacggggatcacaagaagtacctggagtatctaagcagaaactattgagaccattcagatcaggcttaatgtcaggagccgtgaagtttggagttggtccttgaagcaagttattacctaaagcaacatcagaaagagattgcagctcaaacaaagaagagggaacgagacccgaaagctgattctccctaacattgaaacttttcaacgagactaaaccagaaaagtctggtaaaggaccggagaagctgttcccttgcagcgtaacattggtcaaagaagtcatcttttgcagaaacgaaattgacccatgaagcttctcccttcccttttgcccgttaagcatcagaacttgaacacgtgagtcggagaaattcatgggaaattcacatacaagcgagttataagacagtttcagagtcgtcaaactagagaaatctttcccctcgaagagataatccgggatcttcccggaaagattgcagttgacagcagagaaatctacaagggaagtcgcgttttccaaactcggaggtatcacccaagaatcaaaaggattgttatccagagaaacatgctgaagagaactcaaaccagagaagaaatcctcagggacagaagtgaaatcattgtcattagcatacacagttaccaacgatttcaacccagcaagactcggtattggtcctgttaaacggttcctcatgacctcgaacttcgtcaaagatgttagctttccgagatcaggaggtagctttcctgagattcctctgtccccgatttggatcgcggtgacccgattgcttgcgtcgcattttatgaacatagaccacttacaaggatccgacccggaccagtttggatttccagatagcttcaaggagtctctcagagctatcatgaccgcctcatcagggctcgattcaacgttcaccaaggcaatgaaacagagcaaaaggaggaagttttttgcgatcattatctttttttttcaactgagaaacaaacgcagggaggcgttgattcacagacagtgatagattagggcttaaagacttcaaaggaagaaactttttgggcggagattttcttcttcttcttgaattgaatgagaaaggaaaaaacgaaacggcagattttattgctttttttggaaatattaaattgacttgagcgagggaagtgcttttattgttatttcccatttcttggttttgttaataaatgatttgtttccttttcatctgaccaaggaaagaatgttaaaggacgcaatctttctgtatttacaggcccagatatataaaaatcatagattttaaggcccagtattattttcttttttcttttgtgtaactaggcccagtatcttattttagtttctttatttgctgaaatagcattttaacaaaatgcatttgcactgttcgtaaatctacatttctttattatattttcttttttgtatttttttttactgagatttgtttctttttaaaaataatgaaaattccaaaactctcatttatttattttggaacggttttatagttttaggcttttagcattataaaattgaatacaactgaaatatatatgattataataaactaaaaagaaacttacttttattgatagtaaattataattgtcaaatatcatatattttttctcattggaagttctataatcatttggaccagtcctaccatttaacggtggtgtttttgataaactgaggaaaattactgttaggaaaaactttaaaagtaagggttatcatgatcaagttcgtagcaaatgacaaattcgatattcaataacacagagctattctagcaaccaaactgaggtcttacatctatgcatattattgagtcaaataattagatgattatcctctttgtttgctcctttttttattactttatttttaggtcaagtttgaagttgggtactcacaaaaataccttttttttttgtcatctggattatattagaaaattaaaagtttcagaatatgaaaccaccgattacaaggctaaactaaaccaaagtgaagcgaacaagttagcctaccacaagacccaactccaacatattcaaaagtggtctaaacaaaaaagaataagctctgaaccatcgagcaccacataagccaaaccctccatatacaaaccattgatctcaaacactgagcatcaacaccaaaacgacttctcactatcaaacagaatacaaacctctttcttcaacaaacacaccattcatccaataaggatgccccacagccacataggattgagaccgagacgcctccgtaacactttgggcgatgaggtttgctcctctgtttgcagcagaaaattccaattccaccttccacaccaaaaaaggtaactatgatctatttaaagccacactctgagctttaaaagaaggccacgcccttggtctcaacactgcaccaatcagagacttatcttgaaaggcaaagataatattatcaattttatgactggccatactctccatagcccataggagacatctgagcaaagcatcagccttgctagagataggagcaaaagaacgtctactgtgtaacaacactataccatcctgatctcttaaaacccaagcccctccagcaaaattgtttcttttttaccaagaagccccaatgttacatttaacccaattcgctggaggtttaatccataaattctccgatacactgcctacaaaatgaacaccattactcaggggaggattaagggcagaaccctcaccatctaagcattgagcttcaaaccattccaccacatcatccctaatctttatcactgtatcagtagctgggtagcttatcccctcaaagatgaaagagttcctatttttccaaatcctccacaaaatccatggaaaaattttcctgaggttaataggccattctttattatctttgttctccaagagatgattgatgttggaataaatagagccgttactaaaaccatcaggaggaaaaggataatcagaaagagcccaaatttgtctagagagtgggcatagaaacaaggtatgattcgtcgattccccaagctcaccacagacctgacatgtggtatcaacgacattcctctaccattcaagttctcggcaaccggaagaataccactaagcaccttccaaagaaaaatcttaatctttggatcagtctgaaggttccacacctgagttttcaaccctagagtagaaggctgcatagagacttcgcttctcagattttggctctttgtttgataagctaaccaataggcagacttgacagaaaaatctccacttttatttaacttccaaacgaaaaaatctgcttgagatatcactggtttaatagctttaattctgagaatgtcttctggcaggaataagtcatgaagaacctcttcatcccaaaaccccgttcttgggtttaacaaggctttaacttttaaagtcacatcatatatcaggttttttctccaaggggccctaaaaccattatcatctatccagggatctatccatacaaacaaagaggcaccatcacctacccttttttgaagacctttagacaaaagctctctgccaaaaagaatgcttctccaaccaaaggaaggtctctgactcaaagcggcatccagaaaatcagtagcatcaaaatatctacttttcaacaacctagaaaggaggcaatccgggaaatgaagcagcctccacgcttgcttcgctagaagagcctggttgaaagactggatatcacgaaaccccaaaccaccactatcttttggtaaacacagcctttcccaactttgccaatgaatcttccttgaatgatcacaagaatcccaccaaaaagatgccattgcactctccaaattttcacaagtagtaatgggaagcttgaaacacgacatagcgaaaaccggcatcgctaaagcaacagatttaagtaatacctctttacccccctgtgaaaggcatctggtgaaccaaacatccagtttctcttttaatctatccttcaagtaatgcaacatatcaacctttgacccactaaagcattctggaagccccagataggtcccagccccaccctcagtgaaaattcccaaacaagtccggatagtacctttcaattgctcatctaccttttcaccaaaagtaattgaagacttgttcaaattaatagtctgacctgtcgcattaccatacaccttcaaaatcttttgtaagaccagactttgctctcttgaagctttgcataagaaaagactgtcatcagcaaagagcaagtgatgcaccatagggccattctcagaaaactgaattccttccagagctccttcccattgagccttattgagcaaatgagtgagaccctcagtgcaaagaacaaagagaaatggagataatgggtcaccctgtctcaaacctctttgaaggataatcaacccaaagggacagtcattaatcaaaacagagtaagtgacagatgaaacacaaaccatgatccagttaacccatttcagatgaaaacccaaagacagcaaaagggatctcaaatagctccactccacacggtcatatgctttagacatatccgattttacagccataaactctgaagagatacgcgggtgaaccttcaaactgtgaaccaactcatgagccaccaaaatattatcagtaatcaatctttcagaaacaaaagcagattgagtatcagaaacaatctcagggagccatggttgaagtctctttgccataatctttgagattattttgtacaggaccgaacaaagactgatcggccgcaagtccaccatttctgttgggtgttgagtctttggtattaaacaaaggtgggtataattccactcagcaggcataataccatcagcaaaaaactttttaacctctgatgtaacctgatttccaacagtggaccagtagtgttgaaaaaacaaagcagacataccgtctggaccaggggcactagctggcttgatagagaaaacagcctctttgatttcctgagcactaacttctccaacaagactctcattcataacttcagatactctcggcaccaaacctgagaaccaatccgtaaagcctgaagggtttgaggacttaaacagattcccaaaataagcagcagccacttccccttttgctgcctctgaagtttgcatgttaccattcacatctttcagcttttcaattcttttcctttgcctattctgtttcacagcagcatgaaaatatttagagtttctattcccacttctgagccatttctgtctactcttttgcttccaataagcctcctcttctctataggcttttgctaggtccttctttaaaacagaaactctttgaaaaatcggccagaccaaagactgttctttttccagagcagcctcaagttgattgattttatcaagggaatttaggttattttgtttcttccaagaactcagggactttctgcaagcacgcaatctatctgccactgatatgttggttccgtgtttgcctctactccaagttctgataatagcttctttaacatcttctttaaacagaaacctcttatcaaaacgaaactgccctctataagaatcttgagacgacatcagctttatcaaaaccggtctatgatctgaacctcgaaaatctaaaaaggtttgattagagaccgggaagaaacagaaccactccttgttaccaaaagcccgatctaatctgcattgaatccagtgatctcctctccttccagcccaagtaaaaccattaccatgagcaggcatttccacaaggtcacaacctttaatcatctcattaaaggctttacaatctaaatcacttcttctcggacctccatttttctcaccattatgaagaatgtcattgaagtcaccaaacatacaccatttatcccttctacccactccaatccttgaaattctttcccaggcctgacttcttttacttctatctgggtctccataaacacaagaaacacaaaaattaacagctccaaactgtacttgagcatccatcaggttcttatctacaaacttcagatccacctgaacactactcttccaaagcaaagctaaacctccacattttccaaccggctcaactgtatatacttggtcatattccagccagctttgaatatcaaccaaatcatctcttgaatgcatcgtttccatcaagaaaagcaactcatggaagtgttttttacgcagctccttgatcacgtagctagctgctcacatgagggctgagtttttgacctcatacggtatatatgagatattcgaccaaaaattaaaatcgtacaagaaagaattttatccctcaattaagaccaatagagtcgaaactttttcaaaaactaagcccgcgaaagacataaatatattcggaaaactaagtccaaaattataagcgaactataaccaaaatatataacctaacttttacttcgtagcgcaacaacttcttagtttgtactatagaaaacattgatgattgcatcaagtcattttagaatgtctagcaaattttggtgagaatttgatgaaaagaattttggtaagtaatgagatttcaaaatagcttatttggatgctgatttcagtaatgagttttgcataattctaccgaaaactgctctaaataattaattgaccacattgaactacgaatcaacagtataagactcagttgaaactcactagtcactactactttatggtgtggatacaaccaattttaagctccattttcatagtggcatttgtccactaatgtttttactaaaattatttgattgttcaacttcttgttacccaaggaaaaaagtttttacaaaatcttaaaaataccaaccagcaacatagaaacgatggaacaatcatttgtgaaatgtgattgggaaagctaatgaattgaagtgggcacaaaggcccacagacaagttgggatggaaatggaacaaaagtgggcagatgtcataatcactcaacgaattaaagacaaaaaaagataaaatatggagacaccattatctctttgtcttttgccacgatcccaagattgattttgccctggcttgaattgttccacacacacaaacccctctatgaagactcatccgatggtaaaacaacggaaaatatcattggtcacgtacgttttatagctgctagcaacaacaacaatgaccaacgatatttttctttttcgttttgtagttgttagcaattaatggcaacgattaactttggtttgttttacagtcgttggttactcggttcactctagtagttttggtaacaaagtttagtgattatgacaaaatttagcgactagtaataaaaaaaattgattactaacaacgttttcatagaacaagaaaaacataacaccttatttttcaccgcacgagtgatttggtaacataccacacagagacagtatcggaaaaaagttttttttaacaaaaactttgcaaaaaaaagaaaagttagatagaaatgagacaaagaaagcagagactttaaaatcacatgtgatatatcagaaaaaacacagcaagaaatgtccacatccaaaagtaaaggtaaagccgggggaatgaatgtatgggctccatgcaacattatcaaattcgttgctctctattcgttttttcctactatataagtggccgagttcaattattaaatgttcatgaaaatatccaaattaaatgaagaactctgacgagtgctataaataattcaacaatattatgtttgtttttctaactataaaacatacaatttgtttatctgctttcttttttcttatatacagatttcaattttcacacatctaattcaaatcttttcaacaaatcatgactattcaacaacttcgaaatgttttcaaaacttattgatgcgacaaagtttatctatagcacatcacaatgaacgtataataaacactactttcgaagacgtgcataccaacgcctatacggctacatctttacgaacactgtaataaagtaattcaaaatatttcttggttctatttctatatatatttaagaaaaagcagagtactttacttgattaatttagaaaaaataatactactatttggctaagtgcccctaaaaaaatcgttgaactatagagaaaaaaacagaggtctaaaagtctaactggcagacacttttattctcccatgtgtttcaccagacaccatctccatctctccaacatttgcgtttccacatttgtttaaacataactctctctctctctctctctctctctctctctcagtacctcttattcttatgctcttcttcaccaatcctatctcttctatctgtctttattttctctacatgtgaattgacccatttctggtaaacacatagagtaccacttttcttatttagattcttcttcctcttcatagcttccaagtcaactacttcagcttctgtcggctgtctcttcccagatctcgtaagcacagtaccctccaaacttcttatctctctctgtctctctctctctctgatcttcgattcttgtttatattatccttactacttccttggattaaaactttaaagcttcatttagattggtcttctttatgctacggacttgctgattcttgtccgaattcaagaactttgtttttaggtcttgaaccaagttgttaactctgtataagtctttacttgcttctttgctcaatatcttagatttatagattcgacaagttttgttgttctgctttgacttaattatgatttcaggttaagaccaaaacttggaataaatgacggaatctgatgatgcctcacgagaaacaccagccagcagaggaggagaagcctcgtcaaatcaagatctgtccaaaccagaatcaaaccatgtttcactcgatctcaagctcaacgatactttcaacgatgacacaaagagcacaaagtgtgaagcaaacccaagagtcttctcttgcaactactgcagacgcaagttctatagctctcaagctcttggaggtcaccagaacgcacacaagcgagaaagaacaatggccaaacgagcaatgcacatgggaagaatgtttggtcaccatcacaggccttacacatacacttcttcttcccttgggatgcaagctcactccggtttacttcatcacaccttatctcagcctcagcctcttgtttctaggtttcatcatcaagggtattttggtaacaccgtgccgttgttctttgactatgacgatggtggtagcgacttcttctggcccggcagcttccgtcaggtggttgaggaagctgaggctccggtggttgtggtggctagtactgagtcaggccttgatttgaactcggttgcggcaaatggaggtgtagataataatagctcaaagcctgatcttaccttaagactctaaaaggattaaggagattatatctttattgttatttttctattgttagacatacagaagataagttggagacagttgatagaaattgatgaaaaactttgttgttatattaaatgaggttgttcattacattacggtttcattcataccattatacgagctcccacaccagttaaatcattaactattttcatctaggaagtgaaaaacattagtatgttcggtggaaaaattttgtttcgttcatgaaagattgaatcatttgtatgtcttctcgcggaaactgagccagacatgccaaaacgtcgaccaaagtagatttaatatttggacacctgaacatactaaccgatttaagccatcttatttatcatgcatatcaaattatgtcttaaccagaatcaactttaagacattgatgtctccattatttgcaaattcattacaagttgttttcttttcttgcatgtttgtgtcttcacttccatatatttattcctaaaaactaaagtttttttgctaagaattcctaaactaaagttgcttactctgaagttccaaataaataaataaaactctgaagttctaatgaattttgttgccatatatgcggtaaattcttgtgattcattttttctcatatgatctatattttttttttgggggcaaaattaatctgtatatattgtttacataacctcactaatcaaagcttatttgtttacatggtcaaaatatgaataaattttaaaactttgactagacaaccaatattaaaattgagcatcttttattttataagttctttttttttttgtgcaaaatttttataagttctttatacgaataaatcaaagaaaactacatatagtaaaagtacgaccaactcaaataattgtaggatgtgtgataaagtacatatagcgtatctagtttcttttttgaagtacagagtataatctattaaccaaacatttttaaagtaatatatagctatgttcaaaagaacgaaataatccgtagaccgtgattgtgccgagattagtgggagacattcggacgaagttggctttatactattacaaaatcattatttacgctactaaatgcaagtaatcaacatcaagtgtatatttatttcgtccttatacacccaattgcttgtttaaatattaataatcattttgactttggaatgataattataaagttctgattatgatgttttaacaattcagaaactaaataatcatacaaaatctgttatcatgtaaaggttattagagagaagcggtcgctactcgatattggaagagcagtacttacgcatgacacaaaaatgtcaaatatttatttaattcatatccatattttaattacggatttacataaaactgagagagtttttaggaaatcttccagatttagttgacaaaatttccaaaattagctagcgatcaagagaatcatccgcttcctttgggaaacacacaaatacgaatatctctcttaatccgattttctcttctcatttgtgtgattttggaacaataacaatatgttcaacaaaaaccaaggatccaacggtggttcatcttccaatgtcggcatcggagctgattcaccttaccttcaaaaggcacgttcaggcaaaacagagatcagagaactcgaagcagttttcaagaaattcgacgtgaacggagatggtaagatctcgtcaaaggaacttggtgcaataatgacgagtctaggtcatgaggtaccagaagaagaactagagaaagcgatcactgagatagatcgtaaaggagatggttacataaactttgaagagtttgtggagctgaacacgaaaggtatggatcaaaatgatgttttggagaatctgaaagatgcgttttcggtttacgatatcgatgggaatggttcgatatcggctgaggagttgcatgaggttttgaggagtcttggtgatgaatgttcgatcgcggagtgtaggaagatgattggtggtgttgataaagatggtgatggtacgattgattttgaagagtttaagattatgatgactatgggatctagacgtgataatgtcatgggaggtggtccgaggtagagtttctttcgtggacactgctgaaactgaattctccgtttcttcttctttttcgtgttcttccttttcgtcgtcattgtttattattccaccattgtttcaatcttttttttttttgttgttgtctttgttctttgggatttgtaattcccttcaagataacgtgattttaaaattttaatttatctctcttttttttgtattcagttctgctttgggacttgattaatttgaatgcatatacagtgaaaattatgtgaataaataataaccacaaatctcatttcttactctacattataagctaatttctttgacatatgtctattgcatttgtttcgaatgctagtttttgggtttgtttttacacctaaaaattatccctttattattaaaagggaagtacaaattgaaattttgtctaatttggcctcaattttgattttaattttggattttgttctttgctattccaaatcattaagggtaatttggtcttaacaatcttctaaattttatatgattcgattcaatttaaaccgttcaataaaattaatttccttcaatctaaaccgctcaacaaaaataaggaatttatgtcgtttttgaaatcaaaatatgatcacatttcatccctaaaaacactattcaatctcaaaatcaataatcaataatattcaaatcatatattacgattcttcactaatcattagaaatttatatttataagtttagggtaccaaatttattcaaatatttagtataagaaccaaatatgttgataatcgaacatcaaaatgtaacatctgttcatctttgtctttaagtttttacaaatgctttgaatggttccaaatttgcaatgaacaaaacgatttttatttaccgtttatgaattttggttcgcaacaaactaacataaaaagatgaactcatttgtaaaatttttggtgtatgcatattaaaaaaaaatgatttaacataactaaattttgtaaatttttaatacaaacgcaaacgttatttttttcaaaagcccatttacgacgaaaaactaactaacaagcccattagttttagtattccttttaacaatggacccaggcgccgaataaaaactaaacccggtccggatcttaatcctctagcaacagtgaaccgggtccgcttcgtcggaactcatggccaattcgaaaatggcgatagcttctctagcagctcaaatccgtcccttcacatgtttggccgcgtctctgccgtcacggttggcgcctcatccaccagacctcatccggtggatcaagcgagaaggcggcttcgttcaccacgcggttaagctctctcaggagactcaatttggtatcggactcatttccaccgagcaaatctctccaggcaccgacctaatctctctccctcctcacgttcccttacgcttcgaatcagatgattcgtcatcttcatcgtcctctctcctctccgcattggcccgtcgtgttcctggtaagtacttatccgttcctcaatgaatctcgctgttgttcaatgcgattactggaaatttgcatctagaggatcctaaagcttacatagtggtgctacttggtcttaaatctaaatcttagcttataggattctgtagaatcaagttttcaaaatttggttgattttgtaagagttactgatttcgacaaaatttggcagaagaactgtgggcaatgaaattgggattgaggttgttacaagaaagagccaatgcagattctttctggtggccatacattagcaatctcccggaaacttatactgttcccatattctttcccggagaagatatcaaaaacttgcaatatgctcctcttctccaccaggtcaacaaaagatgccgttttcttcttgagtttgagcaagagattagacgtactcttgaagatgttaaggctagtgatcatcctttcagtggccaagatgtaaatgcatctgccctagggtggactatgtcagctgtttcaactagagcgtttcgtttacatggtaataaaaagcttcaaggtggatcttctgatgatgttcccatgatgcttcctttgatagatatgtgcaaccacagcttcaaacctaatgctcggatcattcaagaacagaacggagctgactctaatactcttgttaaggtttgcgttttagatctctggttttaaactggctttttgtttaactgaatgtaaatgatgtttctcttttgttgtgcattaggttgttgcagagactgaagtcaaagaaaacgatcctttgctacttaactatggttgccttagtaatgattttttccttttggactacggatttgtgatcgaatcaaatccatacgatacaattgagcttaaatacgatgaacagcttatggatgcggctagcatggcggctggtgtttcttccccaaaattctcttcaccagctccatggcaacatcagctgctttcccagttaaatttagccggggaaatgccaaatctgaaggttttaaaccgccatttctatatcacgatattttaagtactatttatttccgagaagaagaatctctaactattttcttcttatactaataggtaaccattggaggcccagagccagtagagggacgactattggcggcgttaaggatactgctttgtggtgaactggtggaagtagagaagcatgactcagacacgctgaaatctttatccgccgtagccccttttggaattgcaaacgagattgccgttttccgtactgtaatcgctctgtgtgtgattgcattgagccattttccgacaaaaataatggaagatgaggctataatcaaacaaggtgtttcagccacagcagaattgagtatcaagtaccgaatccagaagaaatcagtgatcatagatgtcatgaaagacctcaccagaagggttaagttgctatcttctaaggagacaccaactgctgcataagaaccacctcctgtaagttctctaagcttggcttgtttcaaacgtcaatttccaagatgagtatgtttaaggttattcattttgaaaaacatataccgaccactatttctctattaactagcattttcatcctcaaggattagattacatgaatctatgaactagagaagggagattaaaatgagaggtaaaagagatgttgtttcaggatattaaacaggagactcatcatattaaccaaagatatttacattgaaagataaaccccaacacacagaggatcatctatatctagctctctctccttttgtatcaattcccaaccgggattgatctctctcgctctcctaaaccgaggggagaacgggaacgacgtggacccatgatctcgcggaacactaacggcatctcaggctgctttagtgacgggtgttgtatcttctcaaactcccttttgatcttcacgacttggctatggataataggaacactctcttgcacatcatctccatgattggccttcttctccattacaaatcgggagtgaagccaaagagttcttcttcttatgatgtttttatgatgtttgcgttgtctattcacgcgggaggcgtgtttataattataatcttgaaccaaggttagtatgagaaagtggacacgagttgttgatgaagtagaagggaagttaggttggtgggcaacgccaaattagtctcttacacatatctctctctttgtgtgtcaataatatatatacgataattaagacgaatttgtaatggtgatgttatctaaaagcaaagaagagtcgtatcattctccttgtaaacatcatgaaaaagagggtcggtgttgggtgagagttttgggttacgtgtcggcaacaaagctaagacacttgtgatttgtgatcattactggtacgccaattctttcttcaaccgaagactaagattcttcaaagattattgaccttcttttttatgaggtttcaaagtttagaagctaaaacaaattaaattgagaaagagttgtttgaaaagttgatagagactagaaactacttttctccgtaagaattgcttttgtttgacgaaagaagataagtgtgtggggacatatagattaaccgggtggtaagcttagaggattctaattgggattattattggatatcaaattaaaccaaaaccggagcttgacaaatacatatacaatcgaaatcattttttcaaaaggatcaccagaaaaataaaaacaatgtccgtaggagattaaaatcgtatccaaggttgaatgttgggagtgtcaaatttgtacagagcatcaaatcaaagtaagaaaaatgtctgatgacttcagaatttcagatcaatcccacgctcatgagtggagcccataaagtccatcaaactcagatgtgatagacaaccacgtcacgtggatcttttgtttcgttctttcccatgtagaaaatcgtagccgttcgatttacggtcaaacatacgattttagattcgacggcgggtcttatcaatttccatctttgctcgagaggatttgctttagaccggaaaattaaacattcgatatttgtgtttccgttattactaaaaagatcatagaaaggttttcaatatctttatgtatcgtatatgatacaaaattgaatgcattacattataattcattgaattattaaaaaaactaaaaagcaacgttttcacttgtcttgctctagaattcttacaaatttatttgcccttactacaggagattttcgaatgacgacaaaaaagaaattccaaatgtgtgtatatcatctagatataaagctattaataaggtagctttataaacataggggacaagttgttcagaagaggtgtgaggtaactctcagttcaacagttattttttaaatggcttgcatagttatttgtagtacaaccggcaacggttatctccaaaataaatcaaataatggtaattaaccaatggtggagaataggaaactatatatggagcccttttgaaacctttttggccaatgaattagtaacttaatgagttttgatctccaccaaaagaatacatacgtgcgttgaaagatcacgtgaaagcaagtaatggatggtataatacgtgcgtgaattggtaaaattggtataggtttaggttataatttagatacggtgtacgattaagaggggaccaaaatctgtgcttttaatatccatatatctttctagcaaactaaaacaacccctatttctagggtattcatataattgcaatgcgttaacacaaaaatctaatccagtgtaatcaatattgatcaagacacaaacacaaagaatttatttcgagcagctttgaatcgaggtcgttcactaagatccactaacacatgactacctacacgatccgggatctttgctcaagtcatcttgtgcctctcaaatattccaaaatcaaaatctataacgagacattggtttccaagttttgtaaatgaaaattgaaagaaaacatatggcaaaaaaaaattgaaaatgcgattaggtacggtggtacagttagaaattttattttaataaaacgaacactgaccaaatttttttattttttattgatgtaaagttgttgtctaaaattaattgaaaattgcaaatcttgatgaaattaaaacgaatgtagtttacaccatgctccatgcattacatatcacaatgcatggaagaatttagtttatatcaccatgctccatgcatgattttcttatacgtgtaacgtgtgtgttttatttgggatgtaagctatagcatatatgaccttaatttgcgtagctacaaacatattccacaactattagcgatcgatatcacattatataacatgatggcccgttcgtgtgggaaaaaagtcaaacataatatattgtttatattgccattgatagagagagagagagagagacgcattgtgcagagaaaaaacccacgcgtttagaagagaggcgacaattctggtatcaactttaatgtcgtaccattgcatgtaacctactttcgtagctttgccccttcatttttgccttccattttcttcttttattaccagacatttcaactcaagaccaaagttataatttcatttcatctaaatgtaaagaaactattatgggagccatggaccgttatgtttcggtcaagctcacatttaatttacttcctttgtaagatatattttttttgtaacccaaaatattaaaatatatagtacttaaataagttacataaaaaaaaatctttaactagaatgcctcttgagcataatagtaaatatatttttgaggtattataacccctatcacatagcacatttattttttgaattaaataaattaagattttgggttcaaatagcacattttcacattctctcattcatttaattcttttatgtggatatattgggaatttctcaataatctatatcatgtaatcaatagtgttcaccaccctatattttttttttcactactccaccctatatatttcaaagctatgataatacttcttttttttgttgtcataactcataaagttacaaattaattctttgtagtttcgaaagacggaagcatgcatcaaaatagaaatataggattttcttttcttaacagttttcccgttttctccatctgacaaattgacgtccatatcgtttaggtttagaatattagtctgatttctatgaattaaagatctagctagagccgattattcaaactacttcatgaattaatcttctgttgatatgttgtaccgtgtacgtacaagttgataccaccgttatataggttcaagttttccacaaatttccacattttttaaaagtgatttcgattccttacaaactgagctctgtggtgttcagcttcataatccactaattccacaaggagctcacgacttctcttccttcaacatctactgtttgtagacatgatttgccaacgttttgttgaagaaacatagttttgtttttgtttgcctcacatatttattccatttttttgtttgttatttttttcttttcaatctgcatattttttcgcggcacaacctaaatgaaaaaaaaattacatgcaattagatatgattgtaaatcgttatatatataacaacggcaaaatatttagacactcctaaaagacttctgcgttgatatattttttttctcctacgcgatatatgtcaataattacgtgataaacataataacatacgtgataattgcatgcaacccttatatttagacgattgataattttttctcctaggcgtgataaaactttttttgacggattttttttttttgcattcaacccttatatttagggctcgaatatgaatggagctttacagacattaattgatcaagaatgtgagagagatttagattattttttatgtaaatgcgaaattacattaattatcaaacatatatatacgaaattagtggtggagattgatttccgtaaacgcaaagggtcattagtcacaatcgagctacagtaggaaagccctaaagaggctacaccatgaagaaagagccctagttgagacaaatccacgtgactttggtttacagattaaaaagcaaaaccctaaataagcaaatcgaccataatctcgtaaaaagaacagacaaaacacaacctcatgtagaaggaacaatttctgcgcgccgccagtgttattaattcagaatcataatttcacgattttcaaccctctccttttaagcttcaactccaacatcataattttcccttccacaaactactgtataaatcacttttaactctattgcttattattattactgtaattcattattattataaattaatgaccattgattatttcccaaaacacaattaaagaaaagtgcgtaaagattaaagaataatatgaccaacggaaatagctgaaaacgatgacctttgaatttgttcaaaaataaatgaaatcaatgattttataattttaatttgtaaattgttcaagaaagttttctgaaatatattcatgtctttcacttaaaacaaaagaataaatcgacctttaatcaacagtatcaaaggacctttatactctgacaataagaaagaatggtgcaagggttaagataaaaatagtacatcataattatgaatttgttacttgtcaaaaagacatgaaatatgtaacttataactgcttttatgcaagtccgtagaaaaggaaaaagaaaagacatgtaagttcgaacgtggaacaagaacttcgttaaacgtacttttgctttctgcatctctcatagattcacaactcacaagtcaataaaagatgcaatgcaagtccatttttttaaattatatattgggtcaggtccatcttaaattaaaaacaataaaaatgtatattttattttctataaatacgtaatcagctatcatcacattcaggtgcctcacaaccctaagacaatcacagaacaaaaagaaaaattcttagctttaaaaatttcccttaggtcaaccatggaagaagcaatcatgagactcgaaggtgccgagcacagagaaaccaacatccattctttgaaaagaaagccatcaagaacttcctcgacagctcctggctctcccggaggagtaactaccgcaaaagctgcctccggcgccggcgcttccggtgtctctacgataaggtaccgaggcgtgaggcgtaggccatggggtcgttacgcagctgaaatacgggacccattgtccaaggagagacgatggctcggaacatttgacacggccgaggaagcagcttgcgcatatgactgcgccgctcgagccatgcgtggtcttaaagctcgaaccaacttcgtctacccaatgccttctctcgactcttatcaccaccgtattttctcgtctcctccaatgaatatgttccttctacgagacgtgttaaactctcagtctctttctccgttaaccactttcgcttacccgccttgtaatctttctaacgtaaacgacgttgttcacgagtccttcactaacgtcaacgatgtctgtgaagatctctcgcctaaagctaagaggtcaagtaccattgagaacgagagcctgatatcaaatatctttgaaccagaaccagctagttctggtcttcttcaagaaattgttcaaggcttcttaccaaaacctatctctcaacatgcttctatacctccaaagagcaaccaacagtcggttggtgttttcccgacgatgccagagagcggttttcagacagatgttcgtttagctgacttccatgtcgaaggaaacggattcggtcaggttaaatatcatggagagttaggttgggctgatcatgagaatgggtttgattcagctaagatgcagcagaacggaaatggtggaatgttttatcagtattgctttcatgatgattattagaatattgttgttgttctactttttacgtgcttatcacttcacagtttctttagggttgtaagaaatgaggttaagggtaactaactcaaatcttttgtcttttaatttttcgtctagtgctatgatcaatttatctctatgttttagcaaagaacaatttttatctgagtatgagcgaagttaattaattgtgtatgacatatgtcggttatgagcaaaggtaataacaaaaataaagtaaaaatactcgaggtgctggatgaagacaatacctaaaggacaaaaatatatatcttgaacaaattaagatttttttttcttttctataagttgacttcagaatcataaagacagcctttgtcctcttgctttttcttctttcccttttccctctcagatcaccgtaagggcataattatatttaggttcacaaaatcctttgtccattaaagtatttgcaccatcaaaactcagtaaacatatacttaaggactcgaatttgcatcaatgtttataacccttattcaaaaaaaccatatcccaattatgatctttaggggtactcttcaagtatccaagagatcttctaaatattggaatttctagtggatgtgatatgaacgatgttgggactgtctttagttttatatgatcacatcagtctatattaatttttattttaaaacaaaacattatataaaaatatatcataaaattattcaattatcgatattcattcaaaataaaatcataacacttatttgaatttgaaatctcgttgttactacaattctatatatagaactattctaccaaatattaattgaaaagattatattcatttaaatatgaaatagaagttcagtgctcctagctcatattgttttcctctatattcaatgcgctttgtatataacaaaagttttttttgcattgcactgcatttatatagtattatacacatttatatatatatatatatatatatatacatttacatttacaacatttataaaagtatatatgtatacatatatataaacaacaacatttataaaagtgtataatactatataaatgtatacacatttacaacatttataaaagtgtataattgatgaatgatggaagtcatgatcatgaatcattaaccattagaaagtgacttatgtggcttttggccttttggttttggggatagaagtagatgaaacatcatgaaaagttcaaggatacagttggtccttgatggactccatcatcattcccgtgatgaccatacaaaaagaaaaagatttgttcagtcttaaagcttcttcaaataataaaatgattatatacacacaatgaggtatacctcttcgttcatcattgattccccttcttctttaatattcacattatgaacgacaaaggaaacatggagactgaagcttccatagcggcgatgggccttgggggtctgtcccgtcagaccagcatcactaagaccatttgcatttgctcaccgaccactcacccggggtcattcaagtgcaagcttcaccggactccttcgctgcagcgtaacaaaagcgttgagactaacattcttcaaagtctcatgacaaagccagatcattctaagtagacactaggaagcttagggtttgtttttgtttattctttagagcattatgctagtgaccaaacaaggtagtagttctattctactttctgtctctacgtcttgtagttattggttttatatgtggaaggtttctttcatctagagtatgcgtaaaatattaacatttactttcttctaatctctaataaattgattaataaaatataactttccaacttatcaattttgacacaatctttcaaatgttaagctatgtcaaaaaatgtttttctttttcttgatattatacttgcgcctcaagatgttggcctttaaggtgtttcaaagggcattacaaagcaaatctgatcggatctatgaatgtgtgaggttgctactggtccaacgtttccaaaattttaagcgaaatgtaaattttaatctttaaaataaacaaatcacaaaataatattacagaaacaatagaaaaaataatgtcaaaacttcataaaatcaatctcttaatagaaacactctgattcttataaaaaaagtggcggaaaaacattttgtggatggaaagtagtctgataattgagtggtatcatgaaaagtatttgaagttgggtacttttaaatttagactctcatacatgggcttatctctcacctatgatatgggccggtccgggccaggtgaacctagttgacacatacctgcatgatcactttttgaccaagcaacaaagacaaatctattagatgaccgacgaagagaaccacgtttttcctacgttctcctccactataacttgcgcattagatacatgtcatacatcattattaatgcatctaattcgatcaagctatgacgaataaccaacagtaactaccaaatttaacatttgtcgtttgtactcttggggcatatacctcagaaaattataaaccgttggcccacttcacgaattcgaagttgttaatgttttcgaccaatcaatcttgcttcttgttaaagctaatcaccctcacgcgatatttcgtattagatccttacctatatcattagtccaaatctctagacatgtgcatagaatatattaaaatcggccaaacctgaagtagtagtatatttgctcggaaaagacataaagaaaacagggaatcagattcacgcccatctttcatgtggactacaacctcataacatgtagtattatataaagatacctacgatagttttcaaaaatatccctaataaaacaacactccgatccaaacaagaaagagctagtttaagaatggtacttggaaactcctccagtcacaaatctcatcaccatcaacatcataatcatcatcaccgggactcgatgaaggagttccgagctgtctttgcagccgaagaaccaatccagggcttcgagtatgcagatatgaggaggtcaaagagcgagaatatgggcactagagaggttgcaaaagcagaggatgttgacaaagaagctgagcaattcatcaagtttgagcatacgaagttcagtaagtggatgactaagagcgcctagtctatgtggacgaagaataaaaagtaataaatgacaaaccataatatatagattgtattgtatgatttgtgtttcttcttctggtttttatttttgttatgtaacaaaatgggtgctgtttcctttgtctagaaaggtgcatggaaataaagactacaaattagtatatttcatgaactcttggatcttctagttccacataattgttttttccgataacatgcaaaatctggtttgaattggaattgtactaattatgctacaagttatggtcttagtttcacatttaaatgcaagactgtcacactaatcatgaatacatgagataaaatggaagatataagaatacaattctttctaaaatgttaaaataaaagagagcttaaagagttgaaaatatgacatttccattattagagaagaaaaacaaacccctttttcaactcaagaaaaatggggaaaacattcacacacatcaattgtatagtcctttattatgaaaaaaccccttctccataccaagaaaaaagaaggggaaaaacataaacaccaaaaagggtaaaacagaggatagagaatgtggtattttcctatagcaaagcaaaacaaaaggaaagtgtaaaacaagattccaccactagagaatggacctgcaaagagggcatgtggtgtggttattaccaaaccagttgtctagacaagctctgtggaagaaatgcttgcaagaaaccaactcactcacttcctcttcctctttaaacccacaaaggcacacacaacactccacacctttctcttcttcttcctcttctatgttctcacatagagacttgaactgtgttatcgagattcttctagtaacaaaatcatcttcaggctcgtcgtctatctccatggaagattcagtctcggatgcaacaatttgaaaaacagacctcaccatgttcttcaacagagtgattgaaacaaccgtgttcatcaccagaagtggtagtactccttctgacgctgttggaaaatgcgagagacccatttttttataactaagattatattcacagagatagaaactgagagtctttgaaagttttgagacacgaaaaatccttagaagagaagaaatagagaggaagtatagccgccactcatgttccggtgggcgattgggtttattaagcagcggtggtctaaacacgtgtcaccaagagagaggttatcgttagagactcatctcccacaatttgattgtgactcaataataggttggttcgtcttttataaccagaaaatttaaaataaaacaaaaactctgttttttttttttttctgtggtctgttttgttgttagacttctgacacgtattgtgatcagccaaccaagttgtgcgttgtggagagctccttgttctcccgaggtcgattcttgatcgacacgtggaagactcaacgtttcacggttgcatgccacgtcactagaccagacatgctgacacatgaaaaattggacaaatctttgtcaaagttcacacacctgttctgtttcagctcctcacaatctttttgtgattaaaatcattcacagtcctgtttctattattcaatggaatctgatcgttgtgcggatcaaagagattggtatctctataacctataagatctatatgtaaatgttatatagcaccttaaaatatcctggctacaactagtattggtaaggtactaatgagaagttgttgaattggatgggctttcaacttgtaacgatctgaaataatccttttccgcggcttccactctgttctcgaacattttccattccatttgacatctatccctcacctgcaacacacaaaagtttaagacagattggtccatttggttgctttcttgtcaaggtatctagaaaatctaagatagccctaggttttgttatagggaagagaacacatgaaagctctccaaaacaagaggaaaatttgtattgagacaaaaacaagttttgcttaccccttgccatggtgctttcccgttatctgctttcccctattggcaagaaaaggagaaagaatgagaaattttaattggttttggaaaggagaaagtgaagaagttaagtaacctggttgccaagggaagggataaattgatgaacgatccactgtgagtctactattcctatcttctcaaatgcaggctccttcattttcacatataaaaatgaaagcctcttcattaattgatcaaacatgcaagaacatttgtacaaacactaagcaacaacatagtgaacttttgtgtacctcaacacatcttctcagtgcaaagtcaagaccccaaccgtgaaccaaatcattctgtttttggttcatatacaattaggtgcaagaaggagacattatatgaagatatgaaggagccaatagataataaagtaagtgtaacctggatcatatgccacacgcagcgccatgcatctcttgagaatacaggagccattatctccacgaatctgtttttttattaaagacataacgaagttactaatggtttaaatatgtctgaaacttgagtttgatagagacgttttttgaaacatacgcagcacatggaggccggggaggattagagcaccagtcgagtttctcatctgtctccctgctaaggttcaagccatattcagaaccattttgtaatgtaacaaaaataatctagagaggccgttatatatacttgtggacttcactatgttctcttcttttggtgatctgccaattaaacccagtctctgggtccaaaccaggctgcgaaatctcaaggtcgtgcttcttcactatgtgtatgtatctacaacaacaaacatagttagaaatttttaaatggaagtgagaagagtaagagaaactcactcttctgcattaaagtgatcaactccaagatcctcatcccatatgaatatataatcgtatcgtgctacaatgtccgggtgcaagaatctctttgcataccaccttatgttcacaatatgagagagtcaagaaaccagataaaaaaaagtggttaaagcaaagatattgataccattttgtctgctttttgacacttatgtgtattgcattcctcgaccactcaaactcatcattccatgcacttgttacgccatcataatgaaacagaacaatagtaaagttctctgaaaactgtatttgagtagacaaaacataatgagtttactattaagcaaaaacagaaaacaaaaagtgttatatcaatcaaccttgctaacacacgcatctatattgtgtctctgattataacccactgtaaatgttgctagatatctcggttgtttcactaaatcctgaggaaacagagaaaataaaattgaagctaatgttcattgatcacatatgaaagatgtcatatcaaaagagtgaggaaaaacctcatcagggttcccccataatctgcgcaagtacaagtccgattcggatgcaatgataccggatggtaatctctcagcgcctcgaggatttgatggttcccatatctgcaccaaaacatgccttaaactttggtttttgtgcttaaaacatgaaaaagatgtgtagattcctacataaaacatgcctttgagatatcaatggctttgtgaggagttgcaattccggaatctctaagtgagatagcaatggagcgaagaaggtttctcgggagacttgtctacacaatacaaaaatggcatgcgacaaacgaagtataaaatctaagaagtaaaagatttgaagagaaataagaagaacctcagtgatccataaagatggaaaagatagtccaataacaatgccaaaagctatagcaaacaatgctgttgtaaaaagcttcatgctatcatctgatgatctcctactactaattgggctgttataacaacaatcatcaccaatctgattttagagagaacaataagagaaacgagacaaagggtcttttttacctgcgtgacaagattcccatagttaggtttttattacaacttttgattataagctccaattgtcatcaacaccatctcactcctgtttatcgataaaacaaactgtaattaatttcttgagctatacgatcaaaacaaagcacgaatgatctgattaaaagactcaatttgctttgtcacctagattaacaacaatgctacattcaacgtgtgattaaccataaattttctagacgacaaaacacgaaggtgatgaaaagaaaacttggatttgtaaaaatgacattacaagtagaacaccacaaaaatttgagacgagaaacgcttttcgatcaaattagtgataagttttttggagatccttattcctccggcgatctccagtattcaagagcagacgtgtggaactgaaagctgtttcgtaagctcaattttttcaataaaaaatgattttgttttgagaaatttttataagatttttctatgatatgactagtgatttagcacacatggaaaatcgaaaccaaaacggggatgttgctcatatttttttcctatacatttatagattttttcaattaattggctttttgggtacttaattactcatatggacaaaaatttttactcattatgactcctcctcaccaaccaagaagataaatattaagaattttttttactcattataacctcgagggtttgatttacatggttgaagggttcaatagtcaatggctataaatataaatatcaccgtatttttggaaactatatatatcacatttactttttgaatcgaaatcagtattttctgcttatatttactaccatgttttttaaaaatgtatctagaaacttatctaccagtctgtaacatagattctctcccatgctagacttggtcatttcgaaagaaaaaaagtgtagagaaaaagtaaatattaactgatatctattaatgcataaaaacctataatattagctgtcttaaactttttaaataaaaaaatagttatactatatatagtgctctattttcaaaaattgaatatgtatgttttaagttgaacaacaataacttctgaagaagtaacgaagtcaaccttagctaagaaactgagatacataaatatatgattttagattggataactatttaggtttttaacctttgggggttcatcttcaaaataggtgttattcgctaagtatatattttagtatatactaaaataaattctgaagcaggtcatggcaagaccagtctagaatcaggatcatttgtgatatactttagtcatgtataactttaagagattcatcatttgagtgagccgttgcactctaaagatttcgagcaaaaaagaatgggaagttttatattttattgatcactgtttgggtgtgggaaacatcttacttttcgccaagcctccaaattaaacttctttaactcaaacattacaacatgagaacgtgttaaagcttttaaaaacatttttcaggtggtatatacataaaaatcaaaaacaaatacagagagtatggttttggtatacagtaccggtttttctcatagtagaggttcagcgagttccatctcgttcgcactttcttgtcccgactcaattcttcgacttcccacaaaatcaatcccgagaagttgccatggccaacacgcatatctagctctgtttgaagtattcatatctcgatgggtttctaattcttcaactttacggtttagttcttggattctttccctcaacttagtcgccctattgtctgcgagtctcagagatctctctgctgcatcccttgcacccattgctgctgctgccgtctcttccttaaactttagtttcttttctgattctattattgcttgctttgcctcttcaagttcttcttttagcacatacagctgaacaaacaaagccaataagagttaagactatcattccttagttcccaggaaatgtgtacataaaaacagaacagagcgcattgataggatccagtaccggagaacaaaaaaccatcatatagaactaccctcagtgcaattcccaatcccagaacctaatactcctaactcattctcctaaaagtctcttagcttgttagctttagctaactgactcaacactagttgctgagcttgtcaacatagctataagccattacaaaccacctagggtaattacaatgctcctggcctcctgcactagactaacccaaggacttataacgcacctgtgacgtgaagtcttgttcaacagctccaccagcagcagcctcctgctcggctgctactttccatcttgttatttcttcttcagcagcagcaatgtcagtcataagcccttcaacctaccatcccaaggaaccaaactttaaacaaacacttgcaacagagtgttacatactttgtcatataaagacaaatgatgcacgagaaaatcagctttcacacattggcaaagcaaaaattcactcacgttttcgtttgctatcctctccttttctttaagttcttctatttggcgcattctctggttaagctcctttgtctgagtgtccaattgttttctaagagaactagtctcttccctgttagatatacacaaaaacaaaatgtcagcataagttgcggcaacaaaagcaagaaaatgatcactatggacggcaaactacactggacagctagaagtatcacatataagaaaaatatgcattacacaagatatcacataaatgcatttaagacagttactttcatggagattcatgatacatcaagtaccatgttgcaagcacatgtggaagttaagttcccaatagaacgctctttggaatcatattcctactatttggatttgattgaataataatgacattgccttatggttcccaggccaccccatcctatgaggtaaaactaagcatttactttcctagtgaaacaaagtgaatgtcgtctaccaaaggtataagatatagagacggagttctgcattagagagcttgccttgatgcttccaacaagtgctgcagttcgacgatctcgagctgagatgccttgacaatattctccaatgtgctggcctgcattccaatgtggagacattataaggtacccgaatgaatgaagttcataaaacataataagaactaaaggaacacataccagggagtatatttcattgtcttctttactatggtcatgagtattatcactacgagagtcctgaaccttcccatcctttaagagtttagcaaatttagaatcagtaccaccatccctcaaaccattctctgcagcttgaaacaattctcttttttgagatggctgctctcctatcacccttttggacaaagcgctcctcagtaaagtaccaatatgttctttttccttaactaatagacccacagtttcattcaaattcttcagttcatggctcttctcttccaccaaactctgtgctttcccagaaaccactttggtcagttcgaagatggattccatacctgctaaagaagctcgaatgttctcctccatctctgtctcttgaggcataaagaaagactcagacaaatctgactgttctgaactattcccgtcaactatccttacaacctcgtaaagctggtcatggatccttgacacaagattaagctgatccatcaacaaaggacgttgagctaccatcttcagttccatagtcttcaacttcccatcatactcatcaaccaactgtttcagctccacaacttcaccttccagcaaactgaccttctctaaattacctttctcaagttcagcaatcctcttctctttctcactcacacccctctctaaatcatcaacaatcgaagccttttccgcaacctctaatcttaaattactgatcgcagattccaactgagaaacctcaatagctatctcataattccgttggtccatctgctccctagcttcattcctcgactttgcagtcgtatcaatctgcctaacaagctcttccacgatttcattagtacgcttaataactccataagctacagaagtcaaacctgtatatttctgagacttgggaagaccaccatttgaaaaattcttaaagctgctaactttaccagatatcttctcaatcccagaaaccaacatatgcgaggaattctcaatctctgcttttaaaccatctctagatctcaaagcctcatcaagtttcttcgacatctcatccttacctttattaacattctcaagctcatttgttagattctccttctccttcaatgcttcatcacgttctcgcttagactcgtcgcgcttcttgattgcctctacagcaagagcttttaaccgattgaacgaaacctgaagctccgatttcgaactctcagccgcttctcgagctttcttctctcgatcaagctccgctattagctccgttatcctctcatccgatgcttcttcccgcggcgaatcctttaaaacaacaggcgctggttcatcggactcgacatcgctgaggacagcatcctcatcggctccgttagccatctcaccgtgcgatcagtgaagataatttagtcttctctccgatctagattttcgtagtcgtaatagtggcgtgcaaggaattgacgcaattgcttcgccaaggaggaggcaaaattagaaaatttgagaatataactttctaccaacagccttctctgctcggaggatggagaattcagagaggggctatatcggagtaggtgaaacaagagacgatcttctacgacggaggaacttcaaattctacggcgaagaagacagaagaaagcaatctcgtcgggttagtttactatgtctctcttaattaatttatttcaattaaaatatttgggctttggtaggctaactgtttatttgttaggcccaactgtggcaaaagttaagcccgttttatttgttaggcccaactgtggcaactgtggcaattaaatcaaaagttttagaagttttatttatgtatgttaagcaattgtgtttgaagttggaaggtttttaaagtaatgttttggtgggtttggttttgaatttaggagcgagatcattcaacaggcaaagcttgcattacattggaacaagtccaaacccgtaccagcaagcgatatctgtcattggaaagactttatatgctttcgatgaagataatttgattccatgttatggatttggagatggtaatgactgcagaacatagacttgttagtctttcttgtgttaagagaaatgtttcatttaattgtttttatgggtttgtatgtttgattcttgcagctacaacacatgatcagaatcccttcagtttttacccggatgatatattctgtaaacaatctctgtttgattgagattaagtgggtttgaagatgtcgtttcacggtacagagagattgttcctcagctgcgtcttgtaggttgagattaagaatctctgttttctttttctgctgtgtctgtgtttgtttgttctgttacctgatctttggttacttctgtcacagggccgacttcttttgcacccattatcgaaagggccatgacgattgtggaagaaagtggagggcagtatcatgttcatgtgatcagctttcattattataagatttagagctttttaaatagacatttcatgtacatacaattcgtgactctcatatgtccattgcttgaagtaaactagggttggtgcacataaaatccaaaccgaattagttaaaatagtctttttagttaaccatattccacaaacaaatttagatactaaaacgattagaatatcgttcaacatcaattatttattagtactatattgtttttaaaccgaactaccttaccagtcacgaggctggagcataacattcataccgttcttcatgtacaatgtggtggtgagtttgggaacaatctcttgtccttggacgacttttactgaatacctcatcaagatcgctgcagccaccattttcatttgtgtatacgcaaacttcttcccaacacacagccttggacctccgttgaacactacatacttgaactgatcttcgctcacaattcttccttctttgatccatctctctggtttgaactcttcccagtcttttccccaaattgattctattctccccatagagtagactgagtagtgaatcctagcgcctttcttcacccttgtcccatcgggtaacacatcgtcttctaaagcttgtttcatctccattggcacggaagggtatagcctcagtgactctgttaaagcagcttgcagatacaccatttccctgaaatcttcagcctcaaactgatcttcagtttcttgtgttgtaagtttccttttaatctctctgatttctcttaggattctcttctcgacttcaggatgtttctgaactagccagaagaaccacacgagggccactgatgtagtgtctcgacccgcgattatgaaacttgtgcagaactctctgaagtacttgtcagaaaagtagtttcctctagtggtatcttcttctttctcgtactctctctgcataaggcgtgacaagagatcagcgtaatcgttcaagttcccgagtttcctcatcttgttcctcctctctctcactgtcttattcgcaaacgcgtgaactattctaactgcattattcagctttctttcatacccaatccctagaaacctcattggcttccacacaaaaggaggtatcagaaaccttgcaagtgtatactccgtggcgtcctcaaaagccttagcgaaaggaatctccggtaaacctgtctctaacgatcctgggtaaacaccaaaggccgatatacatatgttatcaaaggtaaaacgcaggagcaaatcttgtagatcaaagactctcttagaagtagacaagttctccatcagcggcaccagcttctggtccaccagatctctcatcgtagtaaacgtgtgctccaagaaacgagaagaatgcatctcggttttagccacgcgtctctcttctttccaaagctcatcatcagcgttaaagatcccatcttcaagaagatcacgaaacctctctctataaaacgcaccctttggatagttcttgaaattggttttgagaatgtgctcgacgtttgcaggatctgcggtcatgattccgtaagccccaccgaaccaaattcctcggtaatgaaacgtcccaccagatctgaccacgcatctggtgcaccaagtaaacagatcgtgtttgtttagcgccaacatcggtatgattcccaacactggccacatcactggcccacctttgctcactaacttctcacgcaagtaactaagaagaaaaagccctactagggctaaagctacgtctgataaccttaagtgagtgtatacccataccaccgcagaaatcaacacgttcatcttcgtcacctcagatttgttttcagtatacagtggaaaaaacacaaaggataaagcttttgggtgagttgcaaatgtagatttaagatggcaagggtaataaataattcaattccgagttatgaaataacaatattattaaatgatcacaccaacttcattagaccctaataaactttattaattcagctatatagttttactgaatgaggaatcataattataatagtggggttaagctatacgtagcaggttactgattatatagcttatcacaaaaatgtcaagatagtaatgtgttttacagaaatatacactttggctgattatataaactatcctaaaatgtataacgcaatgtttaaaaaaatgtttttgctgcagaaattatctctacgccttagataattcttcaacataatggttttcactttcacatatgataggtttgttaaacagacttatcttaggattggaatctatctggcagggtctaactcccaaccacttaaagcgtagggtggaggataaagggtcgtctattctcagcaaaaatttcatcaatgctgtaactaactatggacgtgaagggaaaaaaaaaaaaaaaaaaagagagcttcaacttcatagatcatagtactaatcattaatagtggtcattacgaaagtattagacattaattatggtctccccttctttacctcttacaggattggttttcttaatggagttgatgagtttatcatctaacaccgttaaacgctattgtttctgtatcatcttgcatttcggctaaacttgattactttcttaaatgttgaaaatcgagatatgatgagaaattggtaaatctaacggtcgggtgaatagatgaaatgacccattatattggtgaaacccaataacttagggtttagaagatctaaattttggaaggtaattgacaaaattctttgtaagtagaactaaggactttatgtcatattgtcttaccaattgttaagttttatcttttatctatgggcgaataatccacattggaaaaatatataagaagaggtttgaatagtatataagatataatagacatggatctatctattcattacgaattggttttgagttaaaagtttataagaagtaacaccaattattttcttaactaacttaaattcagcactccactgttactctaatcgattacatctttctttaattttctccaatccttgaaaaaacatatgagctggtaatggtattatgagctatgccaagtgggctacctctacctataggttggaccaacctatttgtcccgatatttttggtccttgttttgctcccacacaacacaagtgacggcctaattctcttagattatttttctgtatcgatttccaatcatctaattcttaaatgttgcattgtagccgtgatattttatattcagtatacttcgtcttttgcatttcgtgtcaatactattttacttaaaaatttgatagaagtatttaaaaactttgattgacttctacgttatgcaaaggaaatgtgttgtcgtagaagtttttttaagaaaaagttcaattattgtttagaaaggagtgattaataactttcagatagatttggggacagtcctggaaatcgttatcaaattaaattagataactttcaacggttgatatctggattaaatattccattatatatagtactacagtttaatcttttgtcaaacgtattattaattggattatttcctacttgccgacagtcaacgctggtattaaaactcatacgaacgcatgcatatactatagatacacccgattatccataaatgtagtgtgaaacgtagagaacaaatttcaaatttagaagttattagtattgatttgtgaggtcgttaaacagtagggtacttattagtattaactttatttgtgaggttgctaatcgctgagacagcacacaccacaagtcagtccacaatgatatatatcgtagttcactactataaaatatttttgtatgtatgcacgtaacgtatggatatctatagattaaaaccaaacaaatatctttagttgtttaactataggcttctatatttgtcaccttctacttaacttatctgcagcaatcgagacgcacacacatgaatccattccaacagtatattcgaacttagccgattctcatgtttttggtctgaggtcgtaatcgggaacccatcctctccactaaattataaaactacaaaagaagccaaagtttgggccactcgatcttggattttaagagaataaaattattgatcgatgtgagatcaatatctaaaaattctaaaaagggagtatatcatcatcacgataaacgactttgtttgtaataagacgagaccaagttgggcaacttgcatgtctacttttcattctcacggtcacgtacacgtacaaaggtatgtgccaagtttgtcaactttcgtcacacaatatatgtcttgtctactgattccatttccttgtaaaatgtgtgatggacagtctcatgtatttgtcttgattaatacatctccaatagcaaaagcaatatactatgatttatataaatgtaattacgtgattatttctatatttataacttttattattatattagatgagattggctcgtatactcaaagttagatgatacaaagttttaaaaagcttttcgaatcacactgttttgtataatgaaagtaaattataaaattagccgcacaccgtgattggtattgcggtaaggcgttcaaattaattgctctctttggcgaggcacgtagctacaacgagatatggttgttcgattatgagccattcattcatttaaaaaaaaaaatgtgtcattcatatgcacctaatcaaaagagtcagtcacaaattcgctagtcgtagtccgacattttgtaactttgatcgggactccctatgcaaaaaggtatatatctcaacacaaaagacgtgttacttggatatgaacgaagaacaagttattcttgttttgaccttggattccgaatgttcacaatgatgttgaagctctaagtgaacttgtttatgaaacagagtctaaatgtctaatgaacttgtttcagagaacaataagggagaaggtggtaatgtaacaagttttgggcgtgtgatatatcacataaaaccatatatatttgttcatcacgctgtctgatgtcttgataatccctctcctactgaggtttaattttctcccttgaactattcaaagtccctaaaactatggatcaaatagtactatgaaatgtttttgttgctgcagactatgatccatgaatcattaaaacttgtaaaagatagttaaattgaataatctgatcagtattgtatacccattagttgcaactgcgacgtccctatagttggactcgagaactattgatttgttgacattaacttttttcttctctgtatataaagtcagaaatatgttgaagaatcaaaactgtacttgtttgaccgaaaatagtaaagaaaatgcttgacttgtatcatgcaatttctgtaacactatttacaggttgcattttctgatccgttttaatttgtccctttttttacacattacgattgttacccttgtttttttgtggtttttccaagtatgtgtttttaaatctttccaaggattttttttttcctatgaatatttaaactttgtactttcttaatgtatgcaaaaaaatataattccaattttgtggtcaacctatgaaaagagatgtttcactgtccaaaattgtagttttgctttgtgtattctctatgaatggactacactattacagactgtaagtgatggtgccttcaataatttaatcttgtccattgctatataaagttcgaggcctttattgtccgatcgacctctactggaagatcccatttgtttaagttaatggctaaaccaatttagataataaaattcatcaatcgtagctagaatcattgttatataaaatcaagaaaaatttacagaaaactaaaaagtcacctgcgaagacaaactgtattgattaataaaccagtgaaatttataattacaattcaaaaaatttatctttttcaatcaaattgtttgacgatacaatttgatgatattcagagtaatgtgagataaatgtaattaaaatcataaatttatgatgtaattactgttagttcacattttgaagatattaatatttagttttcaccaatgataatgaatataaattccagtggacccggcatgtcagttatatgacttatgaggcatggtttatgatataacatgtcttgttcttgttttctcatgttttaggttgtttttcctgcacggaatatcccagtataatggctttgattaaggtaattttactaacaaaaaaacatcaaaaacaatacctccaatatttattaaaccgtaattatatatagtatgatttatcttctccactcctcacatcaacactagagatgaaaaacaactaataaagtaccttttgtcttgataagtctcatttcggtttaccaaatttataaaataaccacagttatggttttcttatgatcttatcaactatcacgggccatttgacttcttgttttggcgtaacccaatcaaaatttgtctttgataaatttcaattttggttcatggacttttgcatgcgaatattatataatgagtccaaacacaatttaatagtatatttatctgacaaccaatcataaacctataataacgaatctaatacaggagataagcaaatttatcatacatctccccatagattttctccaggtttcaaagtagcataggatcatcttcatttctacgcctaagaacatgtgcaggtgtgtccacttgtccacttctagtccattgtatctaaccattaataatgttccattactaatccttattctaataaaattattgataactatgattttttgcgtaaagtgataacattattgataaccttaaaaatgcacaaatatactataatgctcaattatttcttactcattttgtgtaaatgacttctgaaaaacgccaaattgtttgttcgccgaacaatactaaagtactaacaaataaataaaacacaccgacaaaagaacaaattaatgccactaatttattgaacgagattcgtgtaaaatgaattatccggtttggtgacggacaccttccaacatttaacctctccgtcaagacttccactaatgatcgaaacgacatcgtctaactccttttctctaaccgccgccaacgacttaaccggcttggtatgaccggaaagaacctccaaacaactataactagaatcgggtccacgtcgccaaatcctgaccgtccgatcagctgatccactgagtagcaaatcagagacgttgaacaagctaagtattgctttatcatgtcccctcaacgcacctctcaccgccatgtaattggaagtatcctctctctcccaaaccaaaatagaccggtcacacgaaccggagaacaaaaccgatccgtcgtcgtttaatgctaatgcgttaaccgccgatttgtgcttctctaaagtcgcaactaacgtgtgacgtttctcaccggtcggtttggcccaaacccggatacgtctatccgcggatccagtgtaaacggtgccgttagtagaaacggcaatggcattaacggcgtcatcgtgagctttgattgattctttgcaacgaagatcggaggctctccatatcttcaaagtcttatcccaagaaacagagtaaatgaatccgtcactaacggcgagagcagtaacggcgtcagcatgttcgatccagagacgtttcttatgacggcgtacttgaacgtagtttttaggaagagcgaaacgtcgtaaacggtcgtttaaagtaggaagcgtcgttaactgtttataaccgcttttcgccgtaagtttccaaactccgattttaccgtcttgatgcgccgtgaagattttctcaccggagaagccgacggacttcacggttcctgagaaaggatcttggccgttgaatgtgtcgagatgagcacacatgtcgcgatcgtagatacttacttcgtgtccagacacggcgaagaggtaaccaccattgacggcgagacaagttacaggaagactccgttcacggagtttaaacgaggaggtaacggagtgagagacggtgacggtggtggatgggattttctgaagagagggaactgaaggaagcgtttggagagagagactgctatgaaggctgcttgagccggtggttacgtcgctgagtgaggaagatgacgtggcgctttcgccggaatccaaatgcttcggcgatttgggtattcgtcttctgtcggaatcgaacagttttgagataaccctcatggtggtttcgatgtttggtaattgaaaggcgtttctatcgattgataactaaagtgattcagaagaagggttaggtttgtgtcggagagatgtatatagaaagaaaagaagcgcgtcgtgcagagagattacgccacgtggcaggtacgtacagagcggtgcttactaaatttctgggtgttttcttgaactaaaaagatagatcgtacaattttgtacttatagacgaccaaagggtattatggtaaattgaaagcgaagaagtcaaatactgaaataccccaatttgtgtagtagaaagaaacaagaagtaaagaaatcaatcaaagtaaaggaaagagattgggttttgcgttacagcattgaagaggttggatggtagtgaattggcagtatgggtgaaggaaagaagagtagaacccaagtaattatgagccgattgtatattatcaatgcctaaattacgattaggtaaggtttaggaagaagatattatagaagcattttcttgaatagtggtgtgagttgtaataaatgggtgtgagtgcataagtgggaaacttggacgtaaatgattataagaaatgagaatggtcacatccgttgctggaaagtggaaaagtgtggctaaataaagagagacacaatgaattgggggtcaatgtcaaaaccgagctataatttaatagccgatcgttaaccaaatgatatttagttttagaaaaataattagtacgacaggtcggactcgatcgttatcgatagtggactgggaagtagcgatgagtacaagattgccagcccaaaatagtgaaaggttagtaggaaggctcttgagcctttcacttatgtttctatgaacattactttgatttgtaataaggggaaatattggctaattacatgagctatcatttttgtcaccgttctatagacaccatcgccgttactttcagcttacaagaaaaaaaaacatgaatgtcatcatgcattactgtgtagtcaaatgttatgttctaattgatgtgtgattcgtttacttcctcacgtgaaatggaaatataaaacggtatattaataatataataatatagaacacaaatttgtgcggaagatgtgaaactgctgtctgactgatctttccttgacacaaaagttcttgccactgtaggaaaacatgattcaggaaggacttttgtttattaattctaacaacgtttccctgtaagatttagcactcgtgtatgagttttaaacttctgtaaagtgtaaacaacttttctttaaaaaaaaaactaaagtaaagcactaaatattcaataaactaatacatttttcggttctgaattaagttttagggttaatcaacatatctaagaatttcacaagtctatcaaatattatagcttcaacataatttatggaatttttattgtaatttgtgtgattagtttgtttagcaatttggtactactgtttttacaacttaaggtccgaatagtgacagcgtatttggcagtgcgagaaaagcggatttatattgcagtacggttcaactgcggtacatgcgggagaaatatatttgcggtacaagtgcggtttttatagcataagcggtacgaaataatgtttgattggtaagaaaataatttgcggaatttgtttgattggtaaatagatatttaagataaataattgataaacaaatatattagtaatataaatttaattataactacataatttcatttattgttaatgaaataatattttcatctagtatctttttagaaatttgttatagctaaacctataattttcttttaaattattgagtaaaaattgactaaaatgattattttacaacttgttaattgtcaattacttctagtaaactgttgtatcaaatcactcatgtattagttagtggttgttattaagtttttttctatttttataaatttaataaaaaaaatcactttttttctttgtcaagtgcggattttgatttgaaccgctgctcattacttgttggataaataagtgcgttttcattgattaatgttcttacctcagaaaacgcaacagtattttttttgttttctgaaaaataacgtaattaacaaaataactgtgattggtgacatattgaggttttccaaaaaagctattcaaatacgcacttatatatgtctccaatcaaggccttagggtcgaatggtgacagcgtatttggcagtgcgggaaaagcggatttatactgcggtacggtccaactgcggtacatgcgggagaaatatatttgcggtacaagtgtggtttttatagcataagcggtacggaataatgtttgattggtaagaaaataatttgcggaatttgtttgattggtaaatagatatttaagataaataattgataacaaaatatattagtaatataaatttaattataactatataatttcatttattgttaatgaaataatattttcatctactatttttttagaaatttgttatagctaaacctataattttcttttaaactattgagtaaaaattgactaaaatgattattttacaacttgttaattgttaatttagttctaataaactgttgtatcaaaccactcaagtattaattagtggttgttattaagcatttttctattttcataaatttaataaaaaaaaaattactttttttctttgtcaagtgcggatttttatttgaaccgctgcttattacttgctggataaataagtgcgttttcattgattaatgttcttactttaaaaaacgcaacattactttttttgttttctgaaaaataacgcaattgacaaaataactgtgattggtgacatattgaggttttccaaaaaagctattgaaatacgcacttatatatgtctccaatcaaggccttagattggtacgttcgtaggcgttcttatggaattttagaattttgttttaaatatataccctataatttgataagtatttttgaattaacttagatatttgttggaacaaaatgattttaagtgttgattagactcttgtgagtggtggttcaagttgaaatgaggatatttattttctttatttaaattttaatgaaaatatcatagaagagcaacattctcgaaagtttaaatatcttgcaataggtgtcaagttcgaaagagcactcctatgccttttgatctcttttactttaaaatcatcactttttacatggtcatttcaaaaacttctctttaaatcgttgaacaatttttttcttttcaaataataaatatctggacagtcagtgaatatggaactttctttatcaagtatgatatatgaatatgagaatgatgcattgatgctttgtatggttggttattgataggaataccccaaatacgaagtggtattttgatagataagactaaagagatcctaaagaaagaaagagatcgaaaaagaaaaaggaaaaagaaaaagaaaataggtattattagttgagtttaggaccaaaagtgcaacacaccaatacgaacccgtatacactactacgcgtacggctcttccttcactccttgtatgggtccctcgctgagcttctatagtggaagctccccaaacccaaccatgaaattggctcctcatcacattcacacctttaaaattccaatgtaatatattttctttctctggagacaaaacttattttcaatctagtctattagtttgagttattatttggagtttaaaaaatatgtccttttcttttatttggtatttctatccgagaacactttggctgattctctggcaaaggctagtcttaaatcttgtatcatctcctctagtgatagagagtttgagtaatcttaacgtccctaaatgcataaatatatgcattttgattaggatatttttttcttgttttttttttgtttgcattttgattaagatttatacacgatggttacaattttacttaattaattattatggcttttgaccccgaaatcgtatattattatattcaattcagaattttgtatctaaacaccgttagtgaaaagttttttttttcagtattattacaaagacaacgtttctcctaacaaaggagaaacaaattacaacaagatcatcacaatcatccttacatataaataatcttcgtttaaaataaccttcttatcataaaacaatgcccaacttagagtaacaagaaagaaccagcaatggatgtacaccaacgacgaccgcagagacgccaagagctgccgcaccgcttttggcagaatcagcagagcctgtaggcgcattgtcgtacgaggagtcacttcctagaggaccagccactgcaacgtcaccgtcaccaggagtaggagctgcatcgtcatcggtggttccgatttggtcatcggtgactggagcctcgacatgatcggttttggaggcagctggagctttggagggagacgctgaaggagatggagaggaggcagctgcggcaaggccaatgatggccatgaagacgagggcaaccacgacgacaatgttttggcgacccattcttctctctctccttcttacgtagaactcgtttaatttattttagggtttgaggtttattgattgtgatgatttccgaagatgagtttgatatgtatatatagttgtgttttgtgatcaagaccaaaaataaaatagaaaacgtttgaactaagatgtaggattaccttacaatccaatgtaaatctactggagtacctaaaaatggacttgttcagatatagattttgattggtgaacatgcgaatgaatatgaaaccattcgttcaacttcaaatcgtcgtattaacgagtgtcttattaaagaaccaaattatgatagtattgccatgaacattctattcatcttatatcagatgggctttaaacccataagcccaaacgtcttgttaggcccatgaatcaattccgatttacgattctgccatcaacagcgagttagggttttacactcgaccactttaagctctcaaatcttccagacattcttcttctcgcttttttccccatttcaacttttttttttcctctccagtgcactaggaaacaaaaaaaacccaagatctatagttcgatcggatcgagagaagctcgaaaatggcgctggcgttcgatgagttcgggcgtccgttcattatactgagagagcaagatcaaaagactcgtcttagaggaatcgatgctcagaaagccaatatcgccgctggtaaagccgtggctcggatccttcgatcctctcttggacccaaaggaatggataagatgcttcaaggacctgacggagacatcaccatcagttcgtttcttccttttgatttcttcatatctgcttttaaatttctagtttcgctcttgtttacttggcatagtgtttactatgttgatgccgtagtttgatgaatagatccatctactttttgaaaatcgattcgctatgtctgttaacttagctcagctctactactacttgtatattgtttgtaacctcgcctttgttttgcttttgcagcaaacgatggtgctacgatattggagcaaatggatgttgacaaccagattgcgaaactaatggtggaactgtcgcggagtcaggattatgaaattggtgatggaacaacaggtgttgttgttatggctggtgcacttcttgagcaagctgaacgtcagttagatagaggaattcatcccattcgtattgctgaaggatatgagatggcttctagggtggctgttgagcatttggagcgtattgcccaaaagtttgaattcgatgttaataattatgagcctctggttcagacttgcatgactactctgtcctcgaagatgtaatgttcctttttgatattcaggctacttttcaatagttgttgcttgtttttacttggtttatagtatactgtcttaactctttcttgctcattgttacagtgtgaatcgatgcaagcgcagcttagctgagattgctgttaaagcggttcttgctgttgctgatttagagaggagggatgttaacttagatctgatcaaagtagaggggaaagttgggggaaagttggaggacactgagcttatttatggaatactgattgacaaagatatgagtcatccgcaaatgccaaagcagattgaagatgcccacattgccattttgacttgtccctttgagccaccgaagccgaagactaagcataaggtggacattgatacagtggaaaagtttgagacattgcgcaagcaagagcagcaatatttcgatgagatggtacaaaagtgcaaggtaggttttaatttgtattaatttatattgtcagttggatgttgagtaagctactgaagaaatccttttgacaatggtcattagtaccacaatgcattttatgatatgatttatgtatgacccttatgattttaactttgcaggatgttggtgctacgctggttatttgccaatggggattcgatgatgaggcaaaccatctattgatgcacaggaatttgcctgctgtcagatgggtagggggtgttgaattagaacttatcgcaatagccacaggtaagtaaagtactcttaagcatctaatgctagtgtttgtatcagttatgcaaagctgatcagaaatttttctttttgtaggcggtagaattgttccaagattccaggagttgaccccagagaagttagggaaggtattttttttactttcactaggttttgcttgtaaaatgttaattagattttaaacagaccattgaaacccaacatttcctgatatatttaggctggcgtggttcgtgagaaatcttttggcacaacaaaagaacgaatgctgtatattgagcactgtgcgaactcaaaagctgtcactgttttcatccgtggaggtaatcgccttgtcttttgtacttattagcactttagcagcactgttttgacttttgaatagctgatgagagataaacatcgatgtactgaatctaatgccttctaagtatatggtggacaacgatattgtataactgattgatccaacgatttgttgcggaatatggtttaggtaacaaaatgatgatagaagagacgaaacgtagtatccacgatgctctgtgtgtggctaggaatctcatccgcaacaaatcaattgtttatggaggtggggcagctgaaatcgcttgctcacttgcggttgatgcagctgctgataaataccctggcgtggagcaggtaaaatatgatctttcctctttgataccctgaaatgaaatcatttgtttctcaaattgtaactctgaatactaatcatgtataaatacttcctcatttacagtatgcaattagggcgtttgcagaagctttggactctgtccctatggctcttgcagagaacagtggattacagcccattgagacactctctgcggttaaatctcagcaaattaaggttagtaaacgacgaactttattatctatatcattgacttgcttgttcggtgactgaacaaacattgggttttgatgaacaggagaatattcccttctatggaatagattgcaatgacgtgggaacaaacgatatgagggagcaaaatgtgtttgaaacattgatcgggaaacagcaacaaattttgctagctacgcaagtcgttaagatgattctaaagatcgacgatgtcatctccaattctgaatactgatttgttgctacctttgtcctaacctttggcttcttcggtgttttttgtttgctttctattagcttttgatacccttcgacatcgttatccttgacttgttccctttgttttgcaaccttctatttaagaacatcgtcagatcttaatttttgtgtgtacttgtccacagatcgaagcactcgtttgcattttcttttcgatttagtaactgatgcaggtctcatactgtagactaaactattatcgtattagtgtaacaccagtgaacgaggacaaaagtaattgtttgcttgtacataagaacataagaaatatgaaaccaagcttcgaaggcttcaaatacccatctgctatggtctttgtacacaaaatctaaaccctgaagactaatgtttcccactcttaagatctataaacttcgaaatctgttgcagagggactacaaggcctgagtaccaagatttctcctcgtcttattcaaatctcaattcctctttgtttgtttggcttcgccttaagacatgaaaacatgagtctttacctcttctctgtttcatgagaatgctgttgttctgtatcatggccaatgccgaatgtcccattcgtagtctcgtccttttgaatggatggcttcccattcacagctactgtgccatcggatgtttcatccacagcagaaagttctgtttttttatcatcttcagcgacaatggctgtatcagatttttcatcttgttcatgtgctttgtctgtattttgattagatagagctgcttcagctttctgcctctcttctttttctcgacgtctctttgcttcttgctctttcagcagcctaaacctgggatcacatggacgtgttagtacaaaaaaacagcttctaggaacgaatgatgacacattttagaagatttggttacctttcaccaggtttggggcattctggggtcaccttttcaccacccttctctcttggtattttcagttctgaaacagacttctgaactagtggttctgaaaaagaattctcaatttgttgtgttttatcttccttagtgaccaaattagtgaatttctccactggattcttagcaccaccatatttttgaagccatacttgctgtgccgtgctcaaaatgttgttggtcagcctgcaaaaacactttaaaactgagaagaatagcgagtggaagctgaccactcacgaaaaccacagaaaattagactcaccaataaagacttaaaccagaaggaactgataatgcaaaatagccaatcatcagtggaagaagcttagtcactgcttgtgagctcttcatggctggatcattactctgacaaaaaatgataagaaacataaatttctctgttgcatagaaggatttcgttgttgattgaattatactttaatggaatgagctttcagcacaggcaccaatgtggtacacattttcaacatagacgtaactactaatagactattatcacatattccacatgatgctatacctgcgaggactgcataatttgaatggagaggtattgagagaagacgagcaatagaggtaagacaagatatgctaatgtgtctggccatccgagaggtgggtgtccctcctgagaaataaaatggaaatttgtagacatcagcgatgaggtccgacaccactcccctcaagttttcttcaataattcattttaatcagttttatatgcttgaacaattaaactgaataagagttcgtaagaactatgagtctagtctagattccattttcgaaatatcaagtttcaaatgatacttacaatgaaagggaacagccatgagattccactgccattctgtcttgcagcaacagtcgttggaccagcaagagaaggtatccagaaaaaaccttccgttaagagcccctaaagttagaaacaagcatccaactacttgtcaaaaaagaatctcaaggcacttacagatacaaaaggatatagttatttccaggtacctcatctgcaacatttgagagggctctatatagcccaatccagacaggtatcgtggctagtgtggggaggcagcctaacagataaatgaaaatatagcttaaccataaatgttgtctcaaatggaaaaacatacgataagctgaagtaacatactgtacctgcaaggggatttattccagcaagcttatacaatctagcagtttcaagctgaattttctcctgcaaagataaacaaaaataaagaagctatttgtttaaacaagagggctatattcatacatagtaaagctataatatttgttatattcattagtatccctccacaattgtggaaccaatagcaacacacatgttcttactttttccttaactccatcaactaagaattgatgcaaacataacttagtatagcatcaggacaaataaaacccatgtgtacagtatagaagaattgtttttcacctgatcaccagcataccgttcctgaatagcctttatttgaggcgtcaaagatttcatagccatggcagattcaacctgtagagaataaaccaccaattcaataacatggactaaaaatgatatcatggcttagcagcaatagaaacaaactaaaaacctgttttttcgtcaatgggaacgtagcagccttaacaagcacagtcaatagaatgatagcgaaaccataggaataaggaacatgtacagttgataacccatctttcaaaacctgcaatccaattcaaaatcaatcatatagctacacaaaaattcatttctttctaaaccaaaaaagacaaaacttttaataccttgagaatagtttccatgtaattagcaataccagagaaccaatcattgctctgggtcgttttggtagtagtgccggcgacagattcaaaggtttcagaggacgaaacggcggcatcagcgatcgtgtacagcagattctcggcatggtccttgatgaaatcaaaagaatctggtctgaacccgagttgagctacgagagtccgataacgagacgacgacgacgacggtgtgtggctgaaacgggagcggcggaattggaggactttgcctgtggagaaagaagagaggataaggtgcgtcggctttagggatattgttgaagacatctctagggagaagaaggaaggagagttttagggttttggttgagaagacaaaatggggaagatttggattttgttggcagtattgttgtgttgttgtgttcttgctttgcgtctcagtgtgcgagaccgaccgaactgagaagtggagcaaaccaaattttgtttttctgattttttaaaactaacaacacaaactatatatctcaccttttttattgactttttctagggtaaatataacaacataaactatggctccgaatggtgactgtgttttgcgatgcgggaaaagtgcagtgcggttcaaataataacaaaaatacataaatacatatatatatgtaaaaattttgatattgttacaacactgttacgatacggttttggatacggttttagtcaccattcacaacctataaatcactcgttaacaactataaccaattaaattctacaacgaaaagtaacactaatatctatacccgaactttggtggagaaaaccatagagataaacatttcatgattgttagtgatttttgtttaagtataaaaatatgtgaaacatacgatgaaaagactgaaatagtataaattacatctaacaaccaataaatcaggagaaaaaaagaataacatatattggagggtgatgagtgatgatggatccgcatgtagtagatgtaagtcgtcgtcattgcccagcattcactactgttgcgtttcccatattcacttgtaaacttatattctgtttgagtggcactgcaaccataaataaatatttatatacattagttaattcaaataaaaattatagtagaaattcaaattaataagatttattgcaataagtttataaaaataaaaataaaaggagaatacgaacattctgattccgggtggcgcctaggtttgatgaaatatttccagacgccccaaccaccagctccaagacttaacaaagtcggtaatgaaattccaagaggtaaagctaagttgctgctgcttttctcctctcctgatttacctgaagaatcttcatacacaaacacaaacgtaccacatattagactcgaaccaacgatctcatatcatttgataacaataataacatgattattaacatccaaagcttcataaatgttttttttttatatataaatgatattgttatacgacaaaaactttgaaaataatctctagaaattgtcccaaactatattaagtgactattcttctaaaagtcctaatatggaaaaaaacatcttaattaaaaaaaatattgagaactgatatgcctgcagatttttcatcttcactagctttgttggttcctccatctccattattgcttcctcctaaaatatcgttcaaacgaagaaaagtgacttataattttagttttcagtttaagtcaattttcttacggagctagtaatttggagagcatgtttttgaccaatctatctagaaaaatgacggctcaaagtcggactaaaccgcctcctagtcggctatgttttacaatgaaagtttttggttaaacacttcccattcttctaacctttaagcctagttatgatcttgcatgttgataaaaggcagttgatcgtcaataactagaagctaaatcttgcatcctaattaatatacccacacgagttcctccctttcaattcagtatccatatattttaaagaaccactagagtagagttacttatatatatagatttatatattaatatatagattgatatcttttctacaaaacaaaccgttttcttattattgtcagaattagtagcctcttctattcattatttatctcaaaccaaaattattaaaattaaccgtattttacaacatatatataagataatgaaaagaataattaccggatttgcctccaccaccgcccttgcttgggctgccaccaccaccgcctgtgctaggggggctgccactaccaccgccagtgctaggggggctgccactaccaccaccaggactagggctgccaccaccgctcgtgcttgttgaattcgtcccgtttccacttccaccactattactaatgacatagagctcgagagcgttgatgagtgggtccaaagtcgagtctggtgtagcttcaaaagtcagataggcaagctcagtcttcaccacatccctcaaagaagcttgagtcactgccccgaaaggtggcacaattagatctgaacccacttgcttgtcctcatagtaaacattgaaagaccgcttttggtcagaaccaaggcttagtggttcggagaaataaatgacaatgtaaaatgtcactccagaaaaaggtagctttatatcatagaaagccatgtccttctgcgaccaagaagtccgaaggataatctctggtggtcgattgtcagctcctgttgtgtcgatagaagtggcagaacttgttagatgtgaggcaaaaaccgatgctggcatccatattctatcataaggatcatatgggaacctgaaaatgtgggaatttatgttagaaattcgctataaatttatgtttaggttttattcattttatatctttccttatcatgaagtcccgggactgatgaaagaaaaaaaaatagttaaattgatttttatttaccaaatgctagttggttgttccttgactttggatctacgtacggttagttttccaaatatagttaactccggtttaattcttccatgaacaacatggtataaagcaaactggtaatcgctagagtaaaatccgatgatttttcatatgtatatgtatgtttaccttactaattcctgcgcaccgtaggcgatcctttgctggaggatgaaaccttccttagggccaagatcggtgtacatagagtcgtccaaccttcgtacttcaatggtagacacaaaaggggttttgctagaaagcgtacggaaaaagcaaacactgatattcccgttttcaggaataaatatcgcttccgattcagtaacggtttcaaatgtcgttgtgacgaccgaatatcgatgtttaccatcatacactacatcgaatgtcggatacgtggattcttcatcataatcaccatagaggaatctcgtcctaactaagactttcccacctttttccaccggaatgttggtgtaacagttggtctctcccgtaggaaaataccggagtgtggttagttcagcagggaatttgctaaacggtacaaatttagaagtcaaaccggtggcaacaaagtctgtgtctcccacccatgttctgttgtccgcgtcaatgtgcgaacttgatgatccacagtcgatgcttatgtctgaaaccattccacatcaaactcaaatcaatcttactttgacaaaaaaaaaaaagagtttatatgtaagtataacgtaagttgaatagctaaccggctgcgttagaaagcattatgatggaaaaacttaggaggaggcaaataagagaagcttgagccatgcttgattcttccatcaccaatagacaagaatgtattttcttgtgcttatttatacgtgcatgctcaatattagtggaagaaattaatcattttagccctacatttacggaaaacattatgaaacaccatacactttccaattgatttaaaacatcctctcttagaaagaaacataattgtgaattcccgaatataatattcatagtcatgacaactttttgccaatgggattccaaatgtaaacttgttcctcggagtttaacttagaaaacaaacactatgcattttttaaaacatacattatctatatctgatacgatcaaaacgtggatcgaggtaatgacacaaaatggcacatttataaaaatgaaataattcgatgacaacaaaagaccaatataagaatgtgcaaagaggttttaaatcatattgttagtggtaaaggaatgttcagagtaatcatagagtggttgacttcgttagtagactatagaagttggatgggtcgtccgacgtcgaaagggtcaatcatacgtgatgtggttccgactaaaccaacaacgtttggaattagttacaataatttgttcgacagcttttcggctaatacaaaaacatacagttgtaagtataataacatttcaattcatctttcaacttaacttttggaaagtattggcgttaaatggcaatgttaagcaaatcgtattatctaccaacaaaataaaatattaagccaatgcgtacacactttaaaagtcagcctaatatatttgaattcaacttgaactttctttttttgataattgataatttgaattcaactgaacttttttaacgtttggaccgcttggctaagttaatttatctacaaagcaaaagtcatccagtcacatatgtcgtgttctcatttgctttctttttctatctagctaccattttttttaaaagaaaattatcgttctaatcatctttaaaatagtggaagtaatttttattttattttatcaagacaaatacaggtagaaaactatttgggatcattataaggatatatcatttcttcgaaatattggagcaatgtaaagatagataattcactccttagtaatgtatgcatctaaaaatagaggtttaacacacacccacacacagtagagattcaaaatagtaattccacatttgttcacacatcaaaataaagaaaacatttctaagatcataacaaatgtatttttatttgagatgtttgaaccaagctagtatattgtttacagaagaattttccaaaatctccgagtacatttagaacatataactaaataagatactcataggtatcaaataccaattgaaaatgaagaaatcggaaatgatcaccttcccacttcacagtttacactataatatggtaatctctagcagatgagctgcatgctacttaagcaaatcgacggttaagattaaaagctgcctttacacgcactttctcaatcctcattgtaattattcattttatttctcttaagtgttaaactaataaccttaacataattaatcattactattgggaacgtgtcgtgtaaacattagctgagatattctcaatttgccttgccttttagtacacctttttcttccctccattttcatgcacctgtagagagagagagagagaaagatttgtgtatgcaaatttctcattcgaggaaatgaagcaaccaaagccgattctgaaatacgtcttagtctctatcttcctcactctccctctcatcctgttcttctctatacaactacgtacacccgaaaaagaactcatcaggatccgaccaggttacacgtcttacgattactacatccaacgacagctcaacaaaacgcttaaccctaggtttcgtacgatatggatgacacgagactgggaccgtaagatcaaagtgttctcaagattcttccaagatctgaaacgtcaaggcctcttatccaaagactctaaatgtctctgcctcggagctcgagtcgggcaagaagtggaggccctgaaacgtgtaggcgtaaacgactcggtgggaatggatctggtgccatatccgccgttggtggtcaaaggtgactttcatcaccagccgttcgatgatgagacttttgattttgaattctccaacgtgtttgatcatgcactttatccggacaagtttgttggagagatcgaacggacactgagacctggaggtttatgtgttttacacgtggctctctctacacgatcggataagtattcagccaatgatctcttcagtgtggaggcattggtgaaactattccgacaatcggaggtggttcatgtaagaaatgtggacggctttgggttggatacagaggtcgtgtttaggaagaaaagggattcatccatcctagttcggtcttgaattatttgtttcgtacttaaatatattgttgtttttttatgtcacattgaaatattattaaagggcaaattgtgttctataagttttttctgtcaggcccaatgggccatatatttatccacgaaaggtggaggagcaaatacaaacttgaaaatatgatcattaagataaacttcttctgcgaagtccgatagagagacgccaagtatcaacaaggttatccggtacaagtccaacaagaaaccactgaagagaatgagcccaaaacggcgagcaacgtgatccaattccgatctgcgccaccgccgcttttgcgtagacttcaggcgacggtacaaataagctaggtttgtctatagctgccacttctgacaccatccttgttgacacgtataagggaacctgtccatttgatttacacacgtacgtgcattataacattaaatcttttacgtattacctgagggagtacaaaaatatgctataatacatatattggatagtctttgaatacaaaaaaaagaagaaaaagtacctggcactggacatcaataccaaactgcttatattccacatgtagagatcttgatagtgcatccacataactgcatacacgtgtttagagatttcttaatgtgacagagacaatctgcgctcaggtaggtaatataatgatatagttagatgaataattgagcaaattaaacaatttaaatcatgattaatgcaaatatctagacagtagtaatatttaatgcaatgaaaaggaaaactactatttactgctttcaaagtaaaaatgttagttgtcattttttacgaacaacacttcagtctagactgaggttttatcgtatgattatacttcaattccttttaagcatgcatttttttttttttttttaatttattttttttttttttttaagcatgcatttaccatataacagtagtagaaataagaaagtcacgtgtcttaatcgggggagatatatacacatcaataaattaaattagagacttttggatcgtcaatgctcaagctccacacaagtgctgctaatatgctttttcgtatttattatacaacaactaccaagaaaaggaaagaacggaatggaaaccttaatctagctagctagtataggtatgatgatgtattaaatgtgcatttggtgaaagaaaagtgaaagtggtaagtccttacgctttggtggcagcgtagatggcgtagaggggatgagaagggacaacaacggcagcgccggagctaatattgacgatggctccacggcggcggtgaagcattggtccgatgagtgatcgtgtgacccaagtggtggcttcaagattaaccctcaggattttggtccatgtaagttggtcaacctcgtggaagaacatggcgcgtggataagtaataccaacgttgtttatcaaaatcccaacttcaaggccttttatcccttcctcgattgctccgtatcctccttctgcacagtttttctttctttcaagtacatcttttctattccatatatagacttatgtatgctacatttcttgggttctatgtatatttatgcagacggaaaatagcttaaaattaccaaatgacataataaatatgcattaaacaactactaggtcatttaacaaaatatatttctaaatatttaattttctgtttaatcttgtaaatatcatgtatttttttccagcaaaactataacaaaatcgattgtttttgccctcttacaaacacataataagtgtaactatgtactattttttttcgcaaatctctgacaaacacacacctagatacaataagtgtaattgtgtactatttgaaatgattcatattgagtaatggtatatttaccctggtcgttgaaacaagaatatttattcaatattgcaatcgtgtactagtattaatacacacacacacacacacacacacataatgtcgataactatgtatagactagttctataggattgacctaaagtaagaaagtgtatttattattgttaccagaggagaagtcaaatggaatgatcttgatcttgatgtggggaaactcttgttggaaatcatcagagacagattcgagcttcgaaaggtttctgctgactaggatgaggttaaggccgtgtttggccagctcgtgagcaaaggcgcgtccgatcccctcggtggctccagtgaccatagcccatgagccgtaccgcttgagccgcttgggtgtgaggaggaatcttgtggtgaaccattttaggagaggaatgaatagtactctaaggagaaagagaaagcctatgaagcatacgaaatggagataccatggctgactctcggagatgcatgctccctgcatgttctgctttctctttctttcttttttcctatatttgttagctgattatttgtcatgacattttggtttggaactaactctttaagtaggaaaactagagttgagagagagagattattttccttgctcaatcttaattttctttatacaaaatgtgttttacaatatattatagcttacaagaaaaggtcaaatcaacatgtactatataggataagtgatcgtcttaaggaagattatgatctttagggagactggtaggttgggtaacgccgtcttaaggaagattatgatctcattcattacacaattgccatctaagtaatacggctatataccattaaatttgaatgtttttgtaatattttgtattattacgtacagttttgtgtgtagtttagtttctatatcaataatcatttatttatctcaactttgaaccttaaatttctatttttgaccaaaatttgttttgcttatgttttgcctactattttcatattgtttctttaattttgctaatttgttttatatttaataattctaatacattaatactgttgtaatgaaaataatttatctttaaattacccttttttggacagttctttgttaaatttaatgatttggttccatggcagattttcggcattaataagtaataacgatggtttctacaaactgagttgaaatgactaacaagagagtatcagacaaaaattttagtttgcaagaaaagaccaagtcatcaaactattttggataagtcatctttcattaaaaagaaaataaaatctaattaaaagttgttattgtgttgctcaaaactcaaaattcaaatacaacaggaagaatatgattcttttgggaatttggtaggttggggttgggacattttttcactataaaaaggactatgcattcaattggtggacagtctttttggtgttaaaatttaataatctagttccatttctgaatttcaacattaatcacgttactatattgtgtttagctaatttagctcatcagttaaattcgattctagttttgatacacaatagatgcaaacaaaaaaaaatgtattttcctctagtcgcctctattgtttaaagacgagcttttctggttagagcaagttaatttatctcttgcttttggttatagtagaggcaaagcttgaatacgtcaattccaaagctcaatctttgggaatagataacatagttaataagtggtaggtatgaagtcaataagtctctctctctcgctactctcgaagtcaaaggctattaaagagtcaaaatgattagtttcgttagatcatactacttactactattcaaaaaattgtttacaaaatcattcgaaacttaaaagtcgttgccgacacaaaacatgttaagtcatggaacatatgtttcacttttctgaaaaactttgagacacaaacaaaaacaaactgtaataacttactgctccattttcggagtcctaattaaacattctaggactaagaaactgaagaactataatgaaaaaaagctcgcagataatcgagacattattcaggttatatatacaagacgacacctatcattctctgtttacgggtcgacaaagaatggaagaatagagaagagaagagagagcaatttatgtgtttcttttgtgtgtagtagtttcatgtgagagacctaagagtcacctgtcttgattacaagatggaggctaggagccacagatgcaataagagactgtataccataacgccaagccttgcttgaggacggctcatcaatactcttccacctgagaccctgcattgcagaaatcaaacccggggattggtaagatggaaatatttgggagctattacagaactgttcgatattagtgagtatatttaccatattccatcaacccgatctgctattatctttccttgcgttggaatcagaccagacatgttgagagacttgaaaacatgtcctgccaaagaatatttgtgtttaagatatgagtcaaccgagcggtatcatacttaagtaataagcgagatatatatgtagacgccagagtcctgacctttatcttcatctgtttcgttgttgttcatcagatgctcggactctgaatctatgttgattgaaagatgatccgtcgatcccttcctcactgttctcacttgtgctgctgtaggcaccggtgatattgattttattcccaaggctccctgagaacaaaatgggttcagtccaaacttggagatcaaaacatagcaagagattgaagctaaatgattacttataagatatcaccaatcacaatggcagcggatggcgtaaacaaaacaagggtcaaggaataagctgaaatagcacgaaataagatattaccttgtcctcaatctcggatatctctgaggtagaaggtgctctcggtgtttcgaagatgcttctttcttgaacaatatcaggctgaattgctttggtttgaagtttctcttcaaactctttgactcttaatgatagtttatcgacaagtttctcgctaccggccaactttaaaccaagttcttgggcccttgattttgaactctctgattctaggagaagggaagttatctttttttctagtgcttgtacgagtgtccatgactcggagaagtttgggtctacaacaggattattgcttgccaatatacccagcagtttttccaagccagatattagcttggacagttcattctttgccttcactaactctagctcggtcgtactctctgcttcagtcgccttctttagaccttgaatttcaagatccttttctgccaaagtagaattgagctctttttgtccatatgataagatgtctatctgatgctgcatctcagtaacactatcaacaatcgcgaatagcttcttcacatcatatggactctgtggatctaatccgttgactagatctactgatggcacttcaataccatttattttgtcaaaaagggttcgcatatcagaagctggaattagattttcctttgcctctgcaattcgaagcaacagcacgtgacattttagtatagtggtaattatgtgatgaagatttaaagaaatgagagacaacaaaagataaaaattaccttgctcttgcaccaatagtttatcatataacgtagacagttccacctctttttcatgccatttctcttccttcactctgagatttccaactgaagtttcaggtcttggcaaagctcttccagagattccaccttggcctcagaacttgaaaccttagtttggtttagatctctttctaacacagccttttctagagcgacagatgcttctgttagcctgttctccatatctcggattacagtggcagctgcattatttgttgtctcaaagagtttaagagtagcacatgccttctctgcggcagaagataattcttttatcctttgggcgcattcacttacatgaagctcctgtgggtcttcagttgattccatctcaccaccgttttcattttcttggaattgaaccaactctaagaggttatttttcacttccaactgcagttctctggcagccgcaccacatgcagatatcaaagatgacaaatctttttgtaatgcagatatagtgttctcctgttcacgaacaatattttccacactcctcacctgttcttccaaggatgaattatgacccacgatatttaacacatcagccctagctgctgtcatgttttgcatcaaagtcgctatgagagtatcaatggaagttgagaaaccctcaaagttattctcgagggttttgtttctcagcctgaccccctctgccatcttcctaagggatgaagaaatttcgtcttcatcagctgcactcccttgactattctccggctctgtgttcactgaattatcaaggtcactcaacaacgattttgcctcagtcgaatcatcctggaaatataacagcgttatcaagagaacagcctattaacaaattgaccaagagagaattcttaaagtctagcccatctatactgacaaatgtttcacagaataataatttcataatatctccattaatcaactcccacaaaaacagattctaactaatgttgcatccttggcaaacaacaaataggagatcgctacaggttaaggcatctttggaaccaacaaatatgcaaacaggaatgatgaagggcagctgtaaatttgagtagaaaaaagtgaactaacagaagaaagattgatctggaaaggtaagagaatactgttacctcagcgttgcccatttcccctgccaataatccattctcaccaatatttcgtgtgatatctctagcaatgacatccacgtctctaaggctcttgaacttcctttgaaggaattcattcaccttggaaattagacctccatccttcagtagcatctggagattatcaagatgagtaataatctccaaagatttactctgtgagtttccgcttgatccagctaactcttccatgcatacattaagtttactactgagagttgatatctcgccttcagctttcaccatttctccttgtaaagcagaaagactattctctgccttcattagtgcctcctcatgggatactattgtcaaggaagcttcggccatcttgttacgctcaaattctgcctcaattttaagcttctctaactcattctttaaacttgtagtaagaactttgtcatcttcaatttgtttggacagcgaatccatgttgctttctgtctgagcaagtgtttcttcaagtgaatttatggtgctatgtgcttctgttaatttgttcttctgaattgaagcttctttttgcagcatctcttgctccatctctgcagtagcagttctgccttgagcctcttccttttcactaataatatcagatatatttctttcagcctgcatgagtgcagcttcaagtgtgcttttggttgcaagaacttcatccagttcgctagctacagaggaggcatctgcaactgctttttgcagctcaagctcagcattttccttggcagcttggacatttctattctcctcagtaagccgactgatgttatcctctgcagtagacaaggcatcctcaaccaacttcagggctgtttgggtttctgctaatttactggttaacgcatcaacttctgactttactttttctatttcttcttgttcctctactctagccagctgcacttcttggatgtacccagcaagtcggtcaatcttttctgaaggatcttcagatgctagatcaacagggagagctataatttcaactgatttcatcactttctgcaacaacgtgtcaattagagataaggattgctgaagttgatctctttcttctttagtagcaacaagctcagtctctagctctttcgtgcgctctaagtctctcgataacatatctatctgattcttgtagccatcaaccgtaccacctagctgctgcaactcgagcatcagcttttcgatttcagattttttctcatccaactgagttttaaacttttccctatcttggactagtcccttgcctttcttgatagccatagaaagtttgtctctgagcaaagcagatttctcctctgatcgctctagatctttctccaaagcaattttttcttctttcacgaaagcaagttcttgagatgcgatctttagctcatctgagagattgcttacctgaaagctaatcagctctccctctcctagcatttccttacaaagtgaaaactccagatctctcacataaaggagactttgaaaggcttcaaatatttcttcgttgccataagaactatcactagaatccctgatttgcttttctatcttgtcgaatgatctatcaacaagtaaattgatatctgaagaagtatgatcttcgactccttctgtcatcaagccagaggtttccacaagtctcctcacaatttcctccctctccaacgaacctcgctctgcagtttcctccatttttttcaaactgaaacttaaatcatccagttcctttctaatgttacttttctcctccatttctgctgaaagagacatgcttacactttcaatccggttttgcaaggcattaacttcatcttttccctggagaaaagattctctaagccaagctaggcgactttctaagctggattgggacatctcctctggtaagtcaatggaaacgatcaaatcttttagtctgttgtattcctgggaaacatttgtgagctctttcctctcttctgcaagtgaccttactttttcaacgatatcaaaagagtgaccttcttcaggtgtatatatgtttgacaggatagtttcaatattttcaatgatagagttcctcaccgataacatttcctgatatgatgcaaccatagcatcggattttgctaactcgcctttgtcgagttcagattgatccaatgctgttgacatctcttgtagtttcgtcaaacactcttcaagttcttttgttttttcagccagagactgttccaactccttctttgttagctcatatgcttccagggatacggacctatcattcaattcagcatagcatttctcaagttcatccgtcttttcggttaacgattgttccagctgccccttcattacttcagaactttcaagggcaatctccttctcttgtaattcagtcaacctattcgcaagctctgttgttttttcagacaattgatgcttcagagcatcccggttctgaactaacgccttcccctttgttacggccatgctgagcttttcttttgtgttagtacacttagtcttttctagctcaagctctgccttcaatttttcaaattctgttctcattgactcacacatttctttctctctgttcacttgttcaacaaagttcctattctcatcttctagatgactaagtctttcaaaaaaggctgcttccttctgtttgagctcaaatagctcagaacaagcagcaccaagagctgaaccaaaatcctcttggaaactaagatccaacacatcactagccaaacacttccttaactgatcagcaccatagtaaaactcagtatactttgcacctaaaaacgaaactcggttctccagatgagcaagcttttcagagatagaagaaccatactgcaactccccttccccaaatacattactaagagaaaccataatcctatccgttgcagcctcaaggtgctccaagttctgtgcctgatcacccatttcggaaaccggctgcgacgaagaaagctcagagatttttgtggtgagatcagcaatctcatcgtccctcccactaataaccccgtgaagctccttgagtgcaacctcatgctgaatccgctcttccttggcagtttttaagaacttcgagaagcgactgacaatatccacagtagtgttcccatcttcacctgtcaaatcattctcaccagtcaacagcttaaactgctcctgaagccctgcaagttccttctcccaatcccccttctcaatctatatgcagaaaacaaaaaaagaaaagatctttcaataaattttcgaggaaactcaacaaaaaatttagactttaaaaagaatcataaaaaaaataacagacattgaaatgagttccaaggtcatcattatcatcgtcatctgtggtaagagcttccttgctaggtgtatcaaaattcaactcttcaggagcatcaacaaacatatcttccttactatcaacgaaagctgttccctgcaaaataccaatatatccccccaatttcagcatacgaaacacaaaccacataaacgattcagagccatggtgaaatagaaatctcacctggtcaggatcaagctcttcttcttcttgcccattagactcgtcatcattctcaattccatcagctatagaatcctgcggaagatcatccttctcgtgcattatctaaatacgatcccaacccttttttcccccaatagatctatcacgaattcggaaaccgaagaaggattaaagagagagagagattagccaatatcggtaatcaaagacgggacctctagagagagtcgagaaatggagcaaacaaaggaagtgtgtgaaacggctcaagtcagagagatccgtgagtaataaattagcgaggtaagaagaagaagaagaaagcgttgcagcacgaccgacgcggtgcgttttgttttctcccaaaatcgtttattttttttggacatatgttttggttgtgtcgtgccattgaagtgggtgatgtgtttcgtccaataagaaacgtttgcttctgttcacgtgacttttatatggtaatatgtgcaatttaaggatcacttaattttagtcaaacgtatatattgcaaatgtaagacaaaaattagaatataattacagattctctcataaaatcttcttaacaaaatatcgcattaaatacatatgtaatcctatattcacaaaatatatcaattaaattcaacataataacaagtaaatgatgatgggatccctatttcctatgacttgcttactgcaacacatgtaacagttcgaattactaatgtgtcgctattgcatcatttgcacattctgattacataacatctttcacaactgttggatccacaagtctgcatgcacatctctcacattttggaccactttcacattttctatggagataccaccataattctttgcaattgactgatttgttgtcattttaacgttttcagtcattaagtcactgcaggtactgcaacaaaaatagatagttttggagtcaacactatagtatgatcacttacaccctcataacagcagctaatagttaacatcaaccataaaattctaagcattggagaagagtctcttagaacttggcatccgaaaaaacatgactttaatgacttaataaagctctaatttacaacatagagactagtcttccagctcgagctccatgtaccttccagaaaaccttgatggcttcatcaaccgttccagcatcaatagctatagctccaaagattgccctaaagccagtacaaagaatggccgagttcgatgcatctgtcttagtagaaactctgattatcttccccaaacccaaccggtctccgtcaagagcacatgaggactccacatttgaaacctctgatatcaaacggcccagtgctttcgaggaaatatcgatatctttagcgagaaactgaagagagaccgcggtttcaatgatatgggttccaaagatactcaaggctttgttgttctcttgagaaaaagaagcatgagtcattgcacggcgaagaaggttgatgttgttaaacttgtagctacaccaaacaaaaaaaaaggaaaggtcacaactttaagagtatagaatttaaccaaatcagtgattcaacttaatcatcacatcaagagagtatctaatcttatagaaatggccttaatttccctaattatgatcctccaatacacatttaggaacaaattagtaaaatcaacagagaagaagtgactttaagttactgtacccaatttgagtttgcagctttgcaagatccgtcgcgaacggcgaggaaaatggttcgatcctgagattgatttcacttgttgcacgtacctaccaaagacgccacgaagaaataagaaacggatcgtgttcggatcacaaaatataaaaagtttgggtttttagagaagagatgagatggagatacatgagaaacggaggagaaggagaagaagatcccgacgacgaagacaagaagaagtagagtgaaacgaagagtcgccatagttgaaccttagtgttcttcacttgatttcaccactctctgttctgcgagagagagagagaaacttgaggatttataaattgaaacagttagcacaattgcacaatcaattggtttggttcggttcgattcggtttgcattggtttatccggattgaacatctctaggaattgattttacttataacagtttttaaatctcatcttcaaacatgcttatgttggcaagaagacatgaagatcatctttctcatttgatctttgataataaaaggggtacacattaagattatgacaatcttcataaatcataatctaaaacgaaggaacattaatggatcaccagattcttatgtacacttaatcaaaggtctgggatcactctctccctctgtacacccgtatttatgtttcgggataaaatcatatcaagtactcgttgtagactaagaaggccgcttctggataatccttaggaaggctattgatgtggaggtagaaccgaagaagatcctctttggtgaccgtctctggatccaccacatcttcatcgcaagttagcacccacagatcctctgagttcactctcttgatgctgccacgacaaaacgggcatgactccgactttgtgttccagttacggtaacatttgatgcacatggcatgacaacagtttggcaacaccattttggtgcaaggctctaagcaaatcccgcattcgtcttctctttccaagtcaatgctattcatgtatctgctaccttcaatgtcatactgcttcttggtgatggcttttggattcggataccacaagctttcgtccggtaagtcagcaaagttgatatgaagtcgctcaagtgatggtaatataacacctgcatttagccagagccatagttataagattaagcccacagtagaagaaacacaatcacaattaagagcttagtcttaccgtaaaactccctaatcgtagctttccttccgtacctagatcgattccaccgcccatcagcacgtacctgtacaagacaaagaagacacctataaaacaaacaagccaagaggaaaggagagaaactatcagggaatctaccatttcacacacacacacacacaactcgatatctatgtatgcggtaacaaccttgtatatgagtatgtggaagaaatcaaaatatcttggaagcagacatgagaaatccatccattgtagcaggaatatgaagaatggagccaaattgctgcacaccaatttcatctgaagtcgcacaccgctctttcccattggaatctcagcagccctgaatcaaatttgagagtaatcagtcattacactaatccttctaacataacccatcccttcagacaacatatgcctgaagaacaaaccacacagataccaattctgagactaagcagttactatatccttcgaatcacataaaccatttccacagacaacatatgcatcaataccacaccacagatatacaaattgtgagactattcagttaccatccttctaatcacatttaacccatttcttcagacaacatatgcatcaagaccacaccacgcatgccacaaaatttagcaattttttgaccatttctgcaaagtttcgatttttaataatctaagttcgtgataacgaccgaaaatgtaaaattgtggggccctaaaccctaaatcatcgaagccaactataacaatcgatactaaagaccctaaacccagtaaaaatcaaagaacccagaaagaatcagaggatgactcacagtccattggcgtgctcaatatcagcctccagaatcttcaaagagtctctgtaagaagacttggtcaactgataatacatcctccttaacttaaatccctaatctcgtctctcttctctcgatgaagagatgatgatgataacaaaaggatcaagacaagagaagacgaacaggaagagaagagaatccaaagtttgtgtcttggaaacagacaaatccttagaacccgatgaatcaaaaacaaacaacagagacgtctgcttttctccacgtcttatctcttcggtttcacaaaattaaagattttggaagaagaaaaaagaagcgacttttcgctattgatgatatttttgcagccagagaaagagacttcgtgaaagccaagaaaaaaatttatatatattttttttcaaaaatacagagagaagaatcttatctctttttttttttttgttcttgcaaacttttttaattttggtgttctgtttcaaagatcataatgatgagaaattggatgatgatgatgagtgttgttgttataatgtttgtagagagaaatagcttttgtccttatctataaaacattatatgctttctgttggcaggtctccgttaccaaattggtttctttaatcaacttctttcataaagtattttttttgttcaagtcttcaatatctgtgacctgtcagagccaacattatttccttattatattatgctaattatgaacacaattagggaatagggaagaagattctctcttcattatcgattctatactaaattagtagtgcatattttatccttttcatatttcagtatcattttagactaatgtacttttgttttgaaaatatcactttcatgattgcaatgttaattttacaaaaatctagtttgtccataatcaaaattaataaaaatgtataaaaaaattaataaaaaataaataaataaaaaaataaactcaaaagtattgacatttcatcttgaaaatttgaacaaattaaatgcataatctatcaaatgttgcaaataaacggtgttaaattttagacggaaactaaaacacagtcgtttcgttgattaattaaacgattgtatttttttttttttaatgtataaaaagaaaaaaacgtttattattgactacgatgataatgttaaattcatggtgttataaaggttgctaagattgttgattcatggtattacactgagattgttgagttcgattatatttatagataagtccttttgtatttagagtttctaacatctatagtattagtctattagataagtcctattaacatgtcatgagctgcagtaaaatacctcatccaaagtccacgggctattttcacgagtcacaatagtcaacgtaataagaattgattaagaagattaattaaatagtaattgtactttaaacatttcagaagtttgtacgttttctattgagtatagtggataaaccctaattaattaatatcctggaataatcaaatccagatgtaatgttttgaacgtgacgttgatcgtgttgagagctgagatacataactcaacaaaaccctacgttttcgttaaactattacttttgttttgaatcattgctgttcgcgtggacaacaaactaaactcgctctccagcaacaatatttctcagccttcaaattccataacgaatattataattttattggcaactagctatatagaaaatgatgaattcaacaccatggtgtgtcctccaacataatttatgacgtatgaagctagcatgaagaaataacgtttactctattgctacaatgatttctaactatatatagatttagaaattgtagatcgagccttctttgtttaatatttaatccaaaagcatgttttttccccccggaggattttttcttttgtgaaaaatgttgaatagtataaataaaaataaaaatattaattgtcttatgaatatgttaatgccactaattaaaaattggtttctagggaatatatactatagtattattctggttagttgctattggtcgtaatgatcatattaattcatagtagatgaacagcccatatttattaagttgaagaatgggaatttggaataattcgtaccctaattttcaattcaaaaatatcatttattgatttaaagttctacctaatggttccattgactatatcgaccacaaacatatatatacaaaataaaatttgttatgaatggcaatacaaaagtataatttcgtataattaaaacgagcctatcggaatatataatttagctaaaatgaatagtcaaacgtttttggtaaggactagtctaaaggactaaaggagatgttgaggaccatcgaccaccaaccccaactagttaatgatgatgatgatatatactttgaaaatgttatcactatataattgttgacgaaccgaatccctgtttttaatttttgtttgtttgtacttattcctaaactcattttgtatagaagagtttcttgcggaaaaaggcatcctgtgaagcttgagtttcttgagggaaaaggtatcctgtgaagctgcttaactcacttgcggcaaattaacttgttcaagtctaaatagaagatatagttttccacctaacgttagtataaaactgggttaaaccaaaaccccatatcaagtttcataatgttgacaaaataatccagctgaagtctccaaaaccaaatctttgtataaaatttgtaactttcttgttcacttgggtctaattctgatccgtgtctaatcaccatgacacgttattaaagaggactatacctccttataactttagcttatataatcttactgacgaagcatgagtctgctcagttctcatacatcattattataagttatttcaaaacaagaatggggcttgagatcacggtaacttctcaggaactcgtcaagccctctcctcgaaaccttaatcatcctccatgccatcatcatctctctttccttgatcagcttgctcctcccattttcatgcctttccttttcttttaccataacaagactaatctatagacaaagaacgaagtgatcacatcaagagttctttgtctgaaatattgaatctctattaccccttggcaggacgcatcaagaactcgggtgatgttgttgtgtgcaacgatgtgggtgtgtctttcgtcgaagccaaagccgattgcaacatgtcacagattctagaaaacccaaatcctaacgaacttaacaagcttcatccattcgaattccatgaagtgagtgacgtgcctctcacggtacagctcactttctttgaatgtggcggcttagcactcggaataggcctttctcataaactctgtgatgcactgtctggtctcatcttcgtcaacagttgggcagcttttgctcgtggccagactgatgaaatcattactccttcttttgatctcgccaagatgtttcctccgtgcgacatagaaaacttaaacatggctacaggtatcacgaaggagaacatagtaaccagacgcttcgtgttcttgagatcttctgttgagtctttaagagaaagattcagcggaaacaagaagatccgcgcgacacgtgttgaggtcttatcggtattcatatggagccgtttcatggcttcaacaaaccatgatgataaaaccggaaagatctatacactgattcatccagtgaacttgcgtagacaagcagatccagatataccagacaacatgttcgggaacatcatgaggttctctgttactgtccctatgatgataatcaatgaaaatgatgaagaaaaggcttctcttgtggatcagatgagagaggagattagaaagatagacgcagtttacgtgaagaaacttcaagaagataacagaggacacctagagtttctaaacaaacaagcttcaggttttgtcaatggagagattgtatcgtttagcttcacgagcctctgcaaatttccggtgtatgaagcagatttcggatgggggaaacctttgtgggttgcctctgcaagaatgagctacaaaaatcttgtagctttcattgatactaaggaaggtgatggaattgaagcttggatcaaccttgaccagaacgatatgtctagattcgaagccgatgaggagttgcttcgctatgtctcttcaaacccaagtgtgatggtctctgtatcttgagaaacaagtaatctattagtcgtttctaatgagtttgagcttgttttccttttaagtttgtctttcagatttcattcccttgtacttaatgcattcttttatactattttgttcatatttaagaagcaacacaagtttaaattaactcatataaatctcttggaagaagtatgcaatgagttttgttcttgtctagattaaaacagggggatttagggaagctgattcaagaagctcttgatcacattcaaacagtgacatttgttcttccgtaagagtgatccaagcttcaattccttctccatctttggtatcaatcaataacatcaagttcttgaaatgggaagtgcctcttccggtcacccaaaccggctttccccatccgaaatcagcatcgtacaagccgagcttacaccagctattactcatccacaaatccatctcatttcctcttccatatactttcccaatctcttccaaaagctcaaaaattctagacgaagatttcgacatctccttgcagttcaagctgaatatttcctttgccctccttatctcatcaaccacatcttgaattctttcaatcgcagcttcttcgttcttgagaatcatgagggaaagcatattcccaattgtgttttcacacaaagaatctacctttcctcttaggttcactagtatctgcagcactgaagttcttggtgttagagaactcaatcttgaaaccttagtaacgcatctccaaaacagagctgtgacggcttcaacacgtgttggattcttcacaaggtttcttgaagctttggctctaagtttcttgatcttcgaagcatcaaacacaaacctctttgtcacacaactcatctcttcaacctcttctttgcgatccatcggttttgaaggaagctcatcaagtggtttaggaaagacttcagaagcggtgaaactaggaatcaaagtaatccccaaacctcttgaggactcagcccatcctctgatgaacattgctaaagaggtagcatcagtgatcttatgagaaacgcagattgtgataaccaatcctccacagctgaagaaattagcttggattaacaacacaggccatgtaacagcttctcttgacttagcttcaacaggaatgagtaattccaatgattcaggaacagggcacttgagaaactccgagagaagatggtcaactcgagcttctataaacacagctccttcatcattacattcgacgaaacttcctatgattcttccggcaagagggtagaagattggtaaggttttagacagagatttcttgagcttcaaggaagtctcctctgttgaaaaacctagaaggttctgaggatcagctgcgtaaaagagaagagctcctgtgtacattggtgagctgaggatatcaagaagagagagattgagaattctcttatcatctggagttggagaagacggtttgactatttctcttgataagatctcaacgttcttctccatttttacgaacaaagtctttctccactttctgataaaccatgacacgcttgtaaaataacttcaatgaagattcttggtgagaatagctacatattcctgcatcacaaaagaccagtcatattatttatcattaattcatgtcatcatcatcattatccttattattattaatagattacattcatattaaagattcctactagtggggagaccaacaacagttcaagattcttactcgtcaggagacaaaacgttattatttcatcttaaaaatcttgtcttaaatatcgaaacagagaatagtaattataatgaattgcattgcttttaaaaccttaaggggtcctttgattttacaaaaaggacatttttcctttctaggactagatagctaatttttattggccttaattgtttgcagattcaagattatgattgcaatttttctaaaatgaatccattatccaagcatctcaaacatcttttttttttctgttaatcgttattcaacacaatgttttttaatctatcgttgcactagttgtaaaaacgctattttcttttaaatctaatttaacattaaattaaaaaaataataatgtaaatgtcaaaccttttgtatatatttttttttttgtatgaataaatgtcaaactttttcttcacgtttacgttaaaagtagtttacaaaaagctaaagagtattacaattttaaagatattttcttttgaacatctcactttgcttgttgtttgcatccagatggtgacgcggcattagattaaactatgcctatatggcatggtttatgaattttgtgagaggttacttgtcggtacatcctgcatgttgctgattttagtaaactaggatagtgatattttgaatcgttgtttattgcctagacgtcttttacgagtgtttagcgatccattaagttttctttgtcattttaggtattacaaactcaaaaggatgattttttttacatgtactcatctaataggattaatgattttataatacacctttaataaaacaaaaacacaattcctggtcgctattaaattctcaccaacaaaaatataaatacacaatcaaccgcaaccaacgaactttctaaatgttaaagatttaacaattacaatcagaagaatggttaaaagagagaagcagaacttaatggattaatcacaaggaacagatgaatcaataacccttttgtaactaaacaaataacctattgattacttatcagatttcttgccaagtttcatccatttgaatccaagtatggccttcccgataccgcttttgcttccatcttccttcttcttcttcttcttcttcttcttatcgtcttcgttacttgaatttggaggaggatcagagttgtaatcccattgatcagcccatgatagtccagaatccatcttcttcgtctctctttaagattttgtggaatgagaaggtttagaaacaaatatgagggtgaaagaaagattttgttttacttattatagacagtattggtttgacacaatgtctataagtttcttggttgcttatttttggggtttatctgtttttagttgtgcctctttgccctttggttggacaaagaatcaacatctttcacctttgactgtgaaaacccttcaacaagaaaagaaccccttacctgaaacacttgaatttttttgagtaatcaaaaactatacgcttcaacggttcaacctaatttctcttttacattttattcaacattttcaaaggatagttgagtagattaattactgttgataaaaaacgacatacaattttttttgtcacgctttgaaattatattattacgcttgtttcgttttgtgacattgtactaccaacaataattgttttttatagtcaaccatatcattaatcggagcggtcccttgattcgttcgagcgaccctctaatcaattgggaatactgtgacaaataaccatgcatttatgcttcaacaattttagttttccttcataaatatcacgggatgcaagtgacgctaagcataaatagttcgtctgtttcattgactttgtaatagaagatgaaaaaagaaaatatatagatatttatcttccttttgatgtcatgacgtttcgtgattttgatttacagtgtcaaaaagagagattacgctagcgaaacgtcactacgaccaagatttagttggagtatttatactctgatcattctcaatttctcatcatcgacattacaaatatgcaaaattaacaaaaaataataatatatacaactcatcaccttatatatctaagagcgttttgtctaactaataatatgttagcatttttatgccactattagtaatttaataatatagttattgcttaaatatatagatttttaacatattttctcttagatatatatatatatatatatatatatatatatatatatatatatatatatcaagatataaataaattctactaaaagaaaaacaaaaaaacagctaattttttgtcggtcaactcaaaataatcattaaatgagaaagatatatttatctatcgaataaatattattttattttttaaaagcgaaacactcgttagatcaggtgaccatgaaaagaaaaattcagctctatccaaaaaagaaaataaatcatgcaaatacagggagaaaaaagtacgaaattacaaaaaaaagccatgtcaatgtaaagagaatcattgaatcaagaagaacgattgggggtaaattagtatttaaattggtctaagcatgaaacagcttccagccgatggtgccttatgcctcgggcaaaaaaaaagaccaaacacactaaacaaaactaccaaacaaactaacaaacattcccttcaaattcggaaaagtcagaatctcatcacctatttattacactctcataaacgctaacaaatcgttgaatagaataattaagcaggtaaaatcctaaaccgtcagagaatatctatcctcctcttaaatatcactcttatctttatcctcctaaaatcttcttaattgtatctaatctctttctcaaaaaccaaacactatctctcgattatatcacaaggagatatggggaacagtgaaatgtcagcgagtgaggttgcggcggccaagcagaagaacgtcgacgattggttaccgatcacatcttccagaaacgctaagtggtggtactctgcttttcacaatgtcaccgccatggttggtgctggtgttcttagcttgccctacgctatgtccaatctcggatggtatactaatttgttgaatctgataatcttaatctcctttatgttttaatccatgatctgatctgagtttttgatgtattacaggggacctggagtgacgattatggtgatgtcatggatcataacgttgtacacactgtggcaaatggtggagatgcatgagattgttccagggaagaggcttgataggtatcacgagctaggtcaacacgcttttggtgaaaagcttggcctatggatcgtcgtgccgcagcagcttatcgtggaggtcggtgttgacatcgtttatatggtcacaggaggagcatccctcaagaaagtccatcaactagtctgtcccgattgcaaagagatcagaactacgttttggatcatgatctttgcttccgtccactttgttatctctcaccttcccaatttcaactctatctccatcatctcacttgccgcggctgttatgtccttaacgtaaatctcttcaacacacatatattggttttactttataacttgaacagaaagttagaataattaacctagagcatgccttgtggttcaaggctagggatcaaaattgttgtatattttccggttattagaagaaaaacttagcataatcccaaaatatgtagaaaactaggttttattgcctgatgatttttatgatctgtacagttactcaactattgcttgggctgcatccgtgcacaaaggggtacatccagatgtggactactctcctagagcatcaaccgatgttggaaaagtattcaacttcttgaatgcgttgggagatgtggcttttgcttatgcaggtcacaacgttgtgttggagattcaggccacaatcccttcgactccggagatgccatccaaggtcccaatgtggagaggagttattgtagcctacattgtagtcgccatctgttacttccctgtagcattcctcggctattatatctttggaaacagcgttgatgacaacatcctcatcactttggagaagcctatctggcttattgctatggctaacatgttcgtggttatccatgtcattggaagctatcaggtattcttccacattctagtacttctatatttttgattgaagtaagaattatttcatgaatattgacacctttgtgtggattcagatatttgcaatgccagtttttgacatgctcgaaaccgttttggtcaaaaagatgaatttcaatccttctttcaagctccgcttcattactcgtagtctttacgtcggtaagaacccactcctcatttatacatatgtaacgtcatcctcctactccattcattaattaatctcattttcatcaatgtacattggaccgtgcagctttcacgatgattgttgcgatatgcgtcccgtttttcggtggactactcggcttctttggaggattcgcctttgccccaacaacttactacgtatagtacaaataatcccttcatttctttattggtttatccatagattaaagttgtgaatttatatacacatattaatttgtaactgcagcttccatgcattatgtggctcgttctcaagaaaccaaagaggtttggtctatcttggacagctaactgggtatgttctttagtaatcaatggtacataatctatagctcttgttttcttgtaaagtaacaatttttgtgttttggtttgttggtgttgtggattatgaaaaaatacagttctgcatcatagtaggagttcttttgacgatccttgccccaattggaggactcagaaccatcattatcaacgccaagacctacaagttcttctcttagatggatcacttttttttgtaaccgcgcaaccgaaaaataaaatcacggcatgtctaattttatgtgactgtccgtttaagtaaattttatgttttcattgtagttaagacaattatctttggtttcttttgataataaactctttttcaaataattaatctccatgatctggttcttctaatgttgtgatttcgtaatttatgcaagaacgtacacgggaattttatgacacgtctagatgcaatgttaccatggtcagcacgacactgcgttttgtttttctttatggtttatggatacatttacattagatgatttggatctgtggttagatttaatcttaatcacggggttttcacctgtcaacaatatgacatgacttgaaaacgaatttatactttccagtacagcatgcatgagtgatgagaataatttaatagcttcgtttattattttggcttttcaaatatcttgatttatacgttgtttttgttgatacgtgaacctgtgattctggtcgtaactcgtaacgccacatgtacccttttgtggagagtttacttgtaaacggcagaccaagaacaaaatgtcctttcatcaatttctatctaatagagaaatcggcaattttggttataaagctctttgatgagtcttctccttgtcctgccttaattatcctttatgctaggctcggcttcatcgttacaatttgctccgatccagctttgattaaactcgctctatatgtacatgatcttcttgtttctttgtctatgcatgtattttgtcatacaattctttcttgattaatattaggagaaaaacatagagctcagtagtataagtatatacaaccagtccacgcattctgctgcttcctcttaccacattactttggacaccatggatctcaccgctcttcaaccttttgagactacagtttatgacatatcatatggcaaattagctttatcgtgccgtattgctagacctctaagtcattacgagacttttgtagtggtgcttatacaacaagcaagccatcttactaaatgatcatcattgatgtagttaaattcttattaaattagagaattatttttgtttgtatagttaaatgttacaatatagttttaaaatattattatgttaaaattttaccttgaattaacacaaaacaaattaaaattttgattttgagatatagtgaaataggataggaaaatagttattttcaggaagagaaattgtggacggtacatttaaataaattaatataattaattaaagaagcaacaattatggtacaaaaaactaaagttggaaaaaattcttataaaatacatgatatatctaatgactaattttagtcaaactacaactaatgaaaagtacatgtgttattaaaatagaatgtcaaacaccacattattagacatagtttagaaaaatgcttgttatattatatatataaaaagatttaatctatggagtaccttttttttttctcgggatatcatgacatttctaaattgaagttaaaatacatctccccctctcttggtatgccaaattgtttaacaaacgacaatgcatatctcattacaaatgcctagcaactatgagacaacactccatcatttatatctgcatctttagggagattcattccataacgcctatcaacaaattcgcgcacaggtaacgtgagcacaatgaaataaactcttcctcacatccatgcaaaactaagaaacactaaccatgtcgcatgatgtgtatgccccacacagcaaatgataacgttttggttttgaacctatactattattttagaagtacaacataaattgtaacattgagaaatgtaacaaattatattagattacaatttaaagaaaatataatcatagacgaaattaatccacatcattaaggttatgacctacttcttaatactgcgggtcaattggtcaccaaacaggttttcaaatatcacctaaacaataatatcaactaattgtgtacagtaaaacctctataaattaataaattcttgggaccagtgtaaaaagtgacataaatcaatattaataagataataagttttttgaaaatcctatataaatacatggtctcatcaatattataaattaataattgcataaatgtatcaattatatatatacattatatataagaatttttttaaaaatatatttttaatatttttttgctcaaatttgtatatattcttttgcttagcctatgtctcaaaagagtgaacaacttttgcttagcctatgtctcaaacggcagctgtttcctaatcctaggcggtttaatgtatagaaatacagttgggttggctagtcacaaggcaagatccgctttcgaataaacttataagttatttggtgcgtctgtaatgctttattttactttttgactttaagttgtgtttgaatttggtttaacatagggtaaagatagggagatattcttcaacccttgtagtttccttttcgtttctaaaaaagaacacatcaataactaaaaaattagaatgcgagatgatttatcgatttctagtttaagcagtaaattttacatatttcttaacataaaccgcaaaatagaaatccgaccaagtgctagaaagaactcaactttgtctgttttaccaaattgatttaactaaacaaaaccgactcataccaattgtctagctagcaatacctccatcagtggtgaatgcctgcaaaccaatgatttcaaccatggttaggtcgctaatataatcagaaacctaaaatcgacccaaaaaaaaaaaaaaaaaaaaaaacctcagccgctctcgagacgatggtggccggggcagaggagagggagaagagcaatcctcggaaaagatataggatagtgaatagatccgcggtaatattcttcatcattgttagtcgttgtaaagcgattcacatatgtctttcatcgtcacacatcctaaccctctttcttgtcgcttctagagttcctttataaagagagtaccacactttggtggaaatgaaacaatctgtaacgatgagtcttctccatgtcctgccttggttatcctttatgccaggctcggccttcatccgtacaatttgctccaggtttgattaaactcgctctataaatgcatgctcttcttgtttccttgtctatgtatttttaccctacaattctttcttgatcaatattaggagaaaaacttagagctcagtagcgtaaagaaatacaaccagtccacgcattctgctgcttgctcttaccacattactttggacaccattggtctcaccgctcttcaacattttgagacttcagtttatgaaatatcctctggcaaattagctttatcgtgccgaattgctagacctctaggtgattacgagactatttgtggtggtgcttaggccaagtccaacgccacgggaaaacgttaaaataacgtgggcatgtttactttttcactccaatcagacggtataatttgcactataatagtgtgattctctttttttgtacagtgtaacactatatttggtgcactactgtatccacgtcaaatattaaaataataattttttcttttgtgttaacattattatatattaaaatagcttatttagttataatagattatatatgattgtaaatgagatttaagtaatctaactaaggcttgtaactaaaaaataatttataagtactatttttgtaatctttaatttaataaaatgatggattagtagaaaatattaaaactaataccgaagttgattgaaaatacaataaaataaattatacatttataacataattaaaaaattaaaaccacacaaacataaaaactaaatgcaacaagatatgttttaaaaacataacaaaagtttcacaaatggttaaggaaaattatttccggttccgctaagataattataatattgggtaaaatcttcttggttatttggtgatctttggtcttcaccttgatccggttctccttgaacttgttttccatgaaatggactttcttgataatgagatgctcgatattgagatccatgatattgggagccttcaccatcttcttcatgttggtttgtttgtgctcttttttccaaaattctttttctctcattttcaatatatgcactagaggatggatcacttatagaattcaaatctgcaaataatattttattctcttctttcattctagctacctcgatcttctgcctttgaatttcatttctttcagaagtacctttagtaatagctttgataagtttatcattttgctccaaaagttgtttaaactgttcttcagattgttgttttcgctttgcttttttcaaacccataggccttgaagataaactaaaattggcatcttcactatccatatttagatcaattgaattcataccaggggaaggtgatgactcggtattgattgaaaatgatgaagatgacgtaacatcacgaccttctccttggaatgcagcgggtgtcttcatgttatcattagcaaatttctcaatacctttaagaataggccatacatgatcaaatttgaatcctctcttgtatttttcatattgagttaataacatcttcgcttggtttaactgattacatatttacaagaaacaaataaaaataagttagcatgtacaaataatttaataaagataagttagtaaacacaagaatttataattgagtacttacaatgtcttcttcagaagcaccgctaggatttttattctcaatttggttaacgcatcctctcagctttgagactgcagaaagaattgacgtcattcgagtttgtaaagatctttttggtcttcgttgaattttgggaaacatcgagatacacatgacacaattgtatatcttcttgaatagaatatgacaaaaagcgacttgaactcatttttgaaaaatataagaagtaagaaaaagagttggagatgtgtgattattcatagagtaatatacatttatatagagaatataaagcaataccaacggttagatcttggtaaattcaacggtcaagattaacttatttttttctaaagaagtgatacttgatatagacatgaaatgactaatcaatgcagtggtaagatcttgatcaaagaaattcaacggctaagatgaactcgtctttttctcatgaggtgataattgatttgcgatatgaaatgactaatcaatgcaacgattagattctcttcaaaaaaaattcaatggttaagatgaactcatctttttctcatgaggtgaccagtgataaaagacatgaaacgactaatcagtgcaagggttagatcttggtaaaaaaattcaacggttaagatcaatttgtctttttctgataagatgaatatatcaattccatgctcttctatataatgggcaatatgtttagaactaaaataaatattactatcatcttctatttcttctcatagaagatgagttttaactacggtagttcatcttatattccgtcttcttcttcttcttcagataataattattaagatgatatagaaaagcaagtggtatctcaaattactactaacaataattttctttgctctcaacacttatataactcagaaggttcgcatggtggatctattcctggtcatgtagttatcaatcgtgatcgagaaaatgctgctcgcaatcttttcaacgattattttgcagagaaacctgtgtttcctgagacaatgtttcgacgaagattccggatgagtcgttctttgtttcttcgtatttatgatgctatacaaagacatgacaattacttcgtccaaagaagagatagagtcggtaaacttggcttgtctggtttgcaaaaaatgactgccgcatttcgaatgttagcgtacggtgtaccagcagattccaccgatgagtatatcaaaataggagagtctacagctctagaaagtttgaaacgattttgtcgtgccattgttgaggtgtttgcatgtcgttatcttcgatcacctgacgctaatgatgttgcacgcctacttcacattggcgaatctcgaggatttccacgtatgttgggtagtttagattgtatgcattggaaatggaaaaactgcccaacagcttggggaggacaatatgctggtcgtagtagatctcctactattattctagaggctgtagctgattatgatctgtggatttggcatgcatattttgggttaccaggatctaataatgatattaatgtgctagaggcatctcatctttttgctaatctagccgaaggtactgctccacccgctagttatgttatcaatgaaaaaccctataatatgagttattatttagctgatggtatatatccaaagtggtccactcttgttcaaacaattcatgatccacgtggtcccaaaaagaaattatttgccatgaaacaagaagcttgtagaaaagatgtggaacgtgcattcggagttttgcagtcgaggtttgcaatcgtggcggggccatcacgcttatggaataaaacagtattacatgatataatgacatcttgtatcataatgcataatatgatcatcgaagatgagcgtgatattgatgcaccaattgaagaacgggtcgaagttccaattgaagaagttgagatgacgggtgatgatgatactcgatttcaagaatttttggctcggcaccgacaaattaaagaccgagaagctcatattgaacttagaaatgctttaattgaacatttgtggtcgcaatatactaattctgagaattagtacgatgtaatttatttttattatgtttggtttatcgattgtaatattatattaattaatgaagaataaaataatatgttgtgtttaattaaataatatattgtgtttctttattttgtattaaatttgtttaatgtaatattttgttgtctaacatttgtttcaatattattaagtattcttaaagtattcatattttaggttaataatataataatagagaatagtatttttagtgtgacttttggtgttgtggttggagatgaaaaagaatttagtgtgaaaatcacaccaaatatagtgttattctaacaccattttagtgttgtggttggagatgcccttatacaacaagcaaaccatcctactaaatcatcagtctcacgtaaaacattgctaatttttttattattcttgtataggggaaaccaccatagatgtaatcaagagatgcagcagcagcttgtacaaaaacttctcccccatagataccatgcttgactggcccccagagaatccttttgaacattcaaagctggtaagattaagacctgtgagttttgcttttgtgagtgatgttttccataagctttttctttttttttgcagttgaattattatgagctgcaagaagacaatgactggattcgtctctacttggaacttgcagttgccaccactaataggggcaccattagggatcttgatgacctgtccaacttgaagattatccaagtggctatagatactactccccaagatgtggatttggtattcaaccgcacatattttgcaattgtctacatacagtacaaggactcgtgcgaggctcgagttggtaaggatgttgatcgcgtagctatagtcagaagagccttcgatgagcagcggggatgcttcagtcttgtgggcaagactctaagattgccaaaagagtgacccacttttgctttgcctatgtctcaaacggcagctgtttcctagtcctaggctgtttaaggcatagaaatacagtggggttggcttgtcactaggcaatatccgcattcatatgcggattagatcgtacaaatcaaaccaataagttatttggtgcgtctgtaatgttttattttactttttgactctaagttgcgtttgaattttgtttgtgcttgaatagtttaacatagggtaaggatagtgagatgttctagtttccttttcatcaataactaaaaaaatttagaatgcgagattggattaatcgatttctagtttctgaaagtgaccaaatacgtagtttaagcagtaagtgttacatatttcttaacagaaaccgcaaaatagcaatccgaccaagtgctaaaaagaactcaactttgtctcttttaccaaattgttttaactaaacaaaagccgactcataccaaatgtctagatagcaatacctccatcaatggtgaatgcctgcaaaccaatattttcaaccatggttaggtcgctaacataattagaaaccaaggttaaccaccattcgacaggagtatgagatattaacctgtccggttatgtaactggctgcaggactgagagccaagaattctaccaagccagccacttcttcagcttttccataccgtcctgaaaaccaaaccgttttgctttgtatcagaattcttttttatctaacaattttttcatgtctcagatacatcctatccatataaattacccagcaacaaatgtaagagatgaaatgtccattacctaatgggattgttcccaggattttcttttccatgtcttctccaagctctgcagtcatgtcagatgcaatgaatccggggcaaaccacattgacctggaatagagcaaattgtagacggaacaagtttcacaatcatgtccaggaagtttaaaaaaaagacgaatatgatgagggagataggtcacatacatttatattcctgctcgcaccttctctggcagcagtcttggaaaacgaaataactccacctttagccgctgcgtagtttgcttgaccaatattaccaatgagaccaacaactgacgagatattgatgattcttccctgcaattaagtataccatgaattatgcttgtcataatatcacttcttaatcttatagaagagctcaaaaaaaaaaaaacgtagttgtctttttatatatcatttctccctatgcttcagggaaggagtaacatgtcaaaaccaatgacaaacgtgtgaggatatagacggtgacatggcatatgacaagtaaaaagtgttaccctttttttcttcatcatgatctttactgctgcctaaagagagtaaacgagtatcagtccctgaaaatccgagtatcaaaattttagcagtattgcaggaatacaaacctgagtacagagaaatacaccagtgagattcaaagcaatcacttcgtcccattgtgattgcttcattcgtattaacaaggtatcccgagtaattcctgaaaatatgtagccacgtcagtaaggtactaagtaaaacttaatgggaaccaaggttttcatttacctgcattgttaaccacaacatcaatggttccccatttgtcaagagcctgcagaaaaataacaaaaggaaaatgaaaagatgtataaggattagggaatataagatggtgtacagttgatcactcacggttttcatcatcgcatccacatcagtcgctttcgagacatcacccccaaaagtgatagcctggccaccatattcttcaatctacagttgcacagagaagaaatgtcagagattacatgaaataagttgacattgtaaacgaaaacactattaactgcagatgacatttgttagccaaaagataatatttcatttggcagtgtggatcaagagcaaaatcacaaaacgcatttgagaagcatagggcaataagaaacattttccaggtccagaaaattcatttgtctacatttcttgtcccagaaaccaaaactgtttaaaggtattatcaacgttaaactcgaaaggtaccacatttattttcgtaccaacaacaacatccttccataccaaacacctatgcattatttggtctaaaccgatatcccgaagcagaaaaagaaggaaagagctgaaaaccattctagatacttggtgcatgaatcatgtaaattgcagtctaatccagggcaatgaatcacctgtttagcaacttcttcagcctcttttgctgacctagcataattcaccaagacctgcaacagaaacagagtgtttgcttccagatcagaaaatttatgtgtagcaattacggatataaacctattgatgtctccatcactataatgacaaaagaaattgaaagcaatcctgtgttaaaatcttcataactcaagactagtaatatcatgcaaattgaatgctcgaagagtacatatacagatcaaatctaacaacaaggcgctccaatattccgaatagtgttaagcctaaccttgcagccagctttacccaaggctagagcaattgctttaccaatccctctcgaggcaccagtgataacgaccactggagattccactttttgaacaacttcccctggtgattgctcagtagcagtagcttgagctttcacaactgtaataccacaaaaatgttgagaattgagagagatcaaatctatgccaaaaccgcaaaggaagagagaagaggaatgaatataccagaggtagaaaacggctgccgcgatctacatcgcagcattccgaaatgaggtatcgcagagtgaagcggagccaattgtcggatttgagagatctcacggaaacctagcttcgcgacggctttcaaggagatgagtctcggtgctgcgacggcggcggccatggcgaatctgttgttaaagtgaatccgtacaagtgaacctcgtaaagatcgacccagtggagaagaagaagagagaaaagtcttaattttgtcttagtttctgctcaaacaataataatatatagaatttcaaaaaagcgatacaaacgaagttatgtcaagtgtgtaaaagtcatgtttatagttggggcaggtcgtcgaataagaggagactcgatttcacgaatagaactgacctaggtattcgggttttgtatcggatacggttcatatttgttcggatgcgggtaattgtataatatatagttttgtggagcagtgtttaaaaaaaaaattggtcaaagaaaaaaaaagaaagacaaagaggattgaacggtagacgtagacgccattggagtttgaaagggaattagtcgacgttttatggatcattgtcgtttcggtgtcattttcttcttcttctttcgctagcacgatttaaagcctgactagatccatcatcggccatggaggattctacagccacggctacgtcttcgtcttccactcattatttctccattttcacgaattatcctctcatttccgccgtcacctctttcactatcgctcaattcatcaaactcttcacctcctggtacgttctctctttatatctctgtttggatcagactccgattaaatctatatgtgcctggttcctcaatctttggttcgaaacggtacataggaaattatagtatacgttagatgagaaaggatctttacatggtttcctagattctgtaggtatagggaacggagatgggatctcaaacagcttattgggtctggaggaatgccttcttcgcattcagcgaccgttacagctctcgctgtagctattggtttacaagaaggctttggtggatcacattttgccattgctttgattttggcatctgttgtaagttggatactttctctagtttaatcaaattggctattaaggaatcaagtgacgattaatatgtgagtggtttgggttggtaggtgatgtatgatgctaccggtgttagattacatgctggtcgtcaagctgaggtttgttcattgctgctctaacctttcctttgtttcatcttctaacttgactggtttgataaaagaaccactattggttttgtcatgatgcatttgagctctggtatcctgatctctggggtctgattcatttttcaggttctcaatcagattgtatatgaacttcctgcagaacatccgctggctgaaagcagacctttgcgggaacttcttggtcatacccctccccaggtatgtagacatatgacttgaaaaagtcttttcatatatgactagcaagatatgagattcttttagctgttacatttagcaagatagttacagagttaggggaaatcatgagtacaaatagagtgctgaaggaatcggtgagggggatcgtgtaattgggaacagagttgagggtcttttggaggcttgtgtgagctgatggaactctagaacagaccctagtttgtgtttactttggttgataaatgaactactctttgatttgtaaccgtgttgatatcaatgaatttctagttctcatcagattctgttttccatttgctgagaattc

SEQ ID NO: 58 - DNA, 98616 bp, Arabidopsis thaliana
ttgttatcgagactaagtttcctacctatgtcggagatatccatatccttaattttccggcgattgttacaagacaaagaaccaaagtcagacactgtgagagattttttcccctagaaatgtcaatggaaccgattaggctatgaaaacgctataaacaaagcgttgccaacgtttggcgggatttttttacgcctggttgaaattttagccgcgaatgttttttttggctcttaaccgtttaaaatgggccttaaaaggcctcgagccggcccaacgtgtccagaagctgaaatcacatacggtatctgatgaaagacaaaagaaaaggaaacaaatgtatattcgattaaaccggtagtgacgctgtgttggttcgttcttaccgactaccgtacagttcaaaagattttacatcaaacataaggaaataaagcaaagaaagaaacagagtaaagccttttttttttgggttgtggtattcaacttatttaggctagatagcggtaaagtttccggtctgtactatccctttccaagaaatctcgttcaatgagcgactcgattctcttctttatctccgtgggattagctaggaaccgtggctgcaactgtttcgtcacctcggcgattatgttgttgtggtctagtattttcctggacttcatgatccttacgatggctgcttcaatctgaggttttctgtcttcctccactctctgtctcgtctcttgcttctccggttctgtttccttttgggcaaccacagttccgatcttcactttgtaaaacttgctagtgaacttgtcgttcacaacgaacaaatcctcctctcctatgtctttgctcatgggttctttctttatcacgtttttgccctttacacaagctagcgactgcaaacagcgtttaagatctgctgccgggatttctgtagcctgttcgatctctttgtagctgagtcgatcagaattgttgaacaacatgagaacacacatctggaaagtcgacacgttcagttcatgtttctgaccctttccaaagatggctttgatatctgctgtgcccatgtttgtttgccaggacaatcttctaccggtatgtgtcccaaggtagtaagaacggaacttctcacagagaactgaaacttcagctgggagattacaaggtactgcaggctgtgttggccaagaaccagttgtaagtacctgaacaataagtgtaggtccttctgaaagctcggggtgactgccataaaacccacgcattgtgtcctctgaagtcttcatgtcagtgaacatgccttccaattttgaagtgaactgatagccacattctgtctttagtttcactattaaactcctttctgcgtcatctgacacagttttgcctgagagaagccttttagccaaatgctgcttgtagtacttctcaaagacatctttctcttgtaaataacggaacagcatcatcactttatcaaggataacctcaacatccacatcggtgatacccttaagtcctttccgtagcttgtcatcaacaaacagggagataaactcaggagaacgagcattcaagttgatgaaatactcgaatgaagaattcagggcattctgaaaggttttatcattgccaaatgcggtgttgatgattttgtcatatttatcccgctcatccaatagacgttgtacaaattccaccggatcctttgacttttccggatcagtaaccagttgttttcccatctccctaagatgcgaagtcataacgtctctgacagtaacaagaccattagtaaccctgcgaaacaagttgtacattctacccaaatcctcatacttgtcattcagaagcatattaaccagacctgagttctccatgtgaaccagtctctgcatgtggttggcaatcatctctttctcaaccacactagtaatcttctcttcgctcttggcatctaagtagtgcgctaccctctctatctcttcagtaaggcgtttctctgatttcttcagatagtccccacaatcacaagattcaataaactcctgagactcaaccttataaaactcagaagacgcatccaaaaacggcttctcaaaatcctcctgatacacagattcacccaaatccataaacatcttaatgacattcctcatcaaccccctatcaataacttcacctatccgttccttctgcactagatcaagaagagtgtttagaagccttgtatgtatcttagtgaaatgcacaacattatccctccacaagttaagccccatcggatgaacatgagtctttttggtgctctcaatataagtcctatccatatacatgagaatgtctcgaatcatctctaacgctttgttgtgctcattccatttcttattaagctcttctagaaacgaccctccctgagctgcctcgataagcttggatttttctttgagatgagaagtcatagtagcaataaacccagtatatagcttctcaccaaacttgtgcaggaccatgttgtacgcatttctgagccacaatatacacaaataattccattaacacgaaacctagctaagttccagaaacattaccagtttctacaggattcaaagaaaggcaagagaatgaaagaaattgacctgtaaagttcttcgaaactgagaccgctagcatcttgattgtaaatctgatggatcgcacgctcaagaatctgccaagttttatcagcgtatttgggatccacaacgactcgatgcttaaacgcctctatctgaaaattcctcttcttctgattactcatattttgaaacctgaatccaaaacaaatcaatctaaattcacacagcaacgaaaaaattgacgagcgagaagaaagtatatatgtataatcataatgaaaatcaggtggatcgaggaaatcggaagactgaccggagaggaaagacggatgatcgggattagggtttggaattgtattctttgcttccgtgaaaagatttgggggaaacaaaaagataggaaatggaataataatcgaaaagtttaaaggagaaagaagcttaaggctaatttgcagcgtcgaagagatatagatagagaggtatcggagaagatagatttcgaaggtggagaagaagaagaggacagaccaaacggagcggaagaaataaaagtggactctccgtctctgctggtggtttccaaactataacgtatttattaaattaaagtcgcggttgtcacattctcgtcctttggtatattggttacaaagaattgtgaaatatcgaagtccaaggatcgatccctagtcgaagccagttatttttttttttttgacattggaggtttagttagcttttatacttatgtggatatgacaaattggcacgtcggtcatttcatttaattgaactaaaaatatgtcaacttctatttcataaagaggctttgaatcccttagagtggcgaatgttgcttctcctcttttggcagaagccatggcgcttcatctagcccaacaaaatgccttagaactcggttttaggaagtcaccttcgcttcagatttgcaaacgctgatcaaagctatcaactcagaatccttcccaaagaatctctacgtgattttccaagatgttcttgctctttcgtttaatttcgatcaaatttcttttcacttcatttttagagaaaaaaacggttgtgcatatgcatatgcaaaatctgcattaaattatgcacttattgtaccaacttatgtatcggtttaagtttcggtttaatgaaatttcagcttcttgacgaaaaaaaaaaatcccttttaattcattcacaaaaaaagttatatcgtctgttacctttctcttcaccagtttaccaacctttgttgcttgcattcactgtttcgatgccatattcaatcgtctctatgcatctgtttaaaaaatgcatttcctccacaacttcagcgacactatgttctaacttctaactagtttttgtcgttgtaaacacgtcaatggatcttcttccttatccctggtcaagctcatgatgatattctttgtctttgctttcttgaagccattttctggaaagcaacgcatggtatataccatctttcttgttttaatcatacaaactttgacttggacctatcttcttacttttcattgtataatctacaaactttataacaatcttcaccttccctataaggttaacccaactagtggattattcgtatccacctcaagcgccaaaacatggtaaggatcattggtagattttagtatgattgtgaggtaggatcattgccggctcaaagttatgggcggtctaaagttttttttttttaataaaaaaattagcagaagtagttgagggaactcgaacacacaacctcttggctgaaaatgtgacataaatcgctgcactgtaaggaatttttataattttattgcccccaaatatttgtgatacctaaggttcttgcataaatgcagaacttgatagaatacggtacacactggagtctgtaactgtagaagtagaaccaagtagccaacatgcgcctcatcaagaaacttgacgtacgtttccgagacgggacaatggtttgatttatgcctttatgggtctttaacactttatgagaaacaaggatctttaagtggatttaaatatttaaaatttaagaaacaaaggtctttaagtgaatactataagagtttctttatttatttttccaatcgaatactcataattttataaatactgagacacataatattcggctagctctaaaacattggagctggaaagtttgccttacgttacgttaattggagctacaaaatactcataattttgtagttgaagcatgatgaaaagtttgccttacgttattactttttaaagcattggagctgaaaataaaatgcttgcacgaaatactaacctaacacaattaagcaaacatataccaatcacacgtcacgtctctctacccaaaacaaaatatcacacttcacgttatatgacttatataaacatattctaaactatttatctatcatccatccttcattggttttcgacaaatttgattcccacaaattatttgatatcttgaggaaatgaaattcttcatttttattctagcgttacaacaactctacgtacaaagtttcgcccaagatttcgatttcttctacttcgttttacaggtaattaaagtcgataaatgtctctacaagaattatcattgtactttgaaattttatgtttgtgtatgtgcgttgcaatgcagtggcctggagcgtattgtgattcaagacatagttgttgctatccacaaaccggtaaaccagctgcagattttggaattcacggtctttggcctaactacaaaaccggtggatggccgcaaaattgtaatcctgacagtcgatttgatgatttacgggtttgtttttaacttataacacaatagtttttgtattttgggacttcggaaattattaaccacaagaaaagaatcgtaaataactaatgagaatcgaaaacttttataaaggtttctgatctgatgagcgatttacaaagagaatggccaacgttgtcgtgtccgagcaatgatggtatgaagttttggacacatgagtgggagaaacacggtacgtgcgctgagtccgagcttgaccaacacgattacttcgaagctggtctcaagctcaaacagaaagctaatctccttcatgcccttaccaatgctggtacaatattcacttgttttgcccttcattttgatctccattgttagttatgtataagtggatgttcttttcttattatattttgtgttgcatgatgtagggatcaaaccggatgataaattttatgaaatgaaagatattgagaatacgatcaaacaagtagttgggtttgctccgggcattgaatgtaacaaagattcgtcacataatagccaactctatcagatttatttatgtgttgacacttcggcctccaaattcatcaactgtcctgttatgccgcatggtcgatgcgactctcgagttcaatttcccaagttctaaattttatggctacattttttctatgtatttacattctacctattaatttttatttgtgtttcttgcaaaatttagttgtaataaacagtgtataattggacgatacccgtgatttgcatggtaaaaagatgataaaggttactaatttgtttctagttaaaatactaatttacagttctcttacaatgttatggtgagaaaattgttctggtagttccttgctgaaattcaaggcatgtataatttataccagttaaattaatgttttgtgaacatagaatacattcatgtgtacctagcctgttcatgcatgatatctattgaaggatccaatttccttgcatcgaaatactgcgggcacaacatgcatcattggcctagcttattagatccattacatattgtactattcattttttttccccggacatcttaggttaaagatagcatcatttttctaaagtaactgacattagcaaacaccatgaattttgcgtgaagaaaaaaaatattgtagggccaaatctttatcattttctatagtatgaagattccaagactgaggttctcgcccgcacgagaagggcgagcttgaggtgtttatctgcaaggagatgggtgacgacgggtctaaagttgggtgggtttgtagatagaaggctgaggaagcttcggtaaccaccgctccatggagacgggtcattaaaaccatgttttgattactgttaaaagccatgttttgattaagcacaatgcatttcatgcataagcggttgaacattttttttttactctttagcaatatcgtgagccatttgtttttgttataacatgtacataagagaatgatgttgagctatcaaaaatcagtaaaatatagactcaacgatatataggataaagatgaggtaaaggttgatgaagaagaggataatgatcggttggtgaggaagaggataattaggttgatcaggtagaggatgatgatcattgatcacaatggatcgttggtaatagattgcccttcattaacagatgtggacttagttgacgtttgggaagactattgcttgatagagaatatgtcttgccttgatgtggcagacactggctttgttcctaatcccgataccaagtttcttagatctctttcttctgatgtatggatttgcgcttgaccaaatcaatggtagccattttatatatctctctctctctcgtattccttgttgtttcttcaactaatcttcgttttcctctatcataagtcgcgtgttgtagcgccattaacttctctctgctcataacgttttattttcaaacacaaaattccgtagactggttagaaccacttatgtttttgcttcaaaattctctaaaactgaaaactcttatgatcaacgaaaacacggtaacaagcgcatccatctaattttgatgaactcaacattataataaactgtactgataccaggacttcgagggtctccaaccttcctggaaccagtcgagttctattcccacatgcctgtcaactcatctagagatctttggttggaaagacaatggaagaagagaagatgagaaacaatttagtgacatacattctcgcaaactcaaagtgtttaaagacagtggaaatctccctcatagcagccttcaatcttaaggagaggcaaaaggagttagttaccatgcctaggatttcaacattatctaggcttctattccccatccaaatggaatgggagttcaatgaaacaactttttcattatatatattgtcatatacagtatatgctataactactcaagctgtcgtttacagattgcaatttttttgccttattaactcgaaaactctaattcagccaactttttactagtcgagatgaatttttttttaagcatatacgtacaacaaggctagattttttcatcatgagtaagtttaacaaagactgtgtgcttgcaaagtcatcatgagtaggttgttttgagtctcttatgtgaattaaacaaaacaaaaaaaacaacgtgaacatttcagtccaattttgtttgtctccctacgattcaaccagcaaaagaaaaaagcacataaaagcaaaaaatgggaatcaatatattgagacgttaattatgactggcatgtgtatgtatattgtatggtggtgcgttacaaatgaaagcaccctcatatctctcgctatcacgacttgggaacttgtttttaccccttcaagtttcgtttgccaacttttacttactgttttttttttaccagttactttattttactttttgcaatcaaatgtaactttgtttatttaaaaatgatgtttctagagggtcatcaaaaatatcagtgattaggcataattgtcaaatcttgataattcaaagatctcgtttatatgtgtttagtaatttagtcatagactcaaccaaaaaactttagtgatcaagtgatactttttttttttttttatcttcttccaagcatgcaaacagaggaaatcaaaatataaatgtaatcttttaaaactacggttgtaattaaaattacttttttttttttttttgtcgtaaattactaaattagtattgaattaagttagaaactatttctgtgtattttcttagagtaccttgtgtataattttgtatgaaaatagctaaagaactatcggtaacttttcttcactttacagttttgttttttacctctacagtttttacaattttcgttcttgttttacagttaaaaaaaaatagaaagaaacatgaaaccaccttcgctttctctgctggtggaaggtgcttcgatactacgacaaagagcagcgaactagtaaagcctcggagatctgaatcccatttcaatcagcaaatctttccgtctctacttctctgtttgccggtgtaccggattctgattccggaacagacattgcttaattttgcttccctttggcctgtaagcagattttcaatttttgctctgtgtttgattttcttatatagttggtttagtaagttcttctatgaagtgagaacaattctgggcacttctgattttttagtctctagtgattttaactagtctattgtgattttgttgaatttcaattttctcagacttaactgataaaaatctgattttttttcttcttcttattgttaagctttgatgatatttttggatcttgttaatatttagtataaagttcgtgaatctaacattatcatggttctgctgaatctatacttaaatttgaaaatgacttatgttgattaaaaaccataacttttttttttgtgtttcagggattgattgaagttaaaaaatagctacattgtactgtaagattgaatattgatgatctcgccgcgcgatttctcgtttgagtgattttcggctgtgaaaaatgaagagattttatggagggcttcttgttgtatcaatgtgtatgttcttgacggtgtatagatatgtagacttgaacactcctgttgaaaagccttatattactgctgctgcttctgttgttgttactcctaacaccactcttcctatggaatggctgcggattactctccctgactttatgaaagaagcgaggaatactcaagaagcgatatctggtgatgatatcgctgttgtctcgggtttgtttgttgagcagaatgtgtctaaagaagagagagagcctttgcttacttggaaccgtttggaaagtcttgttgataatgcacagagtttagttaatggagttgatgctattaaggaagctggcattgtttgggagagtcttgtgtctgctgttgaagctaagaaactagttgatgttaatgaaaatcagacgaggaaaggaaaagaggagctttgtcctcagtttctaagcaaaatgaatgctactgaagctgatgggagtagtctgaagttgcaaattccttgtggtttgactcagggttcctccatcacagttattggcatcccagatggtcttgttggtagttttcggattgatctaacgggacaaccgcttccaggggagcctgatccacccatcattgtgcattataatgttaggcttcttggtgacaaatcgacggaagaccctgtgattgttcaaaacagctggacggcatctcaggactggggagctgaggaacgctgtccaaaatttgatcctgatatgaataagaaaggtgaatgcaagtatagtttcacccgcttacataaatgtagtcacttgatcctccatgaataagtctgtgttgacatgattataatacacagtggatgacttggatgaatgcaacaagatggttggtggagaaattaaccgaacttcttcaactagcttgcagtccaacacttcaaggggagttccagtagccagggaagcatctaaacatgaaaaatactttcctttcaagcagggtttcttatcggttgctacacttagggtgggaacagagggaatgcagatgacagttgatgggaaacatataacttcatttgctttccgcgatgtaatatcatcactcttcttatatatttttctactgctcttagcaattttccatcaaatgtttagtgtctcatatgggttcttcgtctttcagacactggaaccgtggcttgttagtgaaatacggattacaggtgactttaggttaatatccattcttgccagcggtttgcccacatcagaagaatcagagcacgttgttgatctagaggcactaaaatcacctaccctttcaccattaaggccactggatctcgttattggtgttttctccactgcaaacaattttaaaagacggatggctgtgaggagaacatggatgcagtatgatgatgtaagatctggaagagttgcagtacgcttttttgttggccttgtaagctttctccctctctgaaaatatcaggagtatgttggaattgcataattctaaatgatgattttctttgtggttggtaatgcagcacaaaagtcctcttgttaacttggaactctggaacgaggctcggacttacggtgatgttcagctaatgccctttgttgattattacagtctcatcagttggaaaacactagccatctgcatcttcggggtaataatatagttgtctttgtcatgtttcttcctagccacagttgagtagtctttactgttttgcctcactaacgtcatattttaaacagacagaggttgactcagccaagttcatcatgaaaacggatgatgacgcctttgttcgtgtagatgaagtgttactttctttatcaatgaccaacaacactcgcgggttaatatacggactgatcaattccgactctcaacctattcgaaaccctgatagcaaatggtacatcagttatgaggtacaacacaatctgacatagctatgtttgcaaatagactgatttctgattcatttaacgaagtttctactcaaaaaacaggaatggcctgaagagaaatatccaccatgggcgcatggtccaggctacattgtatctcgtgacatagcagaatcggttggtaagcttttcaaagaaggaaacctaaaggtattgtactactctatgctaactccattcaatcacatttccggattcacatagaaatggattgtgaaaatttttgaaatttgtgaatagatgtttaagctagaagatgtggcaatggggatatggatagctgagctgacaaaacatggactcgagcctcattacgaaaacgatggaaggatcattagtgatggatgcaaggatggttatgtggttgctcattaccaaagccctgccgaaatgacttgcctttggcgtaaataccaagaaaccaaacgctctctttgctgccgcgaatggtaaaacgtgaacgcacatatttcaaccattgcgttttggttcacgtgtccttccacaggtacataagaaaagagttcattctttggtcacaaaatatttgattttgtttgtttgttgtacaagtagactagatttgcagtttagttttacttttacgtgtgtatattacaaagatgtactaaaactttcaactgataaataacaataggagcatattttatcttttgagaatttgatatgaatcaattgtcattgcttactcttcacaaatgtttacgtgtaatccactagggagtgaatcgtgtcacttcaagtaaagatccgaaaccagtggaactttttcttttcttcttatccaccatcatgcatataaatatgtgcaacagccttcaaaattcccaaaaacacccttcgtcgtcttgaagtataactctctggaatgaggagagtttagacaaatcataacgttgagtcagagaaaaatataacatagatatttgctaatggataagcatatcgataacatcaatcattgtcttcaacttaatttattttaggcccatgggaagaaaagtcttctgcgttaataatttctagatctttccacaacattcatacgcaactcccttaaatcttgaaacgaccaatttcttcaaaacaatagtttgtttgcgatggcgacagaacaagaagctgaagttggaacagagacatcctctgtttccggaaggtttttgaggaacagagatttatatctcttcttgccttttctcttaggcttctctgatcaagaatcatcaaacggagatgatgatgatgttgcttcatcgcgtgagagaatcattttagtcaacccttttacacaaggaatgattgtgctcgaaggctcatcaggaatgaatcctctgcttcgtagcttactggagtcacgtgaggaaggtcgtcctcctgcgtccaaggcttccatcgatgcgatgccgatcgttgagattgatggctgtgaaggagagtgtgtgatctgtttggaggagtggaagtccgaggagacggtgaaggagatgccgtgtaagcataggtttcacggtggatgtatagagaaatggttagggtttcatgggtcgtgtcctgtttgtaggtacgagatgcctgttgatggagatgagattgggaagaaaagaaacgatgggaatgagatttgggttaggttcagtttcaacgatggtcggagaattagagatttttctgcgcaggacggtggaaacagtgatggtgttgagtccgagaattaggatttacataagaagcttttgtaaaaaaaacttgtgcctttttttgttcttgttctgggaaaaggttgatgaactttttttgtcttaagatggtacaaagtaagctcaggaatctccataatcctcatcaaaccctgaggcatcacttctgatatcacacataacaaagagaaaaaaatgaaaaaacaatcaagaaatgtgcataagaccaaaccacaaacacttcttgattccttgattaagagttttcagaaggacaaagaagatagagacgaactttctggcccaccaagttgattaacagcatcgatgaatctgttttgaagctcacaactccatttcaatctctccttagattcctttgacttatggttcttatcatttaccatgttctgtagtaacaatcaagaatgatcccaaacgcaaaaacattactctggccacaataaagattaaaaagaaggattttattttcacgattgttgcacagatatggagattaaaaacatgtagttgttggagtttgcttttacgcttgttcttcaaatcttattctcacaacataactggaaacattagttgggaatatatgctctcttgactctttcctctttctttttcttttatttatttacctttttctcattttacgttttagtatttgactacatacaatatttgtttccctttcctcgagtacttccggatttcacacaactttttgaatacatattttttctatatttttggaagttttgtgtaaacgctttcttctttgacctgaagtggggttagacagaatatgatccaataatgtcaaaacaaaaagtttccatgaaaattataatagactgaagtttatcaagctcattacttctccttaattatctcgacaactccatttccatacttctctgcatttctttgaatttccctacactatatcatagcatgtaataaaacgccaacaaacatttgtaaccaagagattaaaaatgttgtaggtgtataagaaatttagtctatgatcacaattcacaagatatagtaacccttaaatatgcttattttattaccattataaaccacgagaaggaaaataagatgcaacaaatactgtaaagcaattttttttttttttttttgtcacactgtaaagcaattaaaatcccataaaatatatataaaagagcctctatcgatcccatgtaaagcatatagaatggcctccgtcacgtttttcacgacaaggggctggttcataaatgtaccatatacattctctacatatcccaataggacttgtttcattgtcgtctctgtctgccctaaaaatatcaaatttctctatacttccgggccactcgaaagtgcaattatacgttgttgttttacgaagattgacacgaaacctgaaatcgaaactagctccgattgggagcttttgtatccccaaatctttctctttattcacacaatgtacgaccaatgttgcacgtgaggtcaatgtgttgtagatcacgacatgtttaggtgaaaatagcaaaattccatcgttggacgaatgatttcccaaagatgacaacttttttaggataaataaaaatgagagaagcacggaagtgaagtggttatttgttgaggaagccatggaagggtttactggtttgtgacacaatatttttccttgtttcgaaagtagtatttatatgtagatgggaaaaattgattatatatcatttaattactcattaggaggggagaaaggaagttaaaatctattgttctttccctaccaaaaaaaaaaaggtctattgttctttaaaaataatctaactaataattagttatctttattgttctttaattaattaatattttttaaagtgtgaaaaaatgataagatctctctatcccctatatattaattaagaaacatacttaagaaaataacctttagctactgtagtatttacagagatatcatgctgacgtgacgcaagcagagcaattctcaaccaacttaattcgttgttcatcatttactagattatttacaaaaattgtcattaatattatatataaatattccaacaacataaaaaaaaaaagcaatttccaattaaaaatatagtaaataattaaaaacaaaatttcaattaaaacaacctaactaaagagatttaatatggaaaattgaatatatacaaaaaattaagatttgggagcttcataatcttgacatctttcctctattacttttatatatttaaatctaaaaataaatattcacaataaataggattatctattttcatcatatttctaatcagattttaccaatacatttataatttaaattattcccaaaaatataatatcaattaaacttagttaaattttaaatattcagaaaattctaaaaatataataagaattaaatttaatcagaaaattccaattttgttttctgttaaaattataaaataatatctaatatatttatacaacttatgtatgtttcatatcaattaatgtatatgtaataataattttacttcaaaaaattattggtttaaataaaataaaacgctatatgatatgtttcataatatacaagcacacaaagcaaaacaaaattacacacaaacacacatgatttggtgactatttggtttgcaaaggacaaagtagatggatgaagctcacagttccatctcaacctcgggttagagtcctttatactatacaagtatacaactgataaagtaagagaaatggaaagagacactcaaatactttgctgtagaataatcaaagcccgtcttggatttagagagaatataaaacatacgtatatgaaattgcatggggatgtaaataggcttatataggttttagtgacaaatagtgaaaaatatgtaacaacaatttcaaacagcttatttgtctatttaatactattcggatacaacgaaatgaaagaaaaataccagaaatattctacgatgattaagagcttgattggtatgcagttttttcacgttttcaacaattctgatgagtacttagttattattcataaaactgtgatcaatgataaaacataaaaataacacgtggttatttaatttttcttgcatgttttgaaattataaccaaactaaacaaacttagctttattcatctatctaatactagttttttggcatttggaaaaaaaaaacatttctcttcaatttaaaagtgtcgttattctattgattccgatatttcacaattggtctattcatctgttaatatgatataccattcaatctctaagatgtccatgaaaaacagaaaggagcccctccatcgcgtctagcacgacatggacctgtctcacaaatataccaaatacattctctacatattccacatgtactttttgaattatcgtctctatctactctaaaaatatcaaatgtctttgcatttcctggccacgagaatgtacaagtgtatgttgttgttctgcgtagattgacccgaaacctgaaatctatttgttcttgaggttctaacgcatgaacccctagatctttccctttattcctacagtgcacgaccaatctttcatgtgggttcaatgtgttgatgattataacatgtttaggtgcaaacggaagatcaacatcgacagatgtatagttttcaaacgctaatgacgttttgaagataactagagttgtgattagcacggaaatgaattggtgatttgttaaggaagccatggatgtattttgctggtttttaatatacttggattttctgtgaagtagtatttatgaattaaaaaaattgtgaactattatcttcttgttatttccttgacaaaacatttaatataccatataattagtcatatttaaaatgatgtgaaatttgtcaattaaacaaaaagatgtgaaaatctgtagataataaagcttataatgatgtattttcaagtaaaggttttgaaattataactaaactaaagacactttattcatctactaaatattaatttttggcatttgaaaaaaaaacatatatattcaatttaaaagtgccatctttttattgattccgatatttcataatttgtcttttcatctgttaatctgatataccagtcaatctctaagatgtccatgaaaaacagaatggatcccctccatcgcgtctagcacgacatggacctgtctcacaaatataccaaatacattctctacatattccacttgtactttttgaactatcgtctctatccgctctaaaaatatcgaacgtcttttcatttcctggccacgagaatttacaagtgtatgttgttgttctgcgtagattgacacgaaacctgaaatctatttgttctcgatattctatcttatgaagccctaaatcttcccctttattcctacagtgcacgtataattttccatgtgggtgcaaagtgttgatgattataacatgtttaggtgagaacgggaaattaccatcgacagatgaaaagttttcaaacgctaacgatgttttgaagataactagaactgtgattagcatggaaatgaattggtgatttgttgaggaagccatggatgtattttgctcgtttgtaatatatatactttgattttctgtgaagtggtatttatgaattaattttttttgtcaactattaccttctttgttatttccttgacaaaaacatttaatataccatatccagtcatatttaaaaggatgtaaatttgtcaattaaacaaaaagaagtgaaaatctgtagattatatagcttataattaattatgtattttcaagtaaacatgtctattggtagttgctagcatacaaaataaaatatctcatctaatttacttttgggaagtagaaggttaaatatctcaaaataagatatttttgtctaataggattctatttgtcatctttacttctttagtaggtttttctttttagtcatatttagctagtccaattattcacaacttttttatatatatttttgtaagaaaactaatggacgtcttctaaaatgttattgtgaatttacatataaagagagaaactatgaatgatgatgggatgttaaaaaacgagcaaaataatggttaaaaaggggagatattattatttttatgcttgtatatgctactacttaccttatacaataatgacactgaattctatcacacatgtggtagatgttcattggtcccatggaatgatgactactttaactctagtagtattttccatttagacgtgtttcacacggtgtacaaccgacgtagaccaaacaatgttgcatattgccatgttcatttttgtaaaatagatttctcatgttctgttttttttttataaacagggtaaatcatgggctgaacctaaattaatcctcgagatctatagaaattgggtatccttgccatttaaggtgtctacggttaccaaaaaaaaaaaattagatccatgatctttcatacaagagagagtccccaacccatttgaggagactgctaagccacttttacaggaccattcaaaaaaaaaaactacattttaataacttactaatctctgtctcgtagttttgttggaagtgaaaaaaatgtcgaattttcgtaacaatttttctctatctcttgagaggttttctttaccaaagtttagttgtttccttaagaacttctaagtccaaattgacggcgtttttgtgctttaattacacgaaataattgcttctcttgcggtttaaatttatgtgcgctattcattcttaacacgaactccggaaagtttgaactccaattattaacattctttgactagatttcgtgcgagtatattaaggttgttctgcttcttccggatctacgagaataagcggtgaaccaatattatatataccatatattcactttaatcgttatgaaaacgttgcctcgtcatcaatgtcttgattagtcgtgaattcagattttcatggttataagaacaacctaatctattaacacatgagaaactaaaaaataggtaaccacaaattcaaacaccaaattattttatttatattattactaaagtaaatgaagggaaaaatattttaaatgactaagaagcccaaggaaaacactgaggctggcctccatcacgtctatcacgacaaggagctggctcataaatactccaaatacattcgctgcaaactccatatttacttcttggattatcgtctctatcagctctaaaaatatcaaacgtagctgtattgccgggccactcgaaactgcaagtgtactttgttgttttacgaagattgacgcgaaacctgaaatgaaaacgagctaaatgttggaggcttattacccctaaatcgtcccctttgttcctacaatgcacaatcaacgttgcaagtgtgaccaatttgttgatgatgataacatgtttaggtgagaatagtaagactccttcggtggacgaataatttccaaatgatgacgatgttttgtggacagcgagaaagaaaattaacaagaaaatgaaattttgattgcttgaagaagccatgtgtgtggtggctttagtttaagcctttgttcattcggaagcaaaatttatagatgaaacaacaaataatgtcttttctaaactaaaaagaaaaattattttttgggataaaggatgtgaaaatctttagcttataactaataacaatgtcttggcgataaatatatggagtctaatcatgttcaccaataattagttaattataaccatactaattaaaatctatatttttgctttgttaattattaatgtgttttggcaacaaatggttatatttatggcattttctatttttgacttataaagctattttttgttccaaaaaaaaagacctataaagctatttgtctttcaattattcataactaaatttagtaaaaaattcaatttatatcaaacaaattatttttacaatcttctgattaacttaaatcttttatttatattttttattaatatcattgttatttatatatcttctaattataaaaaacacatttattcttatccataaatattatcaaaattttcaacatgctatactcatacttgcggatgttcttttattttgtgttgtaaataagcatgttttaacatcttctcgtacttttttttttatgatcctaataatctcttccatctagtattgctttttggaatatttatttgtttttctaaatttggttcatacaaatcatgatgttaaaataattttaacttgattagtttaccgttttccgttttttggtgcttatatatgtttatttttaaatgatgaattgtcgatttctgaagaggtcatattcctattatatataatattattgttgcaattgttgtgtttccaaacgcagaccaaccggttagattgatgttcagctctggtcccttatgattcatccaccattatatggttttaccgggtttaccaaacgttagttgtttttctattttcgagtttcttaaatactaaatgatttaaaatattaattaaaaaatacattgtaagttgtgcctatgtattggctgaataatcttaggacactgcataatttgctctataaactgcaacaaatatttgtttgcaaatgaggaaaatagaaatgttagttttatcaaatttcttgacatggtaattgattttctcaaaattattcttaacagatatgacgttgcttttctttttgtttacctcgtatttcttgacatgtatgctttgatgactatacatctttcctgtgctactccaatttgattatagatctctctaggacattaatattatcgggtatatgtttatttactcttatgtgacttaattgttattagatatctcagacatttcttttgcatgttcttggtcattagccgtagtatgtcatatatatatatatatatgccttgtatcaatcaactcatgtgcataccaaaaactactaatcacattgcaatttatatttttggtagtgttgattagtaagatacttggtggtacaccatttatcgcaacaataaagagttatcaatcagaacagaaatgggagactgctatatttatctcgaggtctatcttatatacaaacacctaattactttgaactctcgaagacaatgagaaatattcttacgaacacattagctgtagtattgaccgcgatctttatgctttccatgaattggtgaagaattgcttccttgtggtcaaaatgtatgtgcacaagaacattcgccgcttgaagcaagaaatcatgttaggtgtcgatgataaggtttttttacttcttccggatttacatgaataaagcggtgaaccataccatattcatatgattggggaaggcgatatacccaaataaacaaaactgtgaatcattatcacaagatcgccttgccattaaggtcgtgatgaatgtgtctttgacgtgaattcagattttcatggttataagaataacctaatctattatcacacatgagaaactaaaaataggtaaccacaaattcaaacacaaaattattttattttattattactaaagtaaatgaaagggaaaatacaaatatcttaaatatttttagatgactaagaagcccaaggaaaacactgaggttggcctccatcacgtctatcacgacaaggagctggctcataaatactccatatacattcgctgcaaactccatatttaccgcttggattatcgtctctatcagctctaaaaatatcaaacgtagctgtattgccgggccactcgaaactgcaagtgtatgttgttgttttacggagattgacacgaaacctgaaatcaaaacgatctagagggttgagtcttattacccctaaatcttcccctttgttagtacaatgtacaatcaacgttgcacgtgtgaccaatttgttgatgatgataacatgtttacgtgcgaatggtaaaagcccatcgggggacgagtgatttgttaatgatgctgacgttttgaggataaagaaaaataagaataatacaaaaataaaattttgattggttgagaaagccatgagtgtgttttacttttaagaatttgtgagataataatatttgttctgtttcagaagcaagaatttatagatgaaaatacattaaatgtgttattatttttaatgcaaattatcttctgggatatacgtataaatctttagtttgtaacgtaaaatacaattacaagcatactaaataaaatatatatttaatggtttctatatcattattctttggcaacaaaaatggtcaaatttatggaataatgcaatgttagtatgaaatggtttctatatcattatatttaattattaacaactatgcaatattagtttgaaattgtaacgtatgtgatactaaataagtgcatgaatcacgcgaataaatcaaattattttgaaaaactgttagagcaagatctaccttaaaccacaatttattgatttcttttctagcaacaaaacgtcttttatcactctaaaccagcttcaaacacatcgtgcacaacaatgtgtttgtatctcacgatcacgcatgtgagaagctaaattaccaacgttgtaaatttttctcctattagataaataatatagagtaagagtaaaaataaatggtccaacatggtaaacatagcactttaccaagattttaaccaccgcaatcttgatatcatctcgaggagaatgatgattgttgtctcgtcgctagggatgacaaggagaaaatagttatcgatattttagttatttgtatagaaattagtttttataatcgatgttttggttattcatattgtaatatctgattttgcttaccctagcaacaatttttttagtagtcaatattttggttattcgtatagaaaccaaaatattttgtactcattcacaaaaccacattggaacatctgtaatatagcattttgaactgatgtatggcagctggcatttttgtaaatgttttcgcattattgtatttctaattttctgtatgaatattccaaaagaagttgtacattttaatgagacgtggctgacaataaaggaggcaaatctttttagtggcactgaaagagagatcaaaaagagcatgaaaagagatagcaaaaagcccacttttttgcaacatgtggctctctcatctcttcatgtccctctctaagctgacgtgtaatttctccattttctctgtctttatggcttgtggctctgtgtgatccgttattaatttaataccaacctcagcctcttatacatactcttgtctcagacctcaaataaagaataaacacataacacaaatctaatctcatactccatcttcttttctgtcttatgtcttcaaagattggtatgtctcaagttagagatactccggttaaattgtttggctggacaattacaccggtttctcatgatccatactcttcttcgtcccatgttcttcctgattcttcctcgtcttcctcgtcttcttctctatcacttcgaccacacatggtatgtttcatggtcttacctttatttgttaagaaatgctaaagatttaatattttctctagtccttgtatcagtttgaaactagttcatgatgttaatcctaatccaagttccttcaatttttttcagatgaataaccaatctgttactgacaatacaagtcttaagctgtcatctaatcttaacaacgagtcaaaagaaacatctgagaacagtgatgaccaacacagcgagatcacaacaattacatcggaagaagagaaaacaactgaactgaagaaaccagacaagattcttccatgtccgagatgcaacagcgcagacaccaaattctgttactacaacaactacaacgttaaccagccacgtcacttctgtagaaaatgccagaggtattggaccgctggtggatccatgaggatcgtcccggttggctcaggccgtcgcaagaacaagggatgggtttcttcagaccagtacctgcacatcacttccgaggatactgacaattacaatagctcctcaacaaagattctaagcttcgagtcttcggactctttggtaactgagaggcctaagcatcaatcaaacgaagtgaagataaacgctgaacctgtttcacaagaacccaacaacttccaagggttacttcctccccaagcatcccctgtttcgcctccttggccttaccaataccctccaaaccctagtttctaccacatgcccgtctactggggctgcgcgataccggtttggtctaccctcgacacttctacatgtcttgggaaaaggacaagagacgaaacttctcatgaaactgttaaagagagtaaaaatgcttttgagagaacaagcttgcttttggaatctcagagcatcaaaaatgaaacaagtatggctacaaataaccatgtgtggtatccagtaccgatgacccgcgagaagacacaagaattcagctttttcagtaatggagctgaaacaaagagcagcaacaacagattcgtccctgaaacgtatcttaacctgcaagcaaaccctgcagccatggcaagatctatgaacttcagagagagcatataacgttaaaggagaaaagaaactttgtagatacctttttttgtgtgatgaattaacttttaatatctatcttatttatataccacaatccccattttgtagattatccaaacagatggaaatgctgaagtgtaatgtcttttttggtaaatgtggttcgaaaatattgtttactccattatttgtattttgtagtactagtgtataaattaattggaaaaaaaacatatgtgtgaattttcatgtaaaggagaaaaagtagagaatcttaacttggagtccttggtacagaatccatctgattggtacaaactaaaagctaaaggagaaacataaaagtctctttctttgaaaataaaataagtctcttcatttgcgtataaagggaaacaataagaagaaaacactttaagcacttttttccccctctctttaagcactttactttgggagaattactaaaatgagtggaaaaatgttaattagttttagaatagtttttatcttttcgaaaatcacttaatattgacttcactcggatgtttgttcccaaaaagagagactcgagaacatctccgaaatagattgggcctattgaagcaatttcagacccaatgggtaaattaaaaatcttctctacaacaacctttcaaaatccgaaaaacccatacatttatccacgttatatattattttaaaaactcatattcaaaaccaaaactaatttttttcctttttttttaacccaaccaaaactatacaaaagaacaattcaatttaaatttttcttttatatctacaacatggaaagaattacaagaaagaagggcatgtgtgggtccgcgtgacatgagagagatacataggtaagaagcttgaagagttggaaaaacggtttgaagagaagaaacaaatgcaatgtgtgtgtgagatttggtgagcatgtttcatgtttggcctttctgttgcacaatctctgcctcaattttggcagttcctcttctcttaattacgcatcttcgtctctttctccaactcctagaaactccactctttttaatttcccttctctctctctctctctcgttgttattctcaacacgtctttagcaatatttcacgtcacttcatcataaaagaatcaactttttaaaaccaatctctctttgttaaatatttctgaacgagtactactaaaaacaatgacttatcaaatgttacactagacaaccaagtgccaacaacaacaatctacagtttagtaattaacgtaaacgcaaggacaaaggctaggatctggtttgtttgttttctagctactaaagctaaatgctattttttttgtaaccaaatttaaccactgtcgttatctgattaacaccaatttgttcaacattcacgccgtccccaagccaagaaaatcgaaaaaatgtggttgctgcttagccttttcgaacacctcctcatctaccgcgtccattccgatccaatgcattgcatcatttggctccggtttctcttggttactagggtcaatgtgcggaatattgcataacgcgtctgacgtggcaccaacgttatcgccgaccatcatttggttgccaaacatactcacaaccatcggaggttcattgttctcataacctgaacgttgtagatataacaaaaaccaaaaaagagttcaaaatatgcaaaagacaattgaaaaaactattgaaagaggaggaagagctataggctaccttgaaagcaatggaaaggcaacacaagctggttatggtcactcgtgataggggcattattaaccaggtgatgagtcaaattaaactcggggaaaggctgagcgaagtaatgattagtggagataaaagagtggtaattagggttagggttaggatgatgattattggtgaggtgaggtttaagtggattattactcataagctttctcctacggtaagcagaagagtgttctctatacttacgagccatgacaacatgccaatggttcttcactgaattatcagttctaccagggaaaagcctcgcaatcattgcccatttgttaccataaagcctatgtgcttgcatcagcctctcctcttcttcttctgtgaaagctcttcggtttatcctcgggtccaattggttaaaccatcgtagtctacagctcttccctttaaaaacaatcaagattaagttaataaaactcaaaaaaaattacgttaggacttagattggacatagaaggctaaagaccaagaaaactaataaaaacaaaaattgattttatcaccggatcttaagaacttgacagatccagatgaatcaaacaaactggttttgatgaaattttgaagatctataaggttttgatttaacttgctgtcaaaagaaatagaaaataaataaggttttgatttaacttaccagatcttccttgaagcttttcagctatgaggttccagttttgtgggccgtaaatggagacaagctctttgagtttaacatcttcagctggtctccaatgtcctctccccaagaccgatggttttgaagacgacgaggaccaagactgaccactatctgttgtctccttcttaccactctcgctgttactgaaattagggttattattattactctcttcttcgtgaaccgctacatctccaagaggactcttcaagatttcaaactcatgacttgtgttgcagtgacgatgatgatgctgatgaatattaatgtcgttgaaagggaagtcccaagaagaagaagctcttcttgcgacgatctcatccatccacacttgtttttccgttataaacatggagttagtgttgggagaaaggaagaagaagagaagtgttattgagaattaagagagatgtcacgtcagcttatagacatataccatcggaggagaaagacttatgtgagtgcatttgcatattatatatacacgtacgtaaatgtgtgtcataaatattattttttaaaaataatagaatatcttttgtatataatggtgtgtttgttacgtatggctttaggtatgtgcgtgtatgtacatgtcgcgaccgtgttttctgacgactgttaaaaagggttatggaccgtcgtcacggactaattcaaacgacagagttctttgcatttatacattattatatatattacatatacactactgtaataagtaagtacaaatgtgtattatcgatattcgattttgctgtggactgttatacatttgttcaggtgtacctagtttcatagaagttaaagagtttttctgataaatcatttattaaatttaaaagtaactaagatttgaagaccaagtttttttccatgtccatagattgatagtaattgaaaagtatgcaatagttttatagtcgtattagggttcataatcaaacgataacattaattacgctgcttctctatggttccttatacaaatttcctacttttatgaataattaatgtttatcttagtttgatgtataagatagtatttcctcttttatttaatgaaaaccaatggattatgacaaaataaattaatgttgggagtgtcgacctaaaaaacaatgaatgtagagaatatcttggacgagtccgaaatgaatcttaccgttattaggtgaaatttatcctctattaatcaatgcatgttttataggtgcaaggtgaaaataataaaagctaatgagatgaaagaaaaaaagctgaagcagaactaactaccaaaaaaggatgaaggcaaaaagagagtttaccattggggaatgagtcgggtctcttcttagcacaaccaattctcagacagctttttctttcatttcattttgggttccttaaaatttacctctttctctcttaatctccacttgtctttcattcctttactttttactaccatttttgtttctgtgaaaccctctcttatcttaaaaaattaaccacaatcttttttcttcattcaatttttttcttaattaaacatcgcttcaatatactcattttctccttgtcatgttgtatcaaataatcttgaaattttgactgttttattctttgtagcagtctcatggtttttaataacgagatattacaatgccaattcaaaaaaactctcaaccctaaatatcccacatacatgaggaatgtggccgtgtggaagtgtgtataagtaatgagaatgaacagtaaaaatgtaaagaaataacttttaagaccttttcgtatttgaccagaaatcccaattggcagacgtaaccattaaatatgggataaatacagatacaaaaggggtctcagaactgtacgatcctctgcacagagatttaaccgaacgcactacaaactctctttctcttcgtcatattttctttttaattggtcaatcactttgaaatacacattaatattatatatgaaatatgaaataaaaggttgggtgaagaagtatatatgaactatataattttatgaaacagaaagttatgcagctttatttaattttatattttgcagaacaaacatttataaaaattgtaatcagtttttttttaccgtttaaaatgaaatgatgaaataaaatatggtgaaacacactattaattatgtttgtttgtaagtagagccactagctaaagtgggacttcgatttggttgttcttttgttttgggctatgaatctatcttgttactttgtttatatccagtagactagtactagattttcgattctttcgtctaaaatactaagttattaaaaacatatgttctatttacacatggaattatttataaacatgttaaatatttaaacataccttgaaaagtaagaagagagtctaacttggaagattaaaggagtttgatgttactgcttgatcgagtgtagtagcttgttttagggagtgactaacagaataagcaactaaattactctggaaacagatgtatgtaaagctcatatagtgaggggacaaaaattatctgaggtataaaatagattgcgatctcatggtcaatccgtttcggtggatatattagctacggtccatgcgtgactcagtccaaaattgattacaagcttgaacatacctttttcaacatagcattaatatatacttttgtcagtttgtcacaaaaatacatcaaatgtgtaataaggaatcactaaaacgttggaattaatccaaagctcaattttactcgtctgacataatctaatttttattttctcgaccattctttgaccccatagcccatttaaatttcacctaattcacttttcttggaattctttatgtccgtctacaaattttatcaaccttagttattcatgtgttacaatgtccccttgtacgataatgtttaattttgttacacgtttggtcaggtttgtgttttactcgaaagaaaagttcgctttcaaatagactcttttctgacgtggcatccatctatatgtaatatgttatgtgattagtgatcttagactaagaataaaaaagcaaagaaataaaattacttacatatgggatctttttttattgattaacaagagttttttttcttagatattttagatgtcctcaataattagtagtcaatgcaagtaaacattgagttctttgaaaattaaaatccgttttaaatcaagaataaggattggtaatgataatgagaggtggagatgatgaacacgtgcacatttagagtaacataggatccaattcaattcaaaggagaagtcttttctcttcaactgtgatgcgtccccatggtccgattttggcgtgtgatgtcgcacaaccatcacgtgtattctccttatcgtactacacccacgcacgatcacaataaatctatcgaacaatcacgaacacttagggaatatacttgcttagaaaagagaaaactatagaacaaaacaaaatcgaactagtttggattttgcctatgttgagttcgtaaagtatttagactaatataaaactagaaggttacgtgtacaatgttataaatattaggattacatcaccaaaatatatatgtcattcaatggatttttaagacgctagctataaataaattagctatagatatgcatttcgtttcacccatgagtttaattataaatattaacttgtcaattaatcaaataatttcaaatgctaatcaatcacgttattttgtgaacaacaaagatcaattactttatgcaaatcaaataaaaaattaatcgtcctatcaacgagatttttcaactattaagataactaatgtttttataaaataactgaaaataagaagtattaattttgttctacacatgcttttgcgaaaattcaaagtgtttaaccaataatcagttcagattcaattaggtctgatttggtttgagtgtaaatatatttttgtagtaattaatgcaacaaggtgccgatttggtgattaaaaagaggagaaactagtgaggaaacagaagtgaacaagaaagtgaaagaaagtgagagtaatgaaaggaagtggagagacagagaggataaatggtgggaacagatcacgaagacacacacaaactcatactgtttttggagtttccaaaaagagatgacgtgaaaggtaaccaaacagtaaagtctatctctctcaattttcaaagatgaatgaatcaatgacccatctaatctcatagcctcctttgcccctatatctattttcacatccaccaataaagtttgtcttaaattctaccctcttttcttaacctcattcgtatttttggttacaatcacactacttctttgtttctataaccggagttagttcaacaaaattcttaacttaaccggtcccttcaactaattaggggtttcaattcttggggcatgttttagtgttttcatgtatatattttaaaacttacatgtttttaacggaaatttttttctaagtttacaaagaaaattaacagtgaataagatttaatattttggtcaacagtcggttctaaccaattttatatgaaggtggggaatatgacccgacctgagatcatgcctataaattaaggctctgttgaacttggtacgaaattttctgtgtgtatatattataaaattatatggaaggacaataatgaagaaaacattgagggtaaaaataaaatttgaaaagttaaattatttattgaagaataaaaacgaaggaatgtgacaagtagtggggcgtaagggagcagcagaagacaaaggctaatccatgagattctgttaggtgtgttcccttgacagagccatgttttgaatcctttctttgctctaattaaaattcataaccctaccaattaatttcgacatccaactcatgggttcgtctaaatttgtcttcattttctattgcatgaaatgtttttgtctgagcggtttaattatgaagatgagaaaatttagttgttacgaatagtcatggcggtatttgaaacaatagtgatctgattttattatatttttgaataattttattttagctatttgagtagtagaaaatattctgctacggcgcaacaagacttacgtaatcagttggaaaagaaaaatgacttacgtaatcaaaggttatattctagagatcgaatatttattattgtgtcaccacggaaagaaattaaaacctcaattcaaattggtcttcttcgtcaaggtatcttttcaagtgtcaatattgatttcttctgaataacaggtcaatcctcaatgtggatcttaagaggtaatgccagaaatccaatattgttgatatgcaatatatataattaaactttattgtacaaaattataattttttatcacttattttttgtttcccttaaacgtgtaatttttttagtatcaaatttaattgatagcacaatatgaagcgtttggagtttcaaactgctatataggagactaattgttcagagtgaaataatatagtacataagaaaagcagggaaagtttgcatagaaattaaaagaaggtatatattggagcggagaaggctgaacaatggaaagtattatacataatatataggctatacatgaagatgttttaacgatggagagtcttctaacgatcaagatttctagtattgtgtcaaacggtcttgttgctttaattagagatgtaatggcgtacaattatacgtacacattagttctcttgtttgatgtataacatataatagtaatgttagtcgttagatttgtgatgcatgtcatatgggtatggaggctgtcttaaccgaagtccgttaagagtgtcgcaattaaaggaattaaagaaaggacaaaaaagtactctttgcatgataatatttgttaaatctttgaaaagtaatgggtgtaagtatgggtaagaataagatgtcagaaagctaatgctaagacccacttcttattgtttaaaggacacttacctgccccaccctcacatgctttaatgctccgatcccttcttcttcgatctgttcaacgcaaggaaacataatctaacacgaattggctaacgttcacattatcatatgtctataataaataactcaacgtccataacaacctaatctaacgaacaatttaaagtacctctccattatctacttccatacatcatcctctaaatgtataaaatacgcatggtcgattttgccaagcaaagaaaatttaaatttggagtcacgagacgatatataatagtttagggacgtcacaataaacttcgaaagattttgtgaatttgttcacaagtggttcgtttgagtcattgttaattagtcactttgttttgtatatatcaaatcttgattaatagagccacatataagttgtgactggttttgcaaacgtatatacattctttaatattcttttaccaaagatttctctatatgtaaaatttcactccgaaatattagtcttccggcaacaacatcgtttgcacatttcacatttatgtacgaaagtcgttttgtgcattgttgagcaccaccatgacttaaaagtccataacaaactagttgagtaggtactatacgtgtagaatattaactctaaaaccaaaataagaaaccaagcaaatggaaaaggtcactttaagtaagaatcttaaaaagtgaaagaaattgagacaaaacaatagttgtatttgaggaaaaaaaaatcaatagttgtatagagagagtgtagtggtgaaattggtgatgtgtgtcacagctcagcaagtataacgctcgcaataagcaagctgaaccttatcagcaaaatttgcagatccaaatcgagaggcaataataggcaaggagaggtctagtttatagctaacctgaccctctgatggatccagagggtatggatgattcagtatttgaaggacaggtgatgctacagccatctatgacattagagctatatgtgcccaaagagtttcgaacagtaaatcccatcagatcttagtcatggtatcaagactaattcaatgtcctttttcgcaaaatccaataattaatgcaccaatgctcatgatggacctaaatgacctatttaatataattaaaaaaggacctagatgtataaaataaacaagacagaagtaatgttcaaacttaaaagtcaaagtcagactcagatttgtccaagtggtaaaagcgactggatgtgaccggtttggtaaactgttattattgatagggtttatattgatcatcttcaccaaatggcaatatccatgaaaaaaattattctaaaaaataaagaacaataatgcgaatcttgaatatttcataatctagacgtggacttaacagtatgaatattcgattcacaaaaatttgaaaacaaactctcacctttttttgtattatacacaaaaatgtaacaacaatgattttgacgtacctctctgagacattcatcccttcaggaaattttcattgttttcataaaactgttagctcaatcacaaaaactattaccttatggtgcacactgtactacactattcgtgaccaacaaaatgaattaactcaattatattattaaaaatatacatattgtttcgttgtattgggaagctgcacattcaaaagaactatttacaactgttcatggcatacactcagcacttcataactcctctctttagaaaatctagatatcctacgccaagcatttaacccatcttgatctcgttatcaatattgattcatcatatccatttttgtgttattattctttgtgattaaaatatttctttataaattataccttctcctaatctctttagatcaaccaattaattatgaggagttattcaaattaattggaatttgacttctaatacaacttttctatatgagttaaagatttacacatatttagaaattggtacatataccattaaaacttgagtgaaattgtgaatcaaaagccagaatctttctgtaaataaaggagttatacgtcgttctaaacacacgaccttaatatttggaagagactaacaaaagaaaaaggaaaataagtatggaaatagaaagaacagcagattatgataaggtgtggtttacacgtgcgagagtgaccatcatcaagaggcatcgaggcaacagtattgagtctattgactaaattattaaggatgacaaatgtaagagaaggaagaaagaaggtccacggtttatgattgtcgtgttgtatttttatacatgggctttggcccaactaaatcttgggtcattgttatgtattggaatgggtttccaattaaaaaaaaaaatattttgtcccaatatatcgatgtctataagcaaacccaaacatttgcaactacaacttttgaaaattgttaaaaagaagatacatattttcaccaagtgtattcacgttaactaaataatatgcgttcataggattatctagtgtaatttttagaatttggtttatggagaattctttgtcaaccatgttttcaattaatctagtaattacttttcacttggtatgacaattaatatgtgtttatgtactttatactattgcgagccacaaaatttaaaagcaatgccgagtaccgttcaatgattccgttagagcaaaacttgaagttttttatatctttaaagcgtgttcatagaagaaagagagaatagtgaatgcaattcaagttttcatctagaagtcgtataaattaggggtgggcattttactcgtatagtcgtatttatgtgaaacttctgattcggttgcctaccaaatcgtcaacgtgtcaaagtgtacttgatgttaattgaatgcatcttcactcgaaggttaatgttgtgtctgtacattcgctttggacatttttcaaacctagaggtcgtatattttccaggtatagttcccgttgttgccctatcataggattaggcattttaaccaaaccttaatcttgactctatgcattattcgtttggttatgcttttcttcaacccaaatggtttgtttatgtatgctcatttaagtatgaactaattcaataattttattaacttgatccatgatccgtcataagatatatccttcagttcttaattcttagatttgttggccctgcttttctcctaatcaattatttcgttggtcgatttaccacgttgattttattaaaagatatatgatgaagatcaatttagacaatggttagagaagaactaaaagaactgaactggaacaacttgaactaaaaccattagtgccattagtgaataaccattgagataatgtcaagtcacattaatgccattaggcttgtgtataatggcttcaaaatggcccaaatcttccaatatatttctcttatagcacatacagaaccgccggtgtttgcatgtgtcggttcatatgagtcacgttgaagcaaattccatcagagtaggacccattttttactttagtcgacgatagccacaacatggacgttacttcttgtggatcactttttgtatttcatcaatttatacttatcgacctccactttgataatgtcgtgaaacaaaaacacatgtaattttgtttcagtatccgtcgtaactcctaaaaggggaccttttctcaaattctgataagtgattacttggagaaaaacttagaaactaaatccacagcataataatattatatctcactcgcacatacatccatcgtcaaatctaaattagtatataacgatgatagccgaaccaaagagacattaattaatttatgtcgttatggtgtctagttctcaaagatagcaagcacctaaccttaaattaggttggttgttgccttgttggatagagtcatgaggttttgctctttttggaccacaaggaccgtctatagaagatttttcatttaagttgtggagttttgcttcaactgaatataaagggggaaaacattgaatgaaggataagattgtgaaagtcggttgtagactatttaattaatcaacagctaaagctaaatgagcattcaataatgtttgtaaaaatttgaaacgaaagataaagttcccaaaatagtctataatggttgtaaaatttggtatgttgatatgaaaagtgaaaaaaaatgcaaaaaaaagtgatcaatcccccaattttcattaactggagtaaagaattgtattattacaaacaaacataataaaattgacaaatcttgataatccatctctctctcacaccttaaaataaaaaactcataactactactagcgggtggtagttaaaactccacctctgcatcagtaatacattaactactataacttgttttttctttcttaacaaaaactagtttcaagaaagaaaaataaagaggtccaaaaaaagattagacgtcatcaaggccttctgcaaaaccgagccctcgacgcatcactctctcaataaccgagttttttcaagagaccaatataaccacacaaatgagtttactttagataaatggaagagagattaaccaacttgccctttttaacggaactgtccaccggcaaaagtctggccataagaccagccggcaggagcggcgttgaaggagacaactgtgcggccgtcgctggtggtgaccttaaaggaaagtgcttgaccgttgaggtaagagttgctttgccaattttgcccccagttccttgacatagcttgccacactgttcttgaacccttgatcgccgccgagtgaacgtctccggcaccaccgacgtttgtgatcagcacaaggttgaagtatgagtggccgtttatcgtgaatcttattcctcctcttctcctgcaaggaaccctacaaaacaccaaagtatcgaaaagtttatattttggatcttttttcttcaagaactctgttattaaacttagcatatactctgttttaagaaaaaaacagagcatctagagaaatttgatatcctctgttttgaaacagagaagctgaataaaatgttaccttctgtaggaaacagggacgattccagctctgtactgagcaatgcgttgaaaaacaggctgagcaaggtcaaagtgttcaagaggaggattacaccaaccgccattattgttcgctaacgcgttatttggcgggcagaagtttgtagcggttacaacgattgagccaggtaaacaccatttaccatcgttttcacatcttatctcaaagcaagaaccacagctaagtccattgttgaagagagctgtgcttagagccgccgtgctcgtcccgtagccttggctatatagattaccatatccacaagcaccacctacaaagaagtaacattgaagattagtaaatatgataatttgtaaggaatgagttatgtaaataacggtttttacccattgtgccggaagcatcaccaccaccgtaaaaagtggcgtgagcgttgatccaaccgccaccgtagccgctcacagaagaagccatgactcctaccataatcataactaagaacccaagatgacccatgtttacgtcttgtgttaacaacctgcacatgggtgatataaaatcaattacttatagcacaagtaaatatgtactagagaaattaaggagaaacaattgaatgtagatggagaaagtagttacgtacttgggacttggagatcttcgtctttccttcaagagaaagaaagagagatatgtgaaattatgttgttgggttttagagtgggaggtgagtggttgaatttatagaaaactttagttagaggaagttggctttaatttaccgttatgccactgatggtggcaactaacttggacttctttaataaccaagctttattttcttcaaagaaataaggtcaagataaataaaaactttttttttttcaacaaacatttttgttgtttattaaatgaggttataatatatattttggttttagattttcttttttctgaggaacaaaataaattgattggcaagaaaaaaaccgaaaaagcaaagagacaaatgcacatgtgtgctacgaaaccggtgatgcgtcctcacagccctcttgttgcttttcttttttttccaggcgcctacaaaaaaagaagtttaacttattatagtaatgtgttgtgtggggttttattcacaatagtatatttttttcattctcatttgttacagttacaccattagaatagattaacaatttactaaaattgaatatatatatatatatatatatatatatctaaatgagtttcaaagctagaactcgccaactttttaacttaactataaatccactaattaccaacataagtaaaaactaaaaacatatttgaaaaatgtgacttagtcatgaattagagcttgccatgaatatacaaaagaacgacaaaatgttaacccttatgagctataatgaaggtctggatacttttaaatatcaaatgtaacttaataccttaatttaaccattgaatcacttgatttggtacttctacgataaaactaatttacaattttagaactctgaactaggggaaaaaagtaaaaaagaagcaaaaacagtgatagaaaaatcaagctgaaatctaagtgggtcacagtggtctgttttgagatagacgtatcaggaaacctataactctgttccttacctgtgttttcctacctatatcgtgcgtgttatgtaaccagttcctatttaattcaaaaaaaataaatatatcagaaattttcgacgagaagataattgtaactattgaatttaataaggtcaagaacttgcagccgcagaaatctacggccaacctcccgtaatcagagctcaaaaacatgggcccttgctactacttttgtttacataaccttcaattcattttgatggtttaacaaaagcaatgcaaagtcggttacgttacttctcaacattttttcgagtgtcaaacaaaaaaataagaactcaacaaaaatgatagaaaataaagagaatgagacgatgagtacatagatttgccagaggaccacaagtagtcgacaaacaccgtttaggctaacgttttatttatgataaaatagcaaaagaaggaaagtttgatcatttgaattgttcgtaacgcttgtatctagaaatgattagattaacgccaaaaaattattgattatcctcttacattcattacatatataatatatatctgtcgatttatcaagctagtgtcatggggattaaatgataagtaataaaaattgactacacattactaaagcataatatccagcatgcgtgtaaccacaaaagaaattaaaatttaacaatcataggagaaactcgaaatcgcaacgtaaaaaataatatcataggattccttgagtttacaaacgccaaaataaattaatcgggggtttgaaagaagccaaacaaatataatatttttctgctagtcatcaaattggttatttggtatatagtgaaggagtattgaaaattgaaagggatagtttctaacattttttattaagcttgagatcaatagccaaagccaatgcatgcacatgcctgctgttttgtctttttcatcgtttccgctcgtactggtctcctattttaatttcgcttctcttcgttttttgtttgtttgtctgtaattgcacattaatttagattagtaacattttcaaatacttattaaagatccttctaaagaaaacaggtgaaccttaaaagtcttttatttttcttggtaagttcgagaaaaccatggggagcaaagtgccccttccaaaacctctctatgtttgtccatgcgactatccacctgttgatgacaaattctatcaacattgtgtgttatgttcacctccacaggattcatttaattattatctatacgtagatcaggatatgcccatatatataatggagtcgagtaggcatggcacatagttagtatcgacacgcgcgtaagaatgagtttgttcgcatgtataaataacaaatgcgtaattaggtaaatcttgtaattaaatatctgcgacaataaaacattttttttttctttttgttgaaggacaacagcaaaaactttggaggccaaaaactagcctatatcatgtgaatccatcatcggaatgtgcaaatcagacaaccactttcccaatcctcatgcatgcatggagtatgcggaaggggcaaaattggtgaaaaatgaaaagtaactgacagccgaagcatatgcccgtagccgtatttaacgaccgttaactaaatctgccactctgattctgaagctcaactttttatcgtaaagctgttaatctcgaggaagttctctagtgtgatatatctaccgtccgattagattcctggaccattttctgtggatcaaacaaataaattagcgtcaacttacattttttgttttgttaaaggtacattttttgttttttgtttgtttgtttgaaacttacttaatttgtcattttaagaaacaaagattcgtgtggcttggaatcgctttattatcctcggcttcctatgctcactttctgttgctgacgattctctgatgaacaacttgtgttttcttttttcttgtcctttagactttagtattactttttattcttatttaaagattcgagataaacatttttaatttcttcacacacaaagaaaaacatttataatttaaattccattgttagagctaatgagatcgaagttcgatcaaaatccgataagtatatgctagaaccttagagtattgttatgaaagacactgtcgattaattttgagtgtcttaaacctaccattcctaataattatataataatatatgacccttttgatttggtctatatggttgttgttttttgttaaaaggttattgtccatatgttttccattaatacgatcttcagtataaaacattatagtaatttacaaattgaattgacttgtacagaatatataagaaactcattattttaatattttaattatattgtgtattcacataatccgaattttgacaatgcattatacaattgttcaattaaactatccctcatctaagttgagatacttaaacaacgagatcttttccatatatttaaattaaaatataggtcaggtcaataatggatatttgctgaacgaatcgtatgttcgagatggattatgttcgacttagctacagagatagcgtcaagtggactagcacatatatactaaggtttatctatggtggacgttgagaacattttctccttttttctatcttttccccctccttttaactggtggatataagaaacttgtatagacaatattttagttctgttacttaggagaataattatcatcaaatatcatttcaatagttatattttaaatcaaacttttgtgagatcaaactgttttagcactaaaaaaatggtacaatcaaaataataaaatacaacaataataagagatccataaggtcgtacgaaaactaatacttttaatattatatatatatataatatttaaatttaaattaaacatgtaataaataaaaatactataaataaatcgaataaattatgaaaactacttttgtttttcttttaaaagaaaatagcataactttaaaaattattccaaaacaccaaattctgatttgaaaagttttgtaaaatcgcatgaagacttcctaaatttttcaaaactctttattaaaaaaatgtttaagagtatttatggattttagaagccaacatgtgtttttttttctgtaaaatgttaaagaagttgtgtaatccaattgtgtggcgattttttttaataattatacttttatttctgacaaaaaaaatagtttttaaaacaataaatttataaataaggcaaaacgcattaagtgtctactgtgtcttaattagttacgtggttaaatggattcgagacattccaacgacgcctccattgctttttgtcggcactttaaaaagtttctactgtcatatactatgactataatttttttttcgtgttttcgttacttaacatgcattagtaatcctccaatctccatgcattactatctcttctggcatattcatctgaattttttaagaaaaagatattataggttttactttgttgacaattttattccaatcattatcatgtgcccgttaaatttgttatgatatgaaacggttataaacgtatgaactcaagggaatagtatatctatatattgttaacttaatatgacggatttaaaaaaaaaaaaaacttaatataacggttgcataaactaatgcctctatgggtgttcataactgagacacaaaatgcaagtaagtctatgcagtggctaaccctaatgttgtaaaaagccaactagaagtctagaacgctaaacccacatcagctgatgatgctaattcaagtatgaagagaattactagactctactaaaagcttaactaaagatcactaataggcctaaactaatgttactaatcacctcagaagtcagaatcacttcagaggttgatagactaccaaacggagtaaaccaaatggaagtgtcctaatggtaaaagacgtggaggcggcataacgtcaattcgaactctttacttttgtttgccactcaaattaggtattagaatttgttaatgaaatagctactccacaatctacattcgttcaggaggttagtcgagtttcggccggaatactcctttaaaaaacaccaaagagagagttataaaccataaagtccatatgaacaacaaataagtattttgcaaggaccaaaaatatacactttctgaaacttttcaacttttcaaaatcaaacaaattatctcgtccttctattttcttcatatgttcgatcttatgacaaaggacatataatgagattcttaatttcttaacatataagtatataactatcgattaagcgatcaaaatcgagataaccaatactcttaattgatgggatgggataaccaacccaaattaaaagtaataaagggggtattgagtgctaaattatgtgggctcagatttaggattaatttcatgcaatagaaattctaactcatcatgtaacggcacttctataaaattttggttcttttttttttttttgggcaaacatatgactttcattagattaaagagtcacagcaacctctaatacaagagaagaaaatacatccataacaaaggaaatgcaaagaaaaaaggcaacaattgccaaaaaggttaccaaaaaatggttaaacgaatgatagataagatacaaatcaaagaaagagcacataagagatcgacatacaagtacaagcttcactacttcttgcttgatcgcattcatagtaaccccaaaggttacaaactctaccacaaaggcaaaggggactataagccgggaagtaaaaccttgcaataccgacaagtcttgatcatccataccactcactagaaggaattttgggaaaataaactgttcaaagaagcaaaacaagcatttaagaatgttttcttgagggccaaaccgtatgctacaaaggcataaacggagcatcttcgtcgaagcgatggcatctttgtcacgaggtgtctttgtagatcttggaagcaccgatccttttggctaaagatataaccgtcaagcaggagaataaaattttggttcttattgacgtatgtattaatgtataacagtataagattatttattttcataacgtgggtgacgtagtgataataaatcactagatatgaaaggattcccaataagtgtcaaactcaaaagtccacatcacgtgctgaaatcatattcacataatttggttacggctcttatttttgtcatggctctttattgctaaattgagttagttaaaccaatttctctaattgaattactaatttgtctcttccaaagatagagtgacatgttctcatgtcttctccacatatataagaaaaaaaaattagaccagctttcacatgttctctttgacaaactaacattctattaaaccaacatcacccgattaccttttttctttaaaataggaaatttggatcgtccccatgaccaattagccacattaccttactacttttagttgaaattgtagccctgaaagatgtttttaatcaataagtttatacatatatgtagttaataccaattttttttttggtatgggctacaaataccaaatatgtttgtcgctaaacaaattagatagcgatcaaaaatatacatggtttgtatatcatcttttaaagaattatttttctcgaaaacttaaatgtatatcgacaatgaaaatagcttatcatctaaaattccttaatagccagacaagattaacatatcagtcctcatctctccttttggaaaacaaccttcatcgtcgtgccatttattgtaaattgatagttgttgtttccttatcttttcctataattttctagtgaaatgaaaattcattgggatgaatatgatgttataatattattcatttcttatctagatttatttcttgtatagaaaagaaacatctatattttgtaattcagttttatttataaatatctaagttacaaatggtgggaatattatttaattgtttacatccaaaattacatcataacatagttgcctgttgtcactgatgatttggttgaataaaaagacatgtttcggtctcttttctaacatattcaaagagtcatagctaatagctagttggcactatcattcattagacgtagctataaacacagatttaattaagaattatggctatctttgattcgggaccagttttgtaagaaacatatgaataacagtatagcattgacagttttgggtagctaaaccaattctcaactaacaaagctttaatacaaagtttttttttaaagaaagacattgaaatctcataagtttggaggttgaaaaaacttattgtaaagaaaaagtgagccttttttagattttaaattctgactttaatttggattttgaaagaaattaaacttgaggttttcaataaatcaatcataacttagtgttatatgcgcttttggttttggtcaatcttatgaattacctaagttaaaccacattagtacggtcgtgccgtctcaagtctacaatcaaatcaatttgtaccgagtagataattattcatttaactacttagccacaattggattgccaaaacaattacaatttacttttgagtcttgaaattggtgtttcatagtcttaacaaacctagattttatctttttctgctatctccgtaaaacatgatgtgcggcgaaggtaagtttttattccgacattgtgttttttctccttaactagtagttttacagaattggtaaattagcagaaattcaataaaaattgaatttctgctaatttaccaattttataattaagtggattaataattcagtagttacttataaattataagttataattaagtgggcttaataagatatcttgattacccaatcttttccggacaaagattttctcatttagttcaccactaagaaacagacacgtgttatatttgaacttcactattggcaaagtcatccaaacaaaatctgtggcccgttgcatttcacttcaatcagagcagagcaacttgctttcagatttttttcgagccatggaagctactgctgtaaatccctccattgtcactgcctcgagaacagttcaaccttacaggcgattatcaactctctcacttcgattccctacataccggaacaaacgtgtttctcctttcacgctcacaatcacaagatgttccaccacaaaaagtagagaagcaggtcaagattcatcgatctctttgaagagagggctagtttttgatcttggcgtctctaaagattcgtggcacagtgaggagattggctctccggttgtgaagagatttctaagcgataacgaagagagatggtacatgtggtaccatggaagctcaaagcagaaccctgtttctgattctatcggattagcggtttccaacaatgggattcattgggaaagaggaaatggtaaagttgagtcaagcgaagatgtgggtttggttatgagctgtggtgaagactggtggggatttgatactgcaagtgttagacccggtgaggttgtgataatgtcgagttctaaagtcagagctaatagctctgtttactggatgtattacactggctacactaaggagactgttgagtttcaatcccaagattttacgtccgtgttgggaaatccggaaaggtttcacctttgtgatgagaatgcggagaaatctagggtttattataggtcacttccagggttagctattagtcaagatggtaggcattgggctagaattgaaggtgagcatcatagtggggcattgtttgatgttgggtctgaaaaagattgggactttctctatattgcatctccacatgtagttttccatggagatggcgatttacggatgtattaccattcattcgatgagaaaaccggtgaattctgcattgggatggcgaggtctagagatgggatcaagtggttaaaattgggaaagatcttaggaggaagaaaatccgaaaaggatggattaggtttcttcgatgagcttggaggaagatatccttgtgtgacaaggaacaagagagatgagagttatgtgatggcttatgaaggtgtagatagaaccgggaagacgagcataggcttcgcggtttcgaaagacgggattaaagattggaaacgagtgcaagacgaggaagcggtgatcgcggttggtgaaggcggtgcgtgggataacgaaggagttgggtgtccatatttgattgagatggatggagattctgatcatcaatggagattgtattatagaggtgttggtaatggtggaagaacaggtataggcttggctgtttctcaaggcaatgtgatcactagttttacaaaacaaacagggattcacttgtgaaagacacttttgcttggttaatgatacacatttatgttaagcggttaaaaaacagctcatatggctaactaaattacaattagtaaattgttataagtttaatagaatggactaattaatcagctaaagtaatgtcaaattctgaatttttgctgattatttatgtagttcatgaccgttacatcatgtggggacaaaaccatagtgtaaaaaaaaggcaaatccgaccgttacaaaactctaccatttaagtaacaattcacaaatttcgtaaatcaaagccaaaatccaaaactttttttactaattgatctcaaagaaatagcaatgagaggagagcaattcgagctagaggaagatagagacgggccactggagctgttgcagagcttgagatctaaagcaacggagcttcttcttcgagaagaatgggaagaatctataaaagtttacacggagttcatcgatctctctcggaggcaagtctcaagtactggtggatccgacccggatccggattcgattgctaagctccggaaatctctctgtttggctctatgtaatcgagctgaggcaagagctaggctacgagattttttggaagcaatgagggattgtgatcaagcacttgaaatcgagaagactcatttcaagactcttctttgtaaaggtaaagttttgcttggattgagcaaatactctttggctttggaatgttttaaaacggctttgctcgatccacaagcgagtgataacttggagactgttactgtgtatatagagaaatgtaagaagcttgagtttcaggcaaagactggagcttttgatttgtctgattggatcttaagtgagtttcgtgggaaatgtcctgagcttgctgagtttattgggtcgattgagattaagaaatctgagcttagtgggcgtggattgtttgctacgaagaacattgttgctggtactttggttttagttacaaaggcggttgcgattgagagagggatcttaggaaatggagagtgtggggaaaaagcgcagttgatcatgtggaagaacttcgttgaagaggttactgaatccgtgagaaaatgcggtaggactcgtcgagttgtctccgctttgtccactggacaaggtgaagatagtctggagattcctgagatagctctgtttagacctgatgaagcatttgaaacttgtggtgactggaaacagagtttggatacagagaagttgttgagtatcttggatgtgaattctctggtggaagatgcggtttcaggtaaagttatggggaagaacaaagagtattacggtgtagggctatggactttagcttcattcatcaaccactcgtgtatccctaacgcaagacgtcttcacgttggagactacgtgattgttcatgcctcgagagatatcaaaacaggggaagagattagctttgcttactttgatgtgctttctccattggaaaaacggaaagagatggctgagtcatgggggttttgttgcggatgcagtagatgcaagtttgagagtgtcttgtatgctaccaaccaggaggttagagagtttgaaatgggtttagagagaggcgtagatgcagggaacgcggtttatatggtggaggaagggatgaagagatggaaggtaaaagggaaagataaagggttgctgagagcatcttattggggagtttatgatgagatttataactcagagagacttatgaaaaggtggggaaggaagataccaacaatggaagttgtggtggatagtgtctctgatgttgttggaagtgatgagagattgatgaagatggctgtggaagggatgatgaagaagcatggaggtttcagtaacattgtggagatggagaaaatcatgaagctagggaagggggtttatggcaaagtggtatcgaaaaagaaggcaatgaagactcttcttggcatagagtaacaagttacaaatgttgaaactaattgcttgtaggatcaatagagagagtaaccattttggttttctgtaattccttgcctcatggaaggaaacatccaatgatattattacaaagacattcaaatggaaataacacttgttttgttgcaaaacatttgtagtcaaagaatgtcatatatgaaaaaagccagttctacaaagaaattggatgagtagtgtgcataaaaagaaaacgatgattttgagtaatttattcgtcgatccaattatcctgattagcacttcctccggttctgtcttgcagcaacacatctttctcatttttcaactggttaactagcctgcggacgctaggagtctggaagcgatccttagcggatgtcttcgattgagttattaaccctttcttggcactaggatacggtttaggaggtggatccttatcttgcattaccgcaagctcctttaagcgtttgtatgctttcttcatttcctttctctctgaaagatattccatctgaaaaatcatcaaaacacaaactcagcaagttcgaagaataacatctcccatgttcaaagaaacggcatcaacagcagcggtactacgattcatatctattcaagtatcgtagctaatcatagactgtgaaaagaaaatacgtacattagctacagacatggcgtcaccctcactgatgccatgctccttcaattcaagtacccggcaaccatacacacgtgcttgatctggaataaatgctgatatcctaggtaattgaagatgatgcaatgagagggagatagatacagaatgaaaaatggtgaaactctcccattgaatcagaatttaagagtgacacgtgcttatagtaatgggttcaagacaaaattgtttgaaattaaacttctttctatagtgatgcatatcagaataagctttatgaagaactaactcataacataatcatcaaactatctttgatacaaatgcagagatataaaaagttgagaattttacttggcagggtcatcaattttggttccaggatgcttattagcgaatttacgaacgtaaggatcctcagggagaacaatcttctggatttttccattggagcgaggaaacacaggaggtggtgatctgccattaaaaccaaatcacagaacactcatttcaacaaaaccctcaaaatcctaattcacagatgccaaaatctcaactttttgtgcgattagaattcaattgcatccgaattagaaacccattaacggatgattcaataaggaagtatcaaattgatcaatcgagccaaatcatttggagaaatagaaatgggagaagagagggttacgcttccatggctttaagccaaacaggctctcgtgtagctaagccaccaacaagcctcctggttttggaaagtaaatcacctttcatccacgacattgttgctgagcttcttcacttttcttcttcgcttgatctgttattgttttaccagagacgacgaagacacaagggtttcagaaatggctcgatttgataaaacctcatggttcatgaattaaaccgggtacatcacactctaaattacggtctaaaatcggttaacagagcaattgtatggttcgtatgtcaaaacgcagccgtttcgtaaatacatttgccttgataaattttcacctcttttgggtttcttctactagtcttcacttccgtcagctatagctttggagaaactgcatcaatggcgttgagattgacatcgctaaaacgcgccgcggttgagtcctgtcgcattttggaaacccgaagcttaagtcatgtcgctgcgatgccttcccccttgaacggagcttttgatcgcccgatttctatgccgccgctggttttacctgagttcgatcagaatcaaccgggtttgatcgaagaaaagagcttcgggttcgggcttcctagttttgcttttaatggatccatggagctaatggctgtgcctaagaagaaggtcaaagaactctcagtcccttaattagttttctcctttcgttttccacttctgaaatgataaaatttcttagggttttgatttattgtggtatctagggttagcttttttgacggagtcagggtttatctagggttttaggaaggtgcactataggacttattagttgattatgcaattgagatactaagtgctagattgcttcttctatagaatctatctaagaaatgttgtctctttgtgtgtttttgagtgtccattgtttttccatttgcttgtgtatctttgggtttaagttgatttggttccttacttcctttaggttcacatgtgaatgaaaatgtgtaatttttaatggctccttggagaatgatagtgttaattgaagctgttcttgatgaaacatgcagatttctaaacacaagagagggataagaaatggtccaaaggctcttaagcctgttcctgtgatcatccgttgcaggtaagagattagcttctcttctttttctttttttttttgtccgcagattagcttctcttcttgttttatctgtttgatgcttcttaatatatccattaggttgagtttggtatgggtgtttagttttgaggctgtgatagaaaaattctgttaggtttatctaggttgttgttgctgcagcaacagctgaagaataaatgcatatgctttgtgattcattgtctctcctaactatcacttggtataaactgcacttgagtaactagaactgtgtatcgttaacatgtttgacgaaagacctacttgtgtgcaacatggtacaaaatatgagtctagttgttcggttttggtatatgtttgatttaaaacttcttttgttttcatgatctcattgtgagggcacttgtatcagaattttatatatgccgccagtttaagtgcacactcttttgtgtttccaggagttgcgggcgagtcaagctgccacatttcttctgttgcagcggtgagcggctaaaccctactgagtaaggcaattcgaacaactggtcatggtttccaatatgattactccttgttggatatcaagaggataaaatcttggctttcttagtagtacactagaatgataaaagacttagttgatgctgttttggcaaattattgtatgctgcaagatcaatattctcatgcttctcttgacaaattatgttattgtcattgcttgttgcaaagtgtaggattatctcattcacttttatttgtgctcttagatttggattcaacagctaaatatattcgaaatggataaatatattcacgtgaaaccatctatacaagcttttgaagctctcgtcatgtacgctcgctgtctcaataacctcttagtttactcgagtgtcatttcaagggtaatttttggtttatcatagtcaaagtagctcgtgtttggtagttttatggactaattttggtttgagatctgatttgggcacattgtgatagcgagcacaatgataaccctaggtaagatagttatatccgaagcctcattgtgctcatttccttctctttaatgattacaaacagagacaagcaagttctaaacaaaattgaaaccccactctttggagaaaccttgattagatctaatctaagagttaactatctcgatcttcctcctcgttgtagttgaatggtaacggaactgatttgaatgctctgaactttcccacattgttcaagtgttcattctccaacctgtgttcgcaagtcgtcaaaggaagaacccttgagtaaaaaatggtttaaagagaatttagtgatcgtgtcgtggtcaaaaatttacctgaagaaattccagataccacgacgtatgatctcaagagcagcaagaagagcaatcatcgtttctcgatgtaagaacgataaattgaaatcaagcacagtctgcaaccacgccatcctcaacacaatgtttaagacctacaaagaagaagaggcagaaacaaaacttataaggaaaccatcaatcaggaattgtactgttcttttgattttcatagttctcacgattgcaacgtagtagacggctttgtgaggaacaagaagcttctctctcaacaaatgtttagatggtctgtgaagtaatccccaatcaaaaacaatgtcccaatatgtgccgtaaaaagttgccaatgccgagaaaacccaggcagagattttccagatgtttcctctgttaaagctgtaagctgttctcaagcaaacagccacaacggttaataaatacttgagagcattgtagccttgacttgaatcattctcttcgatcaatcttcgaacacactgaagaaaacgtgaccagtaaggtatcacagcaacgatgaagtagaatgtactgtatacatcgcttgatctgcaagtattttgcctgtgcttgaagtctccccaaccatagtaacatatgtaaaactccaaactccttagtgcttgaacctaaaaaaaagaaagttgattaatgagttgaaacattttgaaaacatataaatgggagttagaagaatgttatgagaacacacaaacctgacttgttaattggtctgccaagaaaaaatctggaagattaacctgcaaattcagagtaaaaattaagattttttatcgatgttttaccccgcgtaaaaaaaaggatttgcatgagtatattaccttgtagagtggcgcagcaatgcagcggaagacaaccatgaggaagaagacgcggcttgaccgataaaagatgttgaaaggacagaacaaaatagctaccactagctgcaaaacatagtacaaacgaaatgtgttactacattagtaacaaaatgtacttaagattctcgtggttattatgatgaacaacttacagccaaaataaacatgggaagaagttcagtcatggttttgtagtcattagtgttaggatccatctccatgtcaaggtttattagaacagcgcagagagcaagcgtgccgagaccaaagcttagaagcagaacatgtctataaccaagctctgttccttctttaaaaccgaatataaacggataattcactcgatatcgcttccaaaagtatatgtttgaagcatacatgatcatatgcagaaccacaaatgcaaataaactgaaattatggtacaaaaaaacatttcttgtcagcaagaaaaaaatgttatcaattagagagttaaactatatatatatgttttggttttgaacctgtaaagagggaacattgtctccatgtagactttatgtccaactgcgcccattatattacgagcatggataaacatgactagagctaccactagagagactgtgcaaccgacgaaaaagcctgacaaagataagaactaatttgaggaattctgtttaattagtcatgaactaatgtaaataaaccggtttcgatttgagaaatttttttagttaccagtggaaaacgttattcgatgtttttctttctttacttttggtcttaagagattcattcctttgcttcgattcaaaccggcgaaatgttcaacgaaggttgactcaactctcaacataagcttgttgatctattaaaatgtaactgagctcaggtttttttttttagttttattgaaagaaaagaataaggtttgtgtaaagataattgtagtaacctcatcagagctagtgaggtaggacttatcaaccatctccatgtatggttttgctgcacttcttgaagcaatctgatcatagaaaatattcagcaaaaacatattattaagtctaaagaaaataatattgtatatatctgattaaatcaagagttaccttatcatactttttcatgatcttggaaatagccaaagtgttcaagaagctgaataaatcaagaacaaagcatggatttaatcaaacaatcttttttttttttaactttttcatatattcttaagaagcaacattacctgtaattcttgagatgtcgaagcttgcgataaaactcgatgaagacattcttaagccgttcttctattttcttgagattctctctagtgaatttgagctcttcttggttagagagcttgaggacgtttttaattgtggagagaggagtttcctgagttttgtttaatctgatacgttcaagaacacttaacacttgtggtacactctctttcgttgaatctccaccgttggatccatttccctctactctgattcccatctcctcagctaatgtattcccttcaaaaataaacacaaaagattttaaactttgtgtcatttcagctaaacttagtaacaaaaaatatctgacaacttactctggtcattagaatctaaggcattcatatccactgaaactgtttcagagcagctccacgaagaagaaggtcgctcaactttgattctgaaagcaatgagagcatccatttgtttgttcaaaaccactgcctccttcaccatttcctccactttagaccggtaaaaatggttaactttatcgaattcaagatctagggttttaaagaacgcaagctctgactctctccccgcctctgcaacttccaagatggttgtctcgtatctctcaaacccatcatccccagtagttgcgtgcaccagaatgtcctgaatttctggttcccgagtcgaggcggtgcggctataccgctttgtcaggccgctgaagttgcggctaccagatagcttgcgtttcaagatacctggtctctctgatcttttccgtgaagtttggatttcttgaagaatagatttgagaccagcataatccatgtaagcttgttgccattctggaatcatctgcctaacaaaatctttcccaaacttcatatttggtttctctggacttctttgtaaaactcaagaatccagatctaatgaaaagcctcttttagttgagatcaatctctgtctctcccagcctcagtgaaaagttggctgcagagtaaagaacagattttgagcaaattacgaagaagacaaaaagaaaagctattagaggaagaaataaactagaaagcgtgtaagaggaacaaagggtggggttataagaatttgccaaccatgcaaaaactcggagtttattcaacaagtcccttatattcatatatatatatatatatgtatatagactatagagagagggatattgagtcacatgaagatttgcaagtggatataatttcacgtgagaaaaatcaaaagagttgaaatacaattgaaaaagatgtttgttgtggtgggctcttgggtggacagattgacgactaaaataaaataattgcataacaattcacatgtacaaaaagtctttcctctaaattaaaatcataaaggggtcaaagtggttgtggtaaaaacaaacatcaaaataatataaacaaatacaacagaaagaaaacaggtggacgatacactttttgcgtggaatgatgcacttccacactgttctagtgagcaacacacggttcacagtgaccgatacattgttttacggtggatgttactgttgatggaagaagaaaagaatttagaggaaaaaaacagagggtgagagacgtagaattaaaaaacaaagggagagcaattaagttttagtatggcggcttagagaaaattacgttttgagaaaagtttctgataccttgttgaatgatgagaactgagaagcacaatatttggttcccttctccgtgtattcaattatctacagtaaagagtacaatgaatcaattaacatgattacataatatgtgatattcctaaaataagatgagagtaatatgagtttcctaatttatcagttacattgttaaacaatgtacacggtgaacgatacacttactatttgcagtggatgatccattattacggtggttaacttaaatacaatttttaccgtccatcgtcatgttcacagtatccattattcgcagtagtcaatataatatttagtggagatgattagcaatcctctttagtctatacattgcttaccgtttaccttatgtcgtcataaacagtaaaccatgtagtatagttctcaatggaacattatgtagtaaaaaactttctaaatacgccaaaattacccaaattgcaaattacaaaataaaaaattactcttgaaatttcctatgttaacattcatcaatctttgagtgacaaaaaaaaaaaaaaaaaaacatttatcaatttttaactcaaaattgatattactataagtggattaactcatagccttctttattttaaaataaaaaaaaaaaaagaaaaaactcatatagagtcttttttaattatttgttatacaataactttaattgtaggatcttaagatcagcaaacatactctatttgactcaatgtgaaatccaaacgctagaaaagaaaaagagtccaggtacatgatgtgtcggtgttgatatatatttggatctaacaactttaagactagctacagttttcttttttctttgataaagttttaataagactagcgacagttcttaacttcttatgttttttctttctcattttttcttcccgtccagttcatatgtttatcgtatcacataacgaagtttatatcagcttaatatgcatggattaattttattctttaggtaaaaagttatacaatgtagaagtgtatcctctgaagaaattaatcaatatgtcaatatcaacatttagtttaaatgaatttggtaactagctactctatttatttcgatattttatatttggtaaaggcatgcatcatataaagatgttcttatttattcaaaaagataagtgattaaagtcatcataatcatattctattaattattgaattagttaaattctaacaaaaaaaacgtggaaagtgataaagggtgaaattaggacgcgtttcattaacccactttatcctttttctttttgaccaacagtgcatattatttgagtatcaatgtatcataccagataaaattttaagagcatacatgtactttagacacacagtttcctaattttcattctgaaaacaattcgtcaaaaaagcaactaattatatagctttcactcacacttttcactagccatgtttttttccggtttaaattttgattttcaattcaattcaatttttgttttctttactaaaatagcaacttatagccaaattcttaatatttcaaattacatatagtttttggttttctcacacaaattaagaaaattattaaaaactttgtcttatctttcattaatatattttataaaaagttcattggccgaaaacagtaaatagtaaccgaaacttttacctaacatctacattgaaaatttaaagaaactattaatataaaacagaatttaagtcctagaacgacaactaaattgaaacggatggagtatgatgtaaggtagttcttattcgttataggaggtttccatgggctttacttggtcactttggtaattaagttattgtcttaggatcttcatgagctaagaaattcttgtagttgcagtatatgctcgttagattcgtacttaagctaatgttttcttctatctcagttttgggttttagtactgagttgtaattgtatttttgtttgcttctcttttttcgggatattgtcggcttagtatccgaagattttcaatcagttcagcttttgaaacgctttatgagaaatttcgtaataaaaaaagttagacgaaagtgaaaaaacatgtaataactaaagattttcatgttaacgagtaaattctggtagctagtgtcgtgagcattgagcaatgacatcgggaccaaaatacacaacaatatttgatgtattcagcatgtgcttattaaatctgcatcatatacttattatagtcaccattcaatttttgttcaatttgttatgcatcgcttattactttgtactaataacatttattatgtttgtctggtcgattcgctacaactttttcatagcatacgagtatacgaccaactaaaaaataattactaccaataataataatttggctggagaagaaaacactatttagtttatagtttttattggattcaaacaagtaaataagttcactttaaaatacaatacaaatttagtttagcattacctgtttataattgttatagtaccattttactaattaattttaattatatgtttctttttcttaaaacatttttaatccatcacttgaaacggagttgagatgtcggctcccactgtatttgatagcaacctgattttattcgccacactagttaggttatgtttataaattggtattaattggagtttgttgcaacaccactatctaaattattactaaaaatcttgaaaatacaaatccaatagttttattcatttttagaaagtattgttaaaaaggttatttcagtaggtcttcctaagctatgagagattccataattgtcgttgaaagcggaaagttcgaagatttggctaaaagaattaactgatttgaattccctttgaataatccaaagatgtatatatacatctaaattacttacagctagagaacggcatctgagactacgatatttgttgatcttaatctttgactctccattttttttttttttgattgatgggtttgcgtagcaaggtggctgacttctccacgtacgcgtcaattttttttccgatattgcttgacaaaccgaagcttcttaatttgtaagcatgcatcttttacgctagttacggtacatagttaaaaaagttgtagattgttttaattggtaagtgatatattgcgtttataactaaatttgcctcatgttgatgacaaaagaagatggtgatctgtatgtatttgcgtttttttggctgcatgcatgcctgcatgtttatacgtttaaaaaaaatgtttatacgttttaaaatgaatttaaaagtagatatatctaaacatataagagacgatgttagcactttaaatttaaacgacggagagtgactaaattatgatctccatttaatgaaattatgcatctagacccaaaactgttttgttaacagaaaaaaagaatgttataatctggttattcttattattttcatactatgtcaaaaaaaaattggaataagaatatcttctgactaatactcaggataattgctgagaatgccctttgcaaactactcttttccaattctaccatttttctatttgccatttttatttctaccctctttaattttttattgaccattttacccctatttagaaattgttttaggttaacaaaatgaaatattaatatttttcgcctaaaatattccaaaataaaattcccgccaaaattttcccgccaaaattttttgaaaaaacgattcctgccaaaacttttttcaaaaatatttttcccgtaaaattttttttttttggcgggaaatagatttacaaatgattttaaaagagttttaaaagattttaaagcgattttaaaaaagttttaaaatatttacaagggattttaaagggattttaaagggattttaaaagatttacaagagattttaaaagggttttaaaatatttacaagtgattttaaaagggttttaatacatttacaaaggattttaaagggctttaaaaaatttataaaggtttttaaaagatttttaaagggtttaaaagcgttttaaaatatttacaagggattttaaaagggttttaaagatttacaagaaattttaaaagagttttaaaagatgtacaaggatttttaaaagatttttaaagaatttacaagaaaatcctttaaaaactcttgtaaattttattaaaaccttttaaaatctcttgtaaatcttgtaaaacacttttaaaatcccttgtaaatattataaaactcatttaaaatcccttgtaaatcttttaaaacacttttaaaccctttaaaaatcattaaaaaacctttataaatctttgaaagccctttaaaatcccttgtaaatatttttaaacccttttaaaatcacttgtaaatcttttaaaatacttttaaaatcctttgtaaatctgtgtcccgccaaaaaaaatttacaaggatttttaaaagcatttcttttgctgagaaaaaatttgtcacgaacttttttttggtaggaaaaattttggcgccaaaaatttagcgggaaaatttcagtttccaattacatattcctattagatgagggtaatttggtcattctgttcaatggaaggggtatttttaaaaatagaaaacacaaaaagatattaatacgaaagggtagtaaaaaaatgtagttttgcaaatttccattataaaccattcatatttgcgtttaccttttgccattaaaccaatagtttaaagaactgcaattttgtttacgttttctacgaccatgtgattttcaaatttgtagaaaacaagttttccgttaatcaaaaaaaggattaaatggttgctttgacaacttctttttcgggttggaaaaccgtagttgacaaaaaaaaggacaagacgtttacttttaaaagccatcataagtaattagttacgtaatatagaatttgtagtccaaatagacaacccaatggctcctattttgtgttaccatgattatgcgaccaggatagtataataatagatatttttttgacaacaatataattatacttactagaatttacaaaacataaacaaaaaacacgtttgtctctgaaacacgccttgccactttcctaagggttatgctggagatattgaagttactataaaatcatatgacgtattgataaagttatggttttagagagaaatataacgtataagttgttggtggccaacgagtataaacaaaatatgttgcgatttttaacaaaaacttgccaatattggatattaatacgtttgactctagaatgaaagatgatatatgtgaaaataggattgacaacaggataaagaaagagaagacgtacgtacgattttaaggatttttagtcctagaaaatcctatcaaacatattttttctgatttgtgttttcaaactgttttagtgtataccatcttacgtaccatataaatgttctattttagagaagacaatattttcataaaacaagaatgcgtgttaacctcaactcattcaaacggtatgagcctaaagtcatggcacgaattcagtaacatgaaacttgtacaaattgaacaatcatccgtcctactcaattttctctttgttttatacaatccaattcacacttttttttttctcttttcctttttaattcattttttcgtcttatatattagagaaattgtaataaatgacgacttgaaggtagagaaaaagctactccaccttcaattgtaactagccgggcggtctggtgtccgagtcaattggtcagacgacgactacacaatgacaacaccaacatataaccttttatgcataggatcattcatgtttttactatgtttcagcattggctttggtcgcaaaaacctacaagacaagctcggtgacactctatttgcctccaaacctgttgaagcaaccgagcttagagccgctttggtttctaacaccgaagctagagacatttcaggtagtattggtttgggagaggttggaagtcaagagatgcatcatatttacatagaaacaggtgaagattcaagtcttgtaaataaacaagacaatataaactctatgcctaggaaggttataaggggtaccgtttccatctcattctcatttcctatcatcagaattaaggttcctattccgaagccaaatattacggtggctgaaagaaaccaactcaatgaagaagagattaaaggcattgtcataactccaacgaagactaatgagtttggtctttcccttggaaatgacggtgcagagctcggatacaactaccaataaccaaccacaagaaccacatattgaaggccttgccactttcctaagggttgtgctggagatactgaagttactataaaagcatatgacgtattgataaagttatggttttaaagagaaataagttgctggtggccaacgagtataacaaaatatgttgcgattttaacaaaaacttgctaatacgtttgactctagaatgaaaaatgatgtatgtgaaacatttttttacatttatttgctatgcgctgtaagtatctatgatttttaataaaaataaccatatatatacttttcttaaacctgagtttaggagatgagaaagaaagatggaaacccgtacaactaaacatatttctatcttagcattctcttctcaatattggcaatgatgaccttgagagtgattcttttgtttctgtttgtagccttgagaaagttgttaaagttattgaagcacaaggccgcaagatctatgtttcaccactactagcatttttcacaagctcccaattattgaataagttcaaactcgataccttgaactggagatgttttgaaaacatattcaagcacctgatcattgtattcttcaaaagatgcaattgtgtatggattttgagaaaaaagtatagtatggatttatgaagaaattaggacaagacattctaatatatatagcttccaacatctttgtgaagttgagtatgagatcgctatttatttaaatttaaacgacggagagtgacaaaatcaatattatgcttattagaatttacaagaatattaaacctataatatgtatagatatcctttacaaaaataatgtgcattattgtgctagaaaatcctatcaaacaaatttatatttgagttttcaaactgtctagtgtataccaccatcttaccataatagttttctattttagagaagacgcttttcccataaaaacacgaatgcgtttaaatctcaactcattcaaacggtatgagcctaaattcatgacatgaattcagtaaaatgaaactagaaaattgaataatcatccgtccttcttattttctctttgtagcatcaaagtcacaccttttttttcctctcttctatttttgaactcattgctttcttcttatatattagagaaattgtagataactgccaattttaaggtggagaaaatgacaataccaacatataaccttttatgcataggatcattcattttcttactatgtttcagcattacctttggtcgcaaaaacctactagacaagcccggtggcactctatatgcctccaaacctgttgaagccgccgagcttagagccactttggttactaataccaaagctagagacatttcaagtaatattggtttgggagaggttggaagtcaagagatgcatcacacttacataggaacaggtgaagattcaagtcttggaaataaacaagacaatataaactctgtgcctaggaaggttataagaggtatcgtttccatctcattcgcatttcctatcatcaagattcaggttcctattccgaagccaaatattacggtggctgccataaaccaactcgatgaagaagagatgattaaaggcattgtcataactccaacaaagactaatgagttgtgtatttcccttggaaattacgatgtagagctctcatacagctaaaaacaatttcaagagccgtatgtcgcaggcccattgccagttttctaagggttattctggagatggaagttagtataaaacatatgacgaattgataaagttgatggaagtacttttttttttttggacaaagtacttgatggaagtacttaagttatggttcaagagacaaataagtagttggtgaccaacgagtataaacaaaatatgtagccatctttaacaatgacaaaaggatatatgtgaaccattttgtaatatctatttactatgctataaaaacctatgatatatagtaaaagaaattcatataacttataaccctgaatttaggagatgagaaagaaagattgaaaatggaacaactaaacatatttctatcttaacattctcttctcattggcaatgaggatgaccttgagagtgagtctgttgtttctgtctgtagcctcgagaaagtcgttgaagatattgaagcacaaggccgcaagatcggtgtttcaacactactagaatttccacaagctccgcgaataagctgaagctcaagctcgttatcttgaactggagaggtttcggaaacatcaagcacctggtcattgtattcatcaacagatgcaattgtgcttgtttctgttcgaatagttgaatcatctccatataaaccatgtcttcttttccgtcttgttgcttttccccaaccattaattgtctctcttaccctttgaggtaacaatgctgccttgtagtttgttcccatctgtaattaacattatcttagcttgttttatgagttataagaactattgtaattaagcagaagctccaaaagtttttttttcctgaaaatgttacctgagtgacaagtgcatagagtggcagtgtgctgtagctacataaaaattgtccagaaaacctacaaaacataagaaattaataaaccgtccaaacgatataaatacacaatagtctcatgacttaaacgagaaaacttgattaccctagaataagtcgcaagtagacaagtaaatggttccttaggaagcaagaattgtatccaaattgccactgaagaaacaagaatagattatgccaatatatgaacatatctttaaagcgtaagagtatactatatgtatttcttatcttgcatatatggcaaaaagatgatagaaagacaaaaacttacccaaaaccagaagaaagaagccagttcaaaagcattctgtaggacacagaaagcacatatatatgttattacaaaataagaaattcctttgtgactgatagagttttcaaagaattatacagacctgaaactgaatgaagtggataagggataagagtaattccggtttcttgaaccaaaaaagttcatcgcgaggtctcagctttataccagaagcatattctgttatactagcgttctccaatgctaaagttgcgatgacatgttgcaactttgcaccaaccaaaagaacaagctgttcaaaagaaagggatgcaaaccaaagtggaaatttgttatgatataagactcactttctaaggaaaaacaaaaacatagaaacatgaagtggaaaaatagttcttacagtgattggaatgatcgctagccagaaataaagatttgatcctacattataatatcaaataaactcttaaaacgacatacaaaagagtattaattcataagtactttgcactatgatttatgcagtgttataatttattattaatacattatatgcgtaccttttatgttgaaaagcatgaaaccaactacaaaaccccaaagtggcccactgcaaaagatcataaaaaaaaatacatcattacaatctactcaacataatttttggtataaaatcaattaatttgtaagttgaatgaataatggctaaaagttttatatgaaagtaagttaaacttggaacaagagagaaaagaagtcctacaagtataaagttaagaaaatgcaccacactatttttcctaaggaaaaagtgtaacccacctgacgccaacaatcttttggaactcttcttccatagagcggatcatatagctatgaaaatcgtatgtcaatgttaagtgatggttctgtttaaaggaagatagaaatgattataataacataatggacatacgtttcttgaaagaaatgatatgaacgaaaataaaagcaaaagatatatgaaggtaaaagaaaaatctaaaaagggtatgaaaaagattggcaaacttttagcatcacccaaacaatcaatcttttgcatggatataagtattcttcattcaaacccagtaggttattaactcaatattttccttgcctgactgatttaatttaaaacttctactacacaagaacgattttcaagctccatcaatttttagaacatcaaaaatgtagattgcgagcatgcataaaaagaaaaagagtatagtgcaagtgaaaacattcaaatgatccgagagtatcatcacgcaccatgatgaatccctttcggagtgtaagatagtcagaacgaacaacagaatgtccaaactgtctgaagaaacatatctgtaagaataaactataaatatttagcaattggtatcataataggatatttgctagctattatctaaaattttaaatgacctatcatattagtaaaattttaaatgacctatcatatttacctttgtgttcaataaggcatcaaatatatgtagatgaatattgatgtatagtaaaatttcttgatgaagtaaaaacctaccacccatataagtaatctattcttgaccagaggagcagatgtatgatactggacaaatgttgtttgccttcggaaaatcttttcgcgtgcaaccactgccaaaattatcaaattttctccttcttaagataatgcaatttactgaataaataaaaatatgactgctaaggaaatcaaagccgttaaaccataacactaagcctatgtgatgtacagtcaaaacaacatcgtgagctaaacttgtaataacagatatgaatcataacaactctttatattaatagacatatatacagatatactctttagtgtctaatatgaaaggagaagataccatctatatatgctcaccagttaagcaatcatttcgatccatatgaacctcgtcttcccatatcctccatctatgaatctgaacaaaaaatgataatcaaattgaacttgtactaacatagtaatcagtatacactatcaaatggagtatatatacatcaaaatattctaagaattatatgaggagaagcaagaaactcataaatcttacacatgaacacttcagtggaaaaaaaaaaaaaaattgtttgataatactaccttcacgattgcaagaagcattgtcaagcagctgtaagttacatgagtgactgccattataaatatgaagcgatgcaattgttccatgccttcatatgaaagaaatggctcatgcccctgttaagtagataaatgttatgttttatataactataaagagcttttttatttctttttctctttggtaatcagtcatgatggacaactggacattatcatgaaatgagattaataggaaacctcgctgcacgtatcctctcctataccactcaatcttctcctcagagtgtgcaagaagagagatctcgttaactgagtccgcttgacagtagaaatagtactttcaagttcctcattaatctcagaaggcgtacatgggacaaatctatcgttgtggaaacttgaagagacgcatatgttagctattgtgctagaggtagctgtaagaagaagcgatatgaatccgagcagcatcagctctggaaaaaaaaagttcaagaaccaaattaatatttaggacaacacatcacaaaacatattattagagttgttacaaatgttgatcaatcaaaccttctttcattttctccaatgcagcaaacaaaggttttctcttagtcttttgcaaccactgtcccaaaaacaaaactcaaaagctaattaagactatcaattagtggaggaaacttcaatctattatttgacatttgattaccggaaagatcaaaattagaaaaataaaggaaattcctatttcaaaggaaagtccttacgttattttaatttgacatttttttatattgattataaatataaaagtacttacgttactaagccgatgaatggaacgttcaacgatcaaagaaacaaatacaaagatagtcaatactgtagcaactgaccaagttggtgttaaacccaacgttctctcgcttggttctgtttcttctctcatttcttcaaccgaattctttatgaacaaattttcagatgtttctttcttcgcgtgcaagaaaccaaattagctctgtggttcaaggtcgtatcgagaaacttttaaactcttctcatgccaaaatgttacaagctaatgacacaccgttgactttatctcagtgcctttcaccggatataagtcctttgcatcttccaagaaaaactccctctatcatctaaaacggccaaaacagaaatttaattgcagtaaccaatttaattggaaaaaaaatataattgtttttgtaaatatatatgaaatgaaaaaataagataattttaaaagagtggataattttctgttttgagatttcttaaacaatagtatatctacaaactttcattaatgaaatataattgaaaatatagaaaatataaaaatactatttccctccatttcacatgattcaaatcttaatataacgatataaccagataaacataaacaaatctagatttggatccccattcctaaacatgaacctccaaatcttcggattgtggtttctgatttaaaacttcaaaacccattcaaatttctcaaggttggatattgtgaaccaaatctttattaaactaagaaaaaaaatgtgaaccaaacgaaaaaatggatccgaaacgaactggctttacatattcaatctatatgaataactgatcctaaatattcaaggaaaaagaagaaaacaaatcaaacaaatgacaaaaaaatccaagaacttacgggaagagaggagcaagcgagctgagccgtcatgtttacatagagagaagggaagtctttttgaagcaaatgtttaaggtaggaataatgcctcaagtctctctctctctaatgcaattatcagaatatatcttagattaatattagatataagtatttattaattaagagtttacatcacctcctacgactctggttaattatataatgaagatttggttcagttaattaaaaacaagatgtggactgacagcacacttataggatcttgaggaatctaattggaaactactggataaatgcatgtgtaaagacagaccacttattaataaattaggaataataaatgattacaaaaaaatagtgatcgataaaattagcttttctactttctaagtattttgttgttggtgttgttgtatggtgtgtcattggaagaatggattaagtattttacgatagtcttgacggtaaagaaacacatccgaatatgcctacacatttggtggtacaacagcttattggcttccaaaagtgtagaaggttgtaacttgtaactttattaaatgtgaagttgtaatgttgttgcggcttcgtgtactatcgggtaacgtgacgaagcttttgatatttttaaaacgatttatttcatatgttgatgttatttatttcattctaagttacagttttgtacgatatgatatatgatatttgcttctgttaggacatcattggtccttcttcacatgttagattgtttttcataatttcatgtctatggcgaactggcacgtataataaatttattcgacaacccgatgatcaccacaatttgtattttttcttttatgaacttctttttaataaaataaaaaatgttataacgatgcatacgataatgtcatgagattatatgaaaagaatacgtgctactagtgaaaaaacaaagaatatatacgtgccactaggtgatcagtaggtgataatctagttgaattgacttatcacttgtaatttgataaaagttgcaaaccgaacattatggagtaaatttcgcattattattaaagtcaaccccgggaagtcaataagaattgcatggtgccgatgtgccattttatacttttgtactgcatgattagagatcacaaagaactagaggaagctaagcgatactattttactgtttcaatgtatgaagaaatcttttaccaaaataaaagttgtgtgaaataagtaacaataaacgttcgcgatacttataaggatccttccaaatttcaattgattttcaactttcatgttcttcaatttgacagcataattatgcacataaagcaaggacaggaaaaattcaagcacatactggcttagcttccgttgcctagttataattccattgaaaatatcctcaaattttatttttctattgaaaataaattgggtatacaaataaaagagaaatcaaaacaaaggccatgtgaaagataaaaatgatagacatttaaaccatccttttaggctgtttaataagtgccaactagacttaaaacaactgcttatactttggaatccaataattagacacacgtaaatagaatttagctttgcatgtgaaactaaaaaaaataacactatgttgtcccgacatactaaaagtcaaagtcagcgttacgaaaactctagatgagaaagagagtttcttcgacgtgtatttcacgagttaaaattaaacacgtgtcataagctctcttgttccattgtacgttgttgagttcttcttcttcgtcttccatctctctaccaactccacgatcaacgaaaccaaagatctctcttcaaagcttccaccatgtttctccgatcactcaatctctgtacaatactactcttcctagcgatttcatcacaagtttctcaatctctccacttcgaattgcaatctggtcgaacaaaatgtatatcggaagacataaaaagcaattcaatgaccgtcgggaagtacaccgtcgttaaccctaacgaagctcatccttctcctcaatctcacaagatctccatcagagtactactctcttaaaaatccgagattttcataactttgattattattgattgttgatttgaaaacatgaatttacgcaggtgacatcgagttacgggaacacgtatcatcacgcggaagatgtagaatcgggacaattcgcgttcacggcggtggagtctggagattacatggcttgttacacagctgttgatcataaacctgaggttacattgagtattgatttcgattggagaactggtgttcaatctaaaagctggagtagtgttgctaagaagagccaagtcgaagtgagtttttaaatgctgttaattttttgatcaattagattaagaaaattgctctgtaaattggatgttagttctttaggatttgttgcagaaaagttactttgtagagcctaaaaatccaaatgaatagggaaaggtttgtttttgttatagataactccggttttaagactagtttttgtgttgagcaatgataaagcttgagtttttatgcttctgtatttgtaccaaggttatggagtcgtgagttgttgaatcatcatattgttggtttaaaatcatagtcttgtgtgagtttggtagttgatcaattagataaagaaaggttaaaggtgatttgttgtacaaagagtctcagaatccaaatgaacatagaaagatttgaggattgaactagattcttatgcttctgtgttgaacaagattttgttgagattttgactagcgttgtgtttgatgttattcttatctccatgcttttttgaggattgaaatacattcttatgctttgtgttgtgtttgtttgtataaaggttatggagtttgatgtaaaaagacttattgaaaccgtcaattcgattcatgaagagatgttttatctcagagaaaggtaaaaaaagtttggttatttatgcttccggattgttctatagactctccagtatccacatttttattagcttgatacatatggacttgtgcttgtaatgtttgtgatgagttttggtttcctcagggaagaagagatgcagaatctgaaccgggctactaactcgaaaatggcgtggttgagtttcctctctcttttcgtatgcttaggagtcgcgggaatgcagtttgtgcatttgaagacgtttttcgagaagaagaaagtcatctaagatggttagatgaaacaaatcccactcttttcttttcccaactcaaaggagtcttctattcctccatgagttttgtacatttagatctttacttttgagtatgtactctcggaactggaaattaaatgaatatgaaagtattgcccctttttgcagttttctgacagcagaaagaacacagtaaatttagtttatagactaaactttaaaagaccatgacataggcttaggcacacagtatagtagtttttcttgtttattcaagcaaactaagcttaagcatctgcatgtttgattcaagcaaaataaggaagaacaaaaagtaggaatgaagcttaaaaacctgacatccattgttttaaagcttgttttttgatcgacaagcaacaattgttggcgatgactcctcttaaattatgtaatacgctcaagagctatgattagccaaattctatcgactctgtgagtgttgttttctctcaaactttatgtaaactctgattattcgtaaactttatatatataacaaatgattttcttgttttgtggcctgcataacccacatgacaatctcagacacaatcaggagaataaaatatttctagataatggagcgtaaattgaagacattacaaattctcaacatgttcacaacacacaagtagttaagtcgtaacattttcttcaactcttaaacaagactcagatatgtagacatctagtcaagagttgcaaaagctaaagaaatcgagggaatgagagaatgtgttgagacacaccacaagctacttctctggaaacagtctcaagcagagtttactttggtactttggtgcagaacttaagcaccggacttgcttctttctcccaaatgagttccaacacaaaggagtcgtctatcttcacgccttgagcatcaaagaactctctccagccttttccaaatctcattattctgctactactttcctgatagagatccaccacctttttaactccatcttgacccagcagagttatcttccttggcttgttgatgccattcacctgcgtgaaaccgcgcggaagaaactgcaaaaaaatgattttgtggcaaaataatatactaagacaaccttgaggcatagttgttgaagaagcttaccagtttataggtttgaaaagcggaccgtgtaagagttaatgtcacaaatcggttttgactatatgacgatgaagagcaatacttccttttcttggtttccaagcaatcctgtgagatgttcttgtcttccatattctcctcttcgctttcttcggatctactactgtcatctccactgctaggatttgaggagagtgaattgacatcatctataccttctggacactctaatggaattttttcatggctggattctgcagggcacaaagaaagaacaggcttttccccggttccaaccagtttgaacttgaaggaatctccagctttcaaaccgttgccttggcagaaactggtccagcctcgtttgataatagtaaagcagtttgatttgtagtgtttcaagactaatttccattctcttccccatttattctttaaaattatcttcttgcatcctttgtccagaccattagagctcacaaaactcttccataaatactgcaagacattgcatatcaatacaccaatcaagaaagaacactataagttccaatgatccttctgtaagaaaggagtttagtttaagatagtggaataaaccaaagttttgtattcaccagtttatctttctttatgcttgaagcagtgacagatcctacaaaataggaacggtgcgatgaagattctgactttggtctatgttcactgaggctcaaatacatgacaggtggtccatgtttttggaccagtttgaatgtaaattgttgaccttggctcatcccatttgcatcacagaatcttgaccaaccaggtctgacataagtatgcttgcctgcttggttgtacttcaaattaaacttccatgatagtccttcttcattaagaagaacgatctccttaccgttcattttatctagaccgtttgaactcacgaaacttagtggtaaatactgcaaaataccatcacagactaataatttaaaccaatactaagagaattttttcttaaaatgtggaatctgatcttaccagtcgatcatagtttaggcttgaagctgtgacattagccacaaaactagaatggtctgatgaagactctgctttctttactggatttttcttcactctcttctcttttgaactgtttcctgtcaataagaacaattataaaatctcagttttgcaattttctacagtatttgagtacatttcatagattaaaggtttaccaatattggtctgatcatcatctatgttctctgcagaagctctgcatgttgaccaatacttccttttcttcacctccaagcaatcttgtgaggtattcttgtcttcagtaccctcctcttcactttcttcggatttgttaccctctgaacacgctaatggagttttgtgatagttggtttctgtagggcacaaagaaagaacaggtttgttccatgttccaaccagtttaaacttgaaggaatctccagctttgatcctatttacttgacagaaactagtccagccttttttgagaaaagtaaggtcttttttgaagtgtttcaaaactaaagtccttttttctccccgttcattctttaaaactatctcactgcatcttttgtccagaaaatttgagctcacaaaattccttggaagatactgcaagaacgccagattatgcacacatcaagacaagacacagtttgcatgtcattaaacacatcaagaaaaaaaatacttctaagttccaatgatcctttctttagcaatgagtgtagtgaaactatagtgtcagtttattaagataatggctcaaaaaacaaagtttgtattcaccagttgatctttgtataggcttgaaggattgacagatcccacaaaactagaatggtctgatgaagactctactttctctcttggattcttactcactctcttctttcttgaactgtttcctgtgaatagaaacaatcaaaattctcagttttgcatcttttctacagaatttgagtacatttcatagagcaaaagcttaccaatgttggtctgatcatcatccatgttttctacagaagctctgcatctcgaccaatacttctttttctttacctccaagcaatcctcttcactttcttcggatttgttaccttctgaacactctaatggagttttgtgattgttggattgtgtcggacacaaagaaagaacaggttttttccaggttccaaccagtttaaacttgaatgaatctcctgctttgatcctgtttacttgacagaaactagtccagccttttgggagataagtgactgatttgaaacgtttcaaaactaaaggccattttactccctgttcattctttaaaactatctcactgcatcttttgtccagacgatttgagttcacaaagctccttggaagatactgcaaaaacgccacattaaacatatttcaagacacactttgcatatcaataaacaaatcaagaaaaaaaacttagtggcataaaaaccaaagtttgtactaaccagtagatcatttcttaggcttgaaggagtgacagatccctcaaaacaagaatggtctgatgaatattctgcaactgatctttgttttggtttagcttttgcgcggcacaaacggatgacaggtggtgctgattttcggacaagtttgaatgtatattgaccttgcctaatcccattttcagagcagaatcttctccaaccggattggacaaaagtttgcatgcctgatttgtcatgtctcaaaactaacttccatgatcttccttcttcgttctgaagatagattttcttactgttgattttgttcagaccgtttaacctggcgaaacttagtggtatatactgcaaaatcccatcacaaagttaggttaatgtctcgaagactaaagaaagagatttttgcttaaattgtagaaatctaatctaaccagtctatcattgcttaggcaccaagctgagacttttgccacaaaacgagaatggtctaaagaagactctactttctttcgtggattcttcttcactcttgaactgtttcttgaagctaacataaaaaaatcaagaacctcagttttgtcttttttctacagagtttatatatagagcaaaagcttaccaatgttgatctgatcattacgatcatcatcattgatattgtgagatgatgtatgatattgaatctcgcaacagcttggtcctaaagctgtgacatgaaacaccatttctccttcaagtctgaaaacgacgatgtcaccagttcgaagatcatgtgcaaaggcaaaatcttcccatccgtcggttagttttagaccgtccatcttcactaaccaagttttatccgacgcgtctgatcttagcgtcacagtcttgttttggttgtttcttccttcaacatgcttcgagaagaaagctacaggaatgttctgcaacaaacatgcaaacaaaaaactaaacaaacgaatcattttggtaagatataagaaaacagaacagaacagagtacgaggtgagtgcgagattctgtaagaataggctgaaagaaatgtgggttgatcggagagtgtagaagagattgatccgccattgttgagcacctcttgagaactttaagaaagaggtttcataatttaaagacgttcacgtttgtcttcttcttctacgtcttgaatctctcgaggtagacattgatggttgaatagttttgatttaatgtttctgactagtttttttttctttaacacctttttacagaaactttatctaaagccagattttcgacctctccttcaccatttctatccattaaagttatctttcctcttctttttagagttgttgatcttcgtgaagaatcttagcacaagaatcaaaatgatagcacaaaagaccaagtttcagaaactttttttgaaattgtaaggtgtgacttgtgattgacacgaatgggtttatatgccttggagatgaagctaatccatcttatagactgctgacgtcttttttcgcttcttttcaatgcactagtatctacaaattaattatgaaattacaatgttttaaattaatgtagaaattaattatttcaaatcacacaattatttgaatcaattatgaaaactgataactaatttaacatcaattgtttacaagtaatagaaatattggcatgcataaattattatatatgttacaaatattaacatcatttaaattaaatgatgcgaattttaacattattttttgtaattgatatatgttaagatcgatttacaagaatcgatacaaaatatttgcatcactactttcaaaagtcactttttttagtgatgtaaatgtttttcttgccatcaattataagtttataactaataaaaatatataaaataaatgatgtaaaaacacacattttttttgtagtgattgtacttgattagtactcaaatcattttgtcatcacatcaatcaagtgtatatgcctaaaattttaaagagtagattaattaatctcaaaactctttcatttggtggttaagtgaattatttccggcgaatgggaggaaattcttgatcattaaagattattttcaatcactcgtcaatctatccctgcttacgaagaagggatttatagggtggaatgggttaacgagtttgaagaccagaacgtgtggtttaaaacataacaggggctgagatcatagaaaacataattcacgacagaaacacatgctctagctgcgttatggacgggccgggactgcataaaactatttgtttcggggatagttttacttgttatgtttggcttgtgtgtattttttggtgtcgtgaatgtttgatgttattttaaatagagagatagaaggagaggcctttgtttcatgctctgacgtgacagtgggtctcctgcctgcgactggtgatcacggcaagatgattggtccggcaaggatgtgtcaggtgtcctagttttcttaaaacattataagtatagatctttggctcatgtaaagacttggaaaaccttatgttttgagcaatggagtgtttgttctttttggaattacattgttgtaagttttcaaaggttggacttgagatgtaagtggaagtttccacagttgtaacttttgaaacatctgctttatataaaatagtaccacttttttggaaaaaaagacaaaaaagaaaagacttgggaaaccttatgaatgttaaaagtgttgccacttcaatacaaacatcgtacttaaaaatacaagtaaccacttgggccattacaaagtaaatcaaccatcatatatatatacacaatcacgatgaataatgttttttgagtatattaatgagaaagcttgtatgagatgatcaagatgatggcgagaacgagagccacgattaccgatgtaatgatccatttgttcctagtcattctccttgacatagccgtcaacaccttcttgctcttgtcaatggcgtcatccacaccatgaagctgtgattcaaaatcagaaaagttagcttctcaatgatctaattcaaacaaatcattggcactgatagataccaaaccgagcaattgtagacggtaccttgttgtgcgcatgaaggagggtttggcgttgctgactcaaatcttggacaattgagatgccaacctcttctgtctccagcattagtcttctactctccctgattctgtcacttgattggtcaagcctctccacggacattgccaatcttcctctttgatcagcagatacctggaacatggacaataatgtaaatcacagcaaagtctttgccatctaaaagtttgtgtgaagatgaatataaaggagggtcccctcaggacaaagaagcctaactgatgcaagtcaattaagacaactaagataatgagaaaacaagagtttctatttaggagttagaagcttactgcatgcagatccgccattccggattccatcaactcttcacgggaagacggcttagcatctgcggaagagactcgtttgaattccttcttcaattggttcagatcagatttatactctcttagtttagaaagacacacagctttagcactcggctgcaaacttcttgcctcaagatccattttccggatctacaaaaaaaccacagaagcatatatattaattttaaaaaagaaagaacagaacggtaacaacattaaagcaagttaaatgcaaataccaagacatcagcttcgtctattccagacttgatctcagcaatcttccccttcttctcctctataaaagcacacaacaatatctaatcaaacctctactctggttctatggcaccacaaaatgtaacaactccatgcatgtctatgtactataactccaagaaagacagtggtaaccatagactgacaaacaaatgaaaaaaaacaccaactcaataaacctctgcagctacataactaggttcttatgatcttatcttcagtcttaatttcttcacaaaactacttgaccaatccaagtaaattacattcccagatactacagaactcgtcagatcgtaaacaagctaaaacgattagtaaacactcatgcacctctactttacaaatacccccaaattcggacaaaattagatgaaatagattgagaaacaagttaataaatctatgcaactacataactatctagacctaactaggttatcgtcttctaatccaagcaatgagaaacagatcctatgtctcaacattcctaaatgttacaaaacttcgtcagatcctaaacaagtcaggacgattagtaaagaacactagtccaccagctacttgtcacagctcaaaagctccaataaccccaaattcgaagattcgaatttctaaaatcaggtaaattcgaagatctcgcgttcaagatccgaaatcgggagcgtctggattttacctccgttggagagaaccgatgcagagtgacattttctagagagattggttgagagctcgcagtattgacgctcgtacccttcaaatacgtcgctcatcttcaattatatgtttcgatcttgagaaatttggtggattttttctgatcaatcggatcctttgtttgattggattggatcggatctagaagcaaaacagtttcctctttgcttaaagataatcaaacaactcttcttcttcttcctttgtatttctctgctcggggacaaggaggaacaatcaaacaaagcggtgcgttttatattgacacgtgtcagccactgcgtattaagtcccccatgctgcaatcgatgcaaatgtaggtgagacaaaccaaaccgaatcaaaccgttaattaagattgaaatctaagtgtcttttctcactttttcagctctcggaaatagtgtacattttatgcagaaccaagattactcgtccaggaaatagacaaatccattgatagaagtcgaatctgttttgcgtaactatgtgggattctttgatagtctcatgaaatcaaagagatctcagaggctaagagtaagatagtccactcgagtaaaaatggggggaacaagcagagattctcaaactatattagccaggtgaagagaaccaacagatattattagaaattccacttgggattgttcgtgttacatcacattcatcgactcagtcattatattctacaagagtacaaggtaaacataaaaaggatcctttgggctcttatagctcattcttgacctttgcatccccatttggtaacacactttgcgattgcgccaaccgtttcgcttcctgaatatgaccaaaactgtttaatccccttgacttactataatatattaatgaagatgtacaatactagtcgaagttaacaacttacagcagcagaactagcacggatttctctatacatatcgacttcatcagggaaattctgttcaagctcctccagaatatgttttctcaaatcctatttataacaaaatgttgattaagagactcagtaaccttaagaatcatacacaaattaagaatcagaagaaaaggagtcaccttaaaagcatcagtcttgcccttagtaacttgatttctagctatgcagctattaagaacatctttcgtaaactcatccgggttcttcccatcatcaatcaagctatacgaaaacgcaaacataagtaagcaagtaaaagtatctatcttcaaagtgcatactaaaaacaaaaaggacttgttttctcacttaagaacctccatggggatttgaatgttgcatttctcagacaacttagtcatgttatctagctccatcacaagagagttactgcaaatacacacacacacacatattcattcaaacaatagttacaatacccaaaacaataaacacagatgagtagaggagttacttacaggcgctggaggagatggagttgagacgcgggtgtgaaagaagtgacggtaaggtgtaactgatgaaggactcctaaagttttctcaatagagtttatgacttgggaaagattctcctttgaatcatcagcaacggtcacagttgaagtcccatcattggtttgatatctgattgtaccattgctcccaccaatccctgcacttgtgttctgtgttggatccatcacaagctgccacaaaatataaacttgagatatatgacctgatgcgttagcgataacaaaacaaaaacgagaaaacgcaattttcgatctcaaaatcaaacgaaaattcttcagaaaccttattcaattggagtggattttggtatccaaatttctaattttagatgcaaattccacaaaaacgcccagatcaagaataacgataacaataacaattagcgtagaatgaagatccgtgacttacctacaacagagatgcgtttggcgagagtgaggtggagattctccggacgaattaggttttcctccgagccttaccgtgaaaaccgaaaagggaccgacgaagacagggaagcggaagatatttggacactttgctgacgtggaatatcattatcttgtatctgtttcgttcatacttttatttcattcttcatcagctgtgttaaactgttaatgatcttctaagttctaacatgtgattattaatatttaaaatagaaatggcagatttaacagagtgcgattcactattcacccccacaacaatagtcattctataaagttttgattgcttaatcgatatgtttatctaacaccaacagtttggtccattccggagaaagagttagtattgaacaaactaagttaattctctgctttaaaaactcaaaacagtaagcagaacaaatcgagaagataagactgcaagagaaaatcctcaactttccactaggtagtgtactaaaacgcacgttgccgggatgacggattctcttcaggaagattgagtatttgctgaatctggtaatgagcctgcaatggtaatttaacattaatacttatccgatgacactttcatatatccgtctgatgcagggttcctacgcaatagtgattttctagtccaattcaacctcataagacaaatgattgactactatcacaaagcaagataagaacttgaacttaccagtttgatgcgccctttgatctgcgtaataacaccagtatactcttctagttgtctgttaaaaacaaaaaaaaccacatttatattgcatcaacattcagtcactatactgcattccaccggagaactcattcatcatatacaatgatacaaccatattttccttgtacatggagcaagaaaactagaaaagcaaagatttctcttacttttgagttctttcctccctttgtgctatatagtcaagagcttcttgccgtgtgaactccacataaaagccgaggcctacatccatgaatatgtgccgagtatctggcctgaactcaaacaaacacccaagtcaagtgaaacgaaatcagaagcaaacctggtagaaagcatctcctattttaatccccatttattaaacgttttctgctcaataatacataactagcttctaacatacagaacacagtaaaagcacacttcttaattgcattaagctgtgtatggagacagtgtatttcattgtatgcagacaatgcatgacctttcatagctaaatgacttgactaaaattaaacgaaagaaccaaagctataagtaacgtacacttcagcttgcatgtaaacttctgaaccaaggttgacccttgttttgagactatttacaccattcttctccagagtttctaggtttttccgcaagtcagagctggagtgggagtaaccgtcaaggaaacaagaatatttcaaccgaattagatttcactagaacagcaaagtattgtcaataactacaccaagaagagttcctctcgatttagaaacacaaaactaagtcaaaaactgactggtaaatgaacccgtcatctttgatagggttaagacatgggagaaactaacaaaacacttaggatcagcttaacaagatgatgcacatcacgagaagctagagtcttccctatacaaaaggatacagtgttttttgttcttcaaagatcttgtccctgcaaaaccaacaaatgcagagaccacaatgaatcgaaacctcaaacaaaaagtgaatagcatgcaaagaaaacaaactaaactaatcctacatacactttaatatcatactcacaattttaattttgatctgaaaaggaagtaaatataaataccgtgaagcagttgcatgtacaagcttctgtttcaaacctttgtcgataatctcctccaacaattgcaagtctttttgacgtccctcctccattactgcaatgcgaacataaacatatcaagcttaaggctctaaccatccccttgtttatttgataaacttagtccagaataagtttctagagccttgaaatgttcgtttcagaatctagagtcacctaaccatcaatatctaaatacaagctcggagagcgtcgaaactatacagaaattgcatcaaactaatacgtagaagcatttcatcgaacaggtggtgaacatccccaagagagaacacaaaccacgtaactacactttaaatatgagaatcaaattggtttccaaacgaaaccctatcaaaaatacattcaaatacagagaatccaactcgataaacgagaaggaatctgaaaatcacaaaattagaggtacagataacagcaaaggtccaagagtatttgactcacgagtcacgagcaaagagatgaaataggtccagacacgtcacgaccgaacgacggtgattcttttggtgacagtgatgttgaacgacggtggttgtgacggcgagtggcgacgccgcgacggtgagggagacgaagaattatttggtggttttacaatttgaccgctcgagcacagattatttaaaccatgcgaaccggtttgttcttacttttggttttaatttcaagtcctttgtaatataattaccttgcataaaggcccacctactttttaattttactattttacgcccaagattttcaagactcaatcaaactggctaaaaagaaacaagagcagaactatgaacgaacttgggatgctatataatcttcaaacaatgtaaacagagaaaccatatataacaaaaaccttaaagatgcatcaagtttcaaagtgaaacaaaaagtgctcaataaaaccccatttgatgatatacaacttcttcttcagctaatacgtttccatgtccattcaccgagtttgatccgcacaacgcaccattactcagcatccacaaccgtaaccgtttccatgattggctgagtttcacctctagaagcttccatactataataaactcggcagctaaaatagaacactgcactcatcatcgaatctataagtgtcacaaaggaatacatcaacaccaaaagaggtccttcccataacctcgaagagccatctccataactaactttcttcactctgtgatcaaacaatccttccacaaacgccaatcctaaagttgatccaaggaacatcaacaaaccaacctgaatctgccctttgatcaaatcactagctctcatcaatgctcctaaccctgaaacatcttccaaaaccgagatcacaatcgcagtgttgcagattataatcgcgttagcgaaaactacagagaaggctaaaccaactagcatagctccataaacattgaaatctggagagaagccgagaacagagaaggaactgcagattgctacaagaagaacgcaaaagaaagtgaagcaaccaacaatcagaatgcaaatccaaacgtaagtgaacacaactctcctccatatcttctgcaatataaccaagaacttgcttatatcaactacttccctcgagtaagaacaatccactgagtaaaccacagctgctttagacaacagagacacagtgataaacacagggaaacacattgcagacgaaacagcagtttcagcgaatttctgacaagaatgtttgacaaaaggctgcaaaggaagaccacttgatttcgccactaaaagaagcttcactgtgagtttattcactaatgattgatcaactaaaaagtttggtaagagcaaagcagagacaggacagatcaaaacagcagtagttaacattaaagcaccaagattgtaccggagaattcgaactgtttctcttaagatctctaacgcatttgaggagtgaaattgtttgtgactgtatgattttagctccggtttccgtaaaacctgattcgtttccgtctccatgtttccgagagtgaagtgtgttttagctgagttcgagattacataccataaaggttgatttcacaagcagcggagatagaaatcgaagcaaagagaagatctttcagataacccaggaatcaaattgaaaaaaaaagacgaatcttggaacggatcttgtctacgttccaacaataattttgattagagaaaacaaaaaatgtaagatttccaattttgtcggtggcacaagtgaacgtgcttttgtcggaggtaatcttcttctactccatcgcgaacttgaagctaaaccgctaatttaactgaaaccttaaaacactaaaccataaacccggtttgaaaaaattgatcaatttggttaggcccaataatagcttaatgggcttctttagaggaataaaaagaagaatatttctatggaaaaaaaaaaaaaaaaaaagagagaatctttccggtgaatgggaaatggcaagaagaaggatacgagtacgatgaagttgagttagagcgggagagagagacataccgttgaccactaaagacgagagctttagagagagacgcaacaatggagctgaatatttccgagagtcgaagcagatcaattcgttgcattgtgaaacttggtttgtcttttgatccctattaaaatacttgctggatcgattcttagatcgcattttagttgttctgtcttatgggtttgattctgatttgactattgaataccgaagatgaggaaagactttaaagatctgtcttttattcatttcccatcaattttacctgtctagactttgtaacagcagaatgtctaaatgatttgataggaggtgcggcaattacttgcaaaaacgagctggagaagattcacgatgaaaatctggaggtcgtggcgtgtcagttacgtcaagctatgttggagggttcagctccaagcaaggttattggcatggattggagcaagagacctggaagctctgagatttcttgtgatgtggatgacataggggatcaaaagtcttctgagtttagtaaatttgttgtggttcatggcgctggttagttggagattgattcttatctgcttaaatcttataatgaaggatcaaaatacatttttgatttagctcttacagatcattgacctgcttgtgttagttgagctgttatttagtttttgggtttcttatgtgttgttctgatttttgtcattaggttcctttgggcactttcaggccagtagatctggggttcacaaaggaggacttgagaaacctattgtcaaagctggtttcgttgctactcgtatatctgtgagactgttagctaaatctgatgctcttacgtaagatagtcttgagctgttctgatagtctacaacttctttttgcaggtgacaaatcttaatcttgaaattgtacgagcactagcccgaggtatctcttaagcttattctcttttcctactctggctaagaggaaaagatgaattttgaagctaaacattatgatctcttgcagagggcattcctacgataggcatgtctccattttcatgtggttggtcaacctccaaaagagatgtaagagctaactgaacttcttaacatatttcctgatctgaagcatgtgggtttagatttcaatgagactgctttttgcattaggtggcttctgcagatctagcaaccgtagctaaaaccatagactcaggatttgtccctgtaagttttgatcccaccagtgaaattaggtagatgtttaccaaagtctcttgactgtaatttggacagtaatttttgtcatggccaggttctccatggagatgcagtgctggacaatatactggtaatatgctctccagagataccaaatagctatctagattcttgtccgtttagaatttgaacagttgaaaatcttgtcctgaacagggctgcaccatattgagtggtgatgttatcatccgtcatcttgcagatcatttgaagccagaatatgttgtctttctcgtatcctattcatagtataaaccggaaatttaatttgtgttctctctccctctttcctatatattctttgttatctgagtaactctttacaaagacagatgtactaggtgtctacgatcgaccaccttcaccttcagagcccgacgctgtgctcttgaaagagatcggttagtttcaaactttactgtttgttttttttatatcttttccagacttggcctgatactaacagttcatgcagctgttggagaagatggaagctggaaggttgtgaatccactgttggagcacacagacaagaaaggtaaacgaaagaaccaatgttgtaaaactatgcaatacaataagtctgagggatttgttaaaagttcaaacctctctgatttttggaatcaaacagttgactactctgttgcggcgcacgatacaaccggtggaatggaaacgaagatatcagaagctgctatgattgcaaaacttggagtcgatgtctacattgtgaaggtagattatagacaacttttgcctttaaccaactaaatatcttagataaagatggagcttttaaccgccatcatgctctttttttcaatctcctcaaacaggctgcgacaactcattcacagagagcactaaacggtgatttgagagatagtgttcctgaagattggcttggtactatcatcagattctcaaagtagaataatctcctgacaaatacactaattccagttcctcaacaaaggaaagcattgaccttttcttgctattactgttttaccagactttgtgcaaggaatacaaaatcgtgtaatgtcaaaaccagttaaaatgtcgaatactatcgcagcctgtgtaactctatgtttccacaagtattcaatcacatatcttacactgttattgttaaataaaatgtatatgtcactcttgaatcgtgcaaatagcaatgaatatcatgtaaagagttgcttaaaacaagcttcatgaacaaacatatccagtgaacaaacaaaaagtggttttaagaataacatctcataagaaactttgaatgtttcaacacaaacttttccaacaatccaaaaccaatagatatggttgtcttgcaacaagaaacacacacaaagggtctaaattaggaaaaagaaaaacatcttttggttcttataacattgacgtccgttgtcaaactggtaataatatatcgaatgatacttgtttacttgccaccaccaacttccttgacggcacagatctgctcctctcccatggaagacatgacagacaccacaatatcctttccctcatcgaatccaagcctcatctgcattaacaaaacacaacaactgttttcaatatcacaattcgagagatgaatacaaagtcaagtcatttgtgtgcgagtatgaaaagacaagaaaataacctgggcggtgagaccatcatcggtgggaagcttgagatcatccttggtgccaccactgtcagtgagaaggctcacctataatgtaaacaagtacaaaagttatggcaagaatagataaataaagctggagtgatgaggaaagtgagtataaagaaaaacatacgaagccatcctcagtgatatcaatcaactggtaatcaacacggttcacatgtggaacctgagaaaaaaagagaaaggaacaatatttgagtcagatcacacaatcatatcaaatactgtgaaaatgaatctacatagtttgtgtagtaacttacatcacaattgtgggaagatggaacaatatcttcaagcttcttagcagtgaagatatcaatagcaacaaagtgacatttggcgtgaccgtgcttgccagttttggaagtcgaaacctcaacaacctaatcaaaaccaaaatatcaaaatcaaatctatgttctccataaacgtttaaatcaaatcaatcaatagactacttagattcaaaatcacaaaaggcgtcgtctgatattgcttgatttctatccatttttcattttcatttcccaaaattccacgaatctagagaggtaccaccatcaaaataacaggataagattcatcatattcatctaagtagcgatctataagaaaaattcaaactaaacagaaccaggtcaaatccgaggataaaaacaaaatcaaggagctactatacagagacgagatctagaatcaggaaaaagagatcgagaacgatgtttgatgatgaaatagaaatcagaccttgcagggacggtttttgatgacgatgtgaccacctttacggatgttaccggctgattgaggataggtcttggaagctccggattcgctggcctcaaagtggtgctcgtcgtcagacatgttttcacagaaatttgagagaagaaaggttttcggagaagatgagattgggagaagggaaaaaaaacctaagagagagaagtgagcaaaagcgatgtcgattttttttatataggaggggaagaggaaggtggaggaaacctttctagggttactgtattattatccttaggaatgttgtggtgggtaaaaacaattcagcccagcccaaactcaaaacaggcctcttcataaaaaaaaaaggattcaaaaaaactgtattttatatagatattttaaattgtatttatttctgtatttgacatatatattatattcactgtcatatgtatttaaattgaatcatgtattttgtattttgtataaaaaactttatttgttacccttaattgattttaattctttaatttaatcaaagtttctaacaaatttataaatccaaaattcactcaaacattaataatttaaaagattatacaaaacagaatttcatcaaagattctaatttaaaacagaaatacaaaagtagtgaaaaaatctaaacaacttctaacatgggtctaaactctttccgaacatcaaactttaagcgtttattagagttaaataccgtagtagctgcttgagtagattgtgtttcactttgtgttgcttctccttaattgtttgccttctcattcattgacatttactcattctcagcatccaaagctgccaaagtttctctagtttgataatttatcctatttctcagctgttggattataatctctcaacgatttagattttcccgattttatttttttctctctcttgcatctctcgcgtgcattccatgcggccccactttagcttgtgacatctaattcctcatattacagactacataactaaaaaaatagagtttttttttactctaaaggcgagatttaattttcaaaaaaaaaaattcagttacatgaaatctagaattattttttgatttaataactaaacttaaaatgtaaaaaaaataatttaaaatttttaagatatagtaaagaaattatttttttgtattattaattaaaaatattaactttttcattacaaaataaatcactacaattaaatccaatacacatgagtatatgaatttcataagaaacgaatatgaaaaacaattgagtatataactttttagtctaaattttgcacgataaattttaaaatcaaaattaaatttaaataaatatttaatcaaataaaagttaatatttaattgataatataacaaaaaaaagctaactattgattaaaaatagtagtttgatgcaacactcaagagatcttcagttttggttatagctaggggtgtcaaaataagctgatagctcatgagctggctcaactcggctcagttattcatgagcgcgagttctatttttaaggatcatttaataaatgagtttagtgatcgagctttatttagctcacgagttatatgagcgagctttaatgaacatgagcttggtttttttgaagtaatatatacaaaaagctaacaatcaaagtatatatatatttttctataaataatagaaatatattttagaaaatatagaagttacataacaatttctgaaaataaatattagtaatatacacaaaaagtcaataatcaaaacataaatatttatataatctataaaaatagaaatatatttttaaaaatatataatttacataacaagtttagaaaatataaattttttcatttattcgcattagctcgcgagctagctcatttagctcgtgatttagatgatctgagtccgagtttgtattttgaagctcatataataaatgagttgagctgagctggctcataaaagatccaagttcatcatgaggtgagctgagctgagcgagctggctcattttgacaattatagccctatagactaagacttgatgctattttgggcttttaggaagctaaatcaaagagcatttacggcccattatgcttgatgatattttgggtatttgggaaacaaaaccaaattcgaaaacctccacgaacatctccagaaatgagttgcgtacttggaatgggctatatgggactgatcatttacggcccattatctttcatatataaaaatttgatatttttcgtaagggaaacgtcatttatgatttatgatttataagcaaaaccaaatcatataatgatatgatgcatttcattatgagcaattgagcatgattaattgtccttagaaaactaaaaacttgaataaacttagacatatcaattttttgctaaatatcctttttcatcttgtttgaaaggcatgaacttattatcgactagaactttgtcatatgttaatttcctcataaaatgttattgtacatacaaatgtttaatttctttgttaattattgaactaacatgctaaaaaccaaaaatttgaactgatttgcaaaataaatctcaataaaaaaaatcataaatatgtgggtacctaaatctcattttccatcgcacatgattgttaattacttactagtttattaaataatgtatagtcggataaactagagtggtgtcgtgtaaaatagtagccatgtatgaatggaagtttatagaaagcaacatgacatcagataaaataccatgttttcgtataaaactcaacattttatttgttctaaatacttaccaatattatgatacaagtttatgattgtctgcttagaactcactttatgatacaagtttatgattgtctgcttagaactcactttatgatacaagttttacttcctcctgttacaatggtttgttatgtatacttctgataatcatctgctgtaatagttattaggtaagccttttgttaagtggttgtttccacttttgtactcgttgtactagctctgttatatataaaatcaacactcttatgacaaaaaaaaaaaaaaaaacttaccaatatttacacacacaaaaaaaaacactaaccaataaatttaattatttggagaaaaattttaatcatatcccaaaattgtatttgtaaataactttcagaaatgtcacaggtgatttcagattaaattcttatgttgcagctggtcatcctttttggttaggtggcgtctttgaagatgagagatccttgtcctctgtttgattctatgaagctgagagcttggagcaaaatcgagagactattttttgtataggcctttttaatcttgaaaagtgcttaggttaggattcttggagacgtttattctcactggagatgttcttagtgagtctgtaattttttgtagaggtcgttgtcttccaaaatccaatatataaaatcagatgttcaaaaaaaaataaaaaataaataactttcagaaatgtaaaatataaagaaaacaaaaatattgcaactcaagccttaatatcagtgcgttcacttaaaacctgtcacgtgtcagggagtctcaggactgaaaaagaatgcttttctgggatagtggcagttaatgtaaataatctccacaaaacagcctttttaattacatatttttatttgagtaagaaatctgagagagagatgattcatcaaccaataagaggcgaccagaaaaacaaagtttatttcttctaacaataatcctaaaatcgtaattatctacacaaccaggggtactttatattcccactcaaacataaacttaaactaaaatacctcaaagttggctcacaagtggggaccaatagcttttggtctaactaactttgtaaacaatttatgcttaatttagaaactaacccttatatattgttttatcatatttgtaattttgggatgaatatttggttttaataggaaattttaaaaagatagcatgcttttagcttttattttatttctatctaaaataggctaatttttttttaaaaaaatcataattaagcttctagttgaaagaaacattagtctctaccttttaaaaactaaatgaattgtcttcataaattgtggatgaacttggaccagttatagtcgtaaattgttgatatacaaaccaatgtgttcttagttaacaaacaaagcaaacataaatttttgttattatattgtcacttaagtttatcttacatattgtgttattagagaatgcgaattaatgagaaatgctagaaacattatagagtttgggagaagtttagagaagtagtcatcatgtttatagataaatttatccaaaaagtattaatcaaaacaaaacaaattttctttttttccatgagagatgatcgttatccagatatatttaaagaagtcgtttattctcttaaccgttttatattcttgtgtaaaagcaacacataaccagaataattcagaagatgcaacgattctcatttcaaagaaatcttaggtgttggattatgagtcatatatgttgagatgactaaccctacgttgaatgattggagtggagttgcttccttcacggttttattcatatttgattagtgatgataatgaaaattttgccaaattgtagtggtaaaaaggaaaaaaataatttataaaaacttttattagagaataacgatataaaacgtttattacaaaaaagtaaaatgtgtatttccaatgttaacacctacatattcatagatgacatgtgtgcaaaaccaataagaaagttctagttatgttatagatattaaaaatctatttaatgatttttagatatataatattaagaaataaggaaataataattcaaagtaagttgtgaatcttgtgatccttttatgttaaaatctaagcattttaagaaatctgaagatgcatgtatacaaaaagactttcttagtccaaagtccaaactagtaagaaaatacatttataccatttcatcaaaaattctaatacacaaagacttacaaattcataattttcatcaattttttaaaaaatttcgaaaatttcatatttgtttagttgacatatcaaacatgatttgttacatgagacgtaatgattgttataggtaaataatagcggtaagatatgctagtatcaataaatacaattataattttgattgttaagagatcaaggtaggtgaaaagagagtggtgcaagaagtaatatttaaatcaaaaaatttagaagaaaagttcagaatatttgattatatatattattttcacaaaataatttactttttaatctctacatatatataattatatatatatataattatttatttatctcgtaatttagtcaaatttcatatgcaatcaccaaaatttcacctaatgtgtattcaaattttgaatacaatatctactttaaatggcatatttaccgcagttaaaaacttaaaaacaatcattcaatgcatatggtagtataatatctgatgatcttatcttgcagtttagtcaaataatagcggtaagagatgatagtatgtgaaaagataatggtgcaagaaataatattattttttaacaaaaacaattttatgcgtaatctctacatatgcataattatacaattatagttgatgtagtttaaaaactacaaaacaacaacgtccattaagcagttatgagtttcgatgttaggtataaatatctttatcttataacaatatatgatagagtgtaacgtttacaaagcagacaagatagaaggaa

SEQ ID NO: 59 - DNA, 85372 bp, Arabidopsis thaliana
aagcttcctcagccttctatctacaaacccacccaactttagacccgtcgtcacccatctccttgcagataaacacctcaagctcgcccttctcgtgcgggcgagaacctcagtcttggaatcttcatactatagaaaatgataaagatttggccctacaatattttttttcttcacgcaaaattcatggtgtttgctaatgtcagttactttagaaaaatgatgctatctttaacctaagatgtccggggaaaaaaaatgaatagtacaatatgtaatggatctaataagctaggccaatgatgcatgttgtgcccgcagtatttcgatgcaaggaaattggatccttcaatagatatcatgcatgaacaggctaggtacacatgaatgtattctatgttcacaaaacattaatttaactggtataaattatacatgccttgaatttcagcaaggaactaccagaacaattttctcaccataacattgtaagagaactgtaaattagtattttaactagaaacaaattagtaacctttatcatctttttaccatgcaaatcacgggtatcgtccaattatacactgtttattacaactaaattttgcaagaaacacaaataaaaattaataggtagaatgtaaatacatagaaaaaatgtagccataaaatttagaacttgggaaattgaactcgagagtcgcatcgaccatgcggcataacaggacagttgatgaatttggaggccgaagtgtcaacacataaataaatctgatagagttggctattatgtgacgaatctttgttacattcaatgcccggagcaaacccaactacttgtttgatcgtattctcaatatctttcatttcataaaatttatcatccggtttgatccctacatcatgcaacacaaaatataataagaaaagaacatccacttatacataactaacaatggagatcaaaatgaagggcaaaacaagtgaatattgtaccagcattggtaagggcatgaaggagattagctttctgtttgagcttgagaccagcttcgaagtaatcgtgttggtcaagctcggactcagcgcacgtaccgtgtttctcccactcatgtgtccaaaacttcataccatcattgctcggacacgacaacgttggccattctctttgtaaatcgctcatcagatcagaaacctttataaaagttttcgattctcattagttatttacgattcttttcttgtggttaataatttccgaagtcccaaaatacaaaaactattgtgttataagttaaaaacaaacccgtaaatcatcaaatcgactgtcaggattacaattttgcggccatccaccggttttgtagttaggccaaagaccgtgaattccaaaatctgcagctggtttaccggtttgtggatagcaacaactatgtcttgaatcacaatacgctccaggccactgcattgcaacgcacatacacaaacataaaatttcaaagtacaatgataattcttgtagagacatttatcgactttaattacctgtaaaacgaagtagaagaaatcgaaatcttgggcgaaactttgtacgtagagttgttgtaacgctagaataaaaatgaagaatttcatttcctcaagatatcaaataatttgtgggaatcaaatttgtcgaaaaccaatgaaggatggatgatagataaatagtttagaatatgtttatataagtcatataacgtgaagtgtgatattttgttttgggtagagagacgtgacgtgtgattggtatatgtttgcttaattgtgttaggttagtatttcgtgcaagcattttattttcagctccaatgctttaaaaagtaataacgtaaggcaaacttttcatcatgcttcaactacaaaattatgagtattttgtagctccaattaacgtaacgtaaggcaaactttccagctccaatgttttagagctagccgaatattatgtgtctcagtatttataaaattatgagtattcgattggaaaaataaataaagaaactcttatagtattcacttaaagacctttgtttcttaaattttaaatatttaaatccacttaaagatccttgtttctcataaagtgttaaagacccataaaggcataaatcaaaccattgtcccgtctcggaaacgtacgtcaagtttcttgatgaggcgcatgttggctacttggttctacttctacagttacagactccagtgtgtaccgtattctatcaagttctgcatttatgcaagaaccttaggtatcacaaatatttgggggcaataaaattataaaaattccttacagtgcagcgatttatgtcacattttcagccaagaggttgtgtgttcgagttccctcaactacttctgctaatttttttattaaaaaaaaaaaactttagaccgcccataactttgagccggcaatgatcctacctcacaatcatactaaaatctaccaatgatccttaccatgttttggcgcttgaggtggatacgaataatccactagttgggttaaccttatagggaaggtgaagattgttataaagtttgtagattatacaatgaaaagtaagaagataggtccaagtcaaagtttgtatgattaaaacaagaaagatggtatataccatgcgttgctttccagaaaatggcttcaagaaagcaaagacaaagaatatcatcatgagcttgaccagggataaggaagaagatccattgacgtgtttacaacgacaaaaactagttagaagttagaacatagtgtcgctgaagttgtggaggaaatgcattttttaaacagatgcatagagacgattgaatatggcatcgaaacagtgaatgcaagcaacaaaggttggtaaactggtgaagagaaaggtaacagacgatataactttttttgtgaatgaattaaaagggatttttttttttcgtcaagaagctgaaatttcattaaaccgaaacttaaaccgatacataagttggtacaataagtgcataatttaatgcagattttgcatatgcatatgcacaaccgtttttttctctaaaaatgaagtgaaaagaaatttgatcgaaattaaacgaaagagcaagaacatcttggaaaatcacgtagagattctttgggaaggattctgagttgatagctttgatcagcgtttgcaaatctgaagcgaaggtgacttcctaaaaccgagttctaaggcattttgttgggctagatgaagcgccatggcttctgccaaaagaggagaagcaacattcgccactctaagggattcaaagcctctttatgaaatagaagttgacatatttttagttcaattaaatgaaatgaccgacgtgccaatttgtcatatccacataagtataaaagctaactaaacctccaatgtcaaaaaaaaaaaaataactggcttcgactagggatcgatccttggacttcgatatttcacaattctttgtaaccaatataccaaaggacgagaatgtgacaaccgcgactttaatttaataaatacgttatagtttggaaaccaccagcagagacggagagtccacttttatttcttccgctccgtttggtctgtcctcttcttcttctccaccttcgaaatctatcttctccgatacctctctatctatatctcttcgacgctgcaaattagccttaagcttctttctcctttaaacttttcgattattattccatttcctatctttttgtttcccccaaatcttttcacggaagcaaagaatacaattccaaaccctaatcccgatcatccgtctttcctctccggtcagtcttccgatttcctcgatccacctgattttcattatgattatacatatatactttcttctcgctcgtcaattttttcgttgctgtgtgaatttagattgatttgttttggattcaggtttcaaaatatgagtaatcagaagaagaggaattttcagatagaggcgtttaagcatcgagtcgttgtggatcccaaatacgctgataaaacttggcagattcttgagcgtgcgatccatcagatttacaatcaagatgctagcggtctcagtttcgaagaactttacaggtcaatttctttcattctcttgcctttctttgaatcctgtagaaactggtaatgtttctggaacttagctaggtttcgtgttaatggaattatttgtgtatattgtggctcagaaatgcgtacaacatggtcctgcacaagtttggtgagaagctatatactgggtttattgctactatgacttctcatctcaaagaaaaatccaagcttatcgaggcagctcagggagggtcgtttctagaagagcttaataagaaatggaatgagcacaacaaagcgttagagatgattcgagacattctcatgtatatggataggacttatattgagagcaccaaaaagactcatgttcatccgatggggcttaacttgtggagggataatgttgtgcatttcactaagatacatacaaggcttctaaacactcttcttgatctagtgcagaaggaacggataggtgaagttattgatagggggttgatgaggaatgtcattaagatgtttatggatttgggtgaatctgtgtatcaggaggattttgagaagccgtttttggatgcgtcttctgagttttataaggttgagtctcaggagtttattgaatcttgtgattgtggggactatctgaagaaatcagagaaacgccttactgaagagatagagagggtagcgcactacttagatgccaagagcgaagagaagattactagtgtggttgagaaagagatgattgccaaccacatgcagagactggttcacatggagaactcaggtctggttaatatgcttctgaatgacaagtatgaggatttgggtagaatgtacaacttgtttcgcagggttactaatggtcttgttactgtcagagacgttatgacttcgcatcttagggagatgggaaaacaactggttactgatccggaaaagtcaaaggatccggtggaatttgtacaacgtctattggatgagcgggataaatatgacaaaatcatcaacaccgcatttggcaatgataaaacctttcagaatgccctgaattcttcattcgagtatttcatcaacttgaatgctcgttctcctgagtttatctccctgtttgttgatgacaagctacggaaaggacttaagggtatcaccgatgtggatgttgaggttatccttgataaagtgatgatgctgttccgttatttacaagagaaagatgtctttgagaagtactacaagcagcatttggctaaaaggcttctctcaggcaaaactgtgtcagatgacgcagaaaggagtttaatagtgaaactaaagacagaatgtggctatcagttcacttcaaaattggaaggcatgttcactgacatgaagacttcagaggacacaatgcgtgggttttatggcagtcaccccgagctttcagaaggacctacacttattgttcaggtacttacaactggttcttggccaacacagcctgcagtaccttgtaatctcccagctgaagtttcagttctctgtgagaagttccgttcttactaccttgggacacataccggtagaagattgtcctggcaaacaaacatgggcacagcagatatcaaagccatctttggaaagggtcagaaacatgaactgaacgtgtcgactttccagatgtgtgttctcatgttgttcaacaattctgatcgactcagctacaaagagatcgaacaggctacagaaatcccggcagcagatcttaaacgctgtttgcagtcgctagcttgtgtaaagggcaaaaacgtgataaagaaagaacccatgagcaaagacataggagaggaggatttgttcgttgtgaacgacaagttcactagcaagttttacaaagtgaagatcggaactgtggttgcccaaaaggaaacagaaccggagaagcaagagacgagacagagagtggaggaagacagaaaacctcagattgaagcagccatcgtaaggatcatgaagtccaggaaaatactagaccacaacaacataatcgccgaggtgacgaaacagttgcagccacggttcctagctaatcccacggagataaagaagagaatcgagtcgctcattgaacgagatttcttggaaagggatagtacagaccggaaactttaccgctatctagcctaaataagttgaataccacaacccaaaaaaaaaaggctttactctgtttctttctttgctttatttccttatgtttgatgtaaaatcttttgaactgtacggtagtcggtaagaacgaaccaacacagcgtcactaccggtttaatcgaatatacatttgtttccttttcttttgtctttcatcagataccgtatgtgatttcagcttctggacacgttgggccggctcgaggccttttaaggcccattttaaacggttaagagccaaaaaaaacattcgcggctaaaatttcaaccaggcgtaaaaaaatcccgccaaacgttggcaacgctttgtttatagcgttttcatagcctaatcggttccattgacatttctaggggaaaaaatctctcacagtgtctgactttggttctttgtcttgtaacaatcgccggaaaattaaggatatggatatctccgacataggtaggaaacttagtctcgataacaacaagcttttaatcagaaaagctgcagagatccgccgtctttgcgatgctcagttcgattcatccatcatcggcgttgtaagataaatccgattctgaatcccaaagtttcacatcgagtactttgattataatttttccttatgtgttgagaatttgatttttctatcagggtgagatctgtaaagctgtgatttgtctagaaatcgccgccactaggtaaataattatcgtaattgatttataacgatttcaatatccatagtgggttacttattgcagtatcttacttaacttgattcgaaatctattggttaggttgcagattatattcgataggcaagcagcggttaaattgagtggtatgtcggaaaaggcttattctagatcattcaatagtctccaaaacgttattgggatcaagtgagtttccttttcaagtccttcttctttacttgtttaatgaatctgttggttgttggagttaatcatgattgatgtgtgattaattgtgcattttcaggattaagcttaatgtaagagaattggcggttcaatttggctgtgttagggtaatcaaatccgtgcaaaatgtgttatcctcgtaagccctcttctattgtgtactttgaagatttgcataccatatgtttgttaaaatgccttaaagtcttgtttgtttcggtgtttgttgctctttaggtataaggagaggtttcttgcgtcactaccagcgtcgagacgggctaatgctgattttactagacctgtatttacagctgctgctttctatttgtgtgctaagaagcagaaggtaatactttaactctctttcctttttcagggatgtatgcttgacgtttctgagtttttggatttgttattattttgcagcttaaggtagataagcttaggttgattgaggtttgtggtacatcagagtctgaattctcttgtgtaagtgactttgttgtttcattcagagaatgatttatataatatgtgactagatatccaaagtactgactaggaactacaaacaggtctcgacctccatgacagatctttgttttgactgtgttgggatctctaaggaaaagaaagatgcaaaagacgttaaaggaaacagaggtatggttattcagttctctctcgacaaagtcattcttcttgtcttatattaactactagtctatacatatgtcctgctttagttcaattcaatgaaggcttatcttcaattcaataagtgattatgggcaaaaatttcctcagacttgcttgatgtgttacctggaaagaggagactagaggatggtggatattcatctggtgatgaggtactttcatggcaaccgacctcttcccatctgtttagaatcattctttgtgatttatcaaatgtacatacgtctcaaacttgtgactatttctgattcacactacatgtgatttgcttcttcagtcttcatgttacaaaagacacaagaagatggaggaggctaagtatgaggactggaaatctacagtcgttaattcgattaagaagaatccagagaaaggtactcaaacttttgtaaattgatttgatcaccaaaagaaatgattcatttgtatgttttctctgttgctgatgtttctggatcttgtgttttcttttcaggaactaagagagttatacaggccagtctcaatttcccaaagaaatctgagaccaaagagttgcaagttgattcataacattacacacattcagagactcagatcctgttattgttgttttcatcacatttaatgtgtaaatgacaattcttgataagaattttttttttccccaaaccattttctatagatttttatgcaaataatggacacataaatgtctactagataaactatgatcaattgaataaactacatggtatttcgtatacctagtggtaagcaattaagcatcggttacgttcggtttattggtcttcgacacatctcttctccacactagtggtaagcataaacatactcgtcgatttaaacaatctgagtttgtaagagaagaagaaacagagttggctagtgcaaaaactattaagttgagaattcaatggtacaccacaaagttccaagcttttggattgggaaacaaaaataaactataacatcaataaatagatacttcaaaaagtgtttaaagacaagatttgcagctctctcacattccctaaggacgaaagctctatcatttgatcaaaatgtcaggtcacaccggaaataaagtaacttcagtgagtcgaggtggagttggtgacccaatactgcttcacggcaatcaaaaccttctcaggaactaaaggaccatcctcatgatcgacaagcttcgcatcccatctcattccagcgatgattctcttcaccttgatcaatgtatccacatcatcccggattataaccgctccttctggtcggagaattctatccatctctagaagaatatcatccgcattgcacctaaagagtttcggattcatacattagcaatctcaaaatacctctaaaaaactgttgttatgaatcattacacaaaacagttatacatacttgttcttgtatagactgaagaggtggttcgcgtggatcaggtcatatgttcttggatatgtagagaaagcctcacacctgaaaccatttcagtagacagagagtctctcaaaccagagacaatgagttattgagaagttgtgagaagagggaataatcttttacttaccagtcatggtagataccgatgagtcctcgttcatatacaactccgagtctgttcttttcggcaattgtgggaacaacattcataacccaaagcttttgggattcaagagcagcagcaaatccaccaaaccctgcgttcatgtccatgatgttacggtaccttccagtgtcaagtagactgttgattctcttgtaggctttcacatgttttttccactgtctgttatcgtcttcataggcatcaacagtaacaccagagatcgaaccgctagagatcctgggcggcactgcattgagcctatctgggaaagcctgaagctcaccaccagctacttcatctgagctacttgtctccggatacggtgtaatacatgcctccattttcttgtacctagagaagattcattattagagccatacggtgatgtttctagcaaggaaaaaagaatgaggaatataagaaatgaaacttaccagacatcatcggtatcatcggttttgcagaaattggctctaggatcatcttgtcttgatcggcatgcctcatcattgactctcttctgccaaattgcaatctcaccgtgttcatactttttctcccaacaaagaagtttagcagcttcctcaatctttctttgttcctcttgaaggtcctccttgggacgttgccatgccttgtagttgactttccagttgattggaggaccagacagaatccagtacccaccaggtctaagcacacggtcaacttccatcaagtacatcccatctgttataaaagaaaaacagcattgtaagtaactgatatgtctttagacaaagtgaaagtcaaattgatataagatcagaaaaggttttaaccatttgctccccatggaatcaaacaccgagagcaatgagccatgtcgaaagcacgtgttgggtatggcaactttatggtaccaagaacaccaataacagcgggaacacctctctcgagagcaaactggacctgagcctcgtgtgaatctcttggtgcaaaagacattgcacgcacatttctgctccataagtacgctccccaacttgcaacctaacaaaacgtctcaatttagttccaccatgtaagtattgtagtttcaataagaaagtcaagaaagtataaaacattaccccacaaccagtgtccaaagcagtcctaacagttccgttctccataggtatcacggaagcaagctgatcgatatacttatcagcaccttgagggaactgagttccaccaccagggaatctaaaaacgtctccctcatactgaatccaattctgaatagccttctcaacagtcaatgctttatacggcgcattagcataaggcacatagtctcgactcttaggccaagagaaaggtgtcacatatcctttaggagccggtataagacaatggagcttctcattctcaggagcgcaatgcctttctcggtaaatcatactatctctcgggaaagtcatggcacgtctctgatcttgacaaggagtgtaatccgtgtaacgaccatcacagggctcgaaagccttgacctttgcagcttcagaagcaccaacaagacttgattcgccagcgtgatgagtctcgaaattcaagctaggaacaatgttgcaatcagctccactgttggtcatctcaagagcaatactgtctcctttaccaaaaccacttcgttgccatgctcccaaaatgtaaaagaagcaacataaactaaacacaatgaagatctgaacagagcttctggttttaccatcagcagaactagacttcaacgccattattgatctaacaaaacacagatcagctccaaatcagatcaagaggcaaaaaaaagagagtgaagctttagatttgaataagtagatagagacataacaacaacaacaacaacagttcaaaaacaagacaaatatactaaagagacaaaagagaatctcaaatctgttatattattaaaactagaacagagacattcataaaaataaaaactttgtcttgaaagagaagcaataaatcaaatcttccgtaagaataacgaaagagatctaataaaacaagctacaacaaaacactagtctttaactactacaacgtcattagttattaacagattgagaaacaaaacagatttttaaaagtaagcccgatctgacaaaacagagatagattggtcggaaagaaggaacatacagagataatgaaggaatctgggagatctagtggtacaattggttgatgagagaagtaataatacccaaactccgagagattgttgtcggtgggaaaaatgatgatgacggagaaaggaaggaaggaatagaggatacgtgtaagatgatttgtgggggaaccctagtttatgcgtgaatcgtcgtcaccatctagccatgggatgtgaaaaagagagagataaagctggcgattttttgttattgaaggagaaatctctctaatttgccctttttaaaacagagccattgagattgagagagagagaagaggagatgaaactttgtagattcaatcgacgtctgatattttcgtatttttatttttttctttaacctaaaatcggcggaaaaattataaaattaataaaagctaagaaaaatttgataaaataaataaaaaataaaaaggaaaaaaataaagaaaatgaaaagctgatagcttgaaaaaaaaaatacaaaaaagtgatttcttactgtaattcagtacaattatattgtttcacactctaaccagaaaaaatatattgtttcacactgtttataaccagaaaccagaatgaataagtttatgcataattgggaaaaaaaaatagagaattgagagagtttattagaagttaagtttcgcgtggaggctttacaaaattaaagtttttgatacaaaaaaataaatttgattaaactataaattggtacttccagtagggaagaacatacctctgaacatggggacccatcaattgtagaaaagcatatgttgcaaaaaccgcgtagtaattaatcctacggactacggcccctgatgattactagttggatccaacggctgtaaatgtatcttaagattggtcttgctctgtggaattaataatttgggttttttttttttctttgtcatccgaaaattaattaggactcaaacgagtcaatcctgaagaatgttgtttacaaatgtaatatgaagcggttgggtacgaacttttcgtgccaaaaaatctgctttaacattagtactacgagagattaaagatagagaaaagtttgtgaactcatccttatcgctctgtaactcctccaaatacgatgagaaagctggtcattcggttggggaagacaccatctccaccagatctgaacagtctgtaagaaaaactacatcttggttgtcggcaccaatcatacacttcatcgcccagaggaaagcttccagctcggcatgtaaaggagataaacttcttctgagattggcagctcccaaagttgatgtctctccagttgatgatgtacagtaccatcctaagcctgaaaacttgtcggtatctttccaagatccatctacaaaacaacgatatccagaataattgttgtctaaagaaaaatgccgcactcgattacgatcttccaaattgaaagaaccaaaattttcgttgtgaagctcaagttgagcggacttccacaagtctgactctttttccgccaaatgtaagatctctagaggatctttatccacattatcaaagatttttttattccctgctttccaaatataccaaattatctatggaaatgaagatgaatcaaattctaaaggtatgcgccaaaataaatgatccaaatttgcatatatagatgcataaggaaatttttctgggaccgtaggtatctgtgaaagtgcccaaatctgacgagcaggatggcataagaaaagcgtgtggttaatggtttcttctagagcaccacatctgctacatcctatctcacagtttattccgcgttttcgtagattgtccgttattggtacacatcccgctaaaatttgccacaagaagtgatataacttgggcggacactgtactttccatgagaatgcttttaagactttgatgtctgggtcaaaaaaaaaaaaagttagcatccaaagtttttaacctccttagtatgatgtctgggttctttatttcttttttagtttccttagtatgatttaatgttaattaatgaataatatgttttttaggatgagcagtaattttttttagttgattttctagaaaaagcacacaaaataaaagaaaaaaattaaaattgatcataaatgtattagtttttgtgatttctgtttttctattattctaaaccagtgatattcaattatttattttaaaatttaaaatttattcataataactaataaatagtgcataaaaaactaaaaattaatctttttgaaacaattttgttttttttaaaagatcaagtaataaagaacatcttagagacacgtagcaatgaaatttaaatttacaaaataaaataaaaatttttgaggtaattccgatatttgtatttctcatatgtgtattcaaaatcaactttgaacaattttgtaattttgatcatccttttttttttaatcatttttgtatcaaaatatgttagtatatctcgtatttagaacttctatgacatgattcaacgtttgtttatatgaagttaaataaattaatggtcattaataagtttttctgaaactgatgtatttaggcttgattaatgattagtttctagtttctatgaactcatgtgaactaatgcacacccatcgatctaactagtcaattgagggacttatggatcttctatgaactgatgtttttagctatgtttttatgaacggacgtatttatgcttctttttatttctcaaacaattaatgggatacgtggatctcaattagacatttatgttttcgtttctcgtattcaatgttcaattatgtttgactcccaatagtaaataaatagtcttcaagttggttagacccaccatatcttcttgctgagtacaccaccgactgcaaagtattgtggattttatggttgagtgtcccaaattttcataagaccccattaatttaaaaccaaaactatatataggccactcatacctcactcccttgtaagaaacatacttatcaatcaataactcattttaaaaaatatggatttatgtttattaattagtatcatgagcgatttaagttcaaatttagacccaattcataagatggaggaaagggtcagaattccatataaaaaaaaacacaacgtaaatgaatattgtgagattgatatcggggagctgaataattatgttcaatcgaaatctgatttgggtcatcaagtgacatgacatgttattatcatgttttggttttctagtcaatatacattcgtacaaaaagttgtttagtctaagcttacaatgtctgatgaatttgtttttattactccttctatttcatattatatcggaaagttaaagaatcgtcgacatctattcatatacttttaaaccttttgagtttcaccaaaactcacttcatatttgccaaggttatcaagatatgttataagctctcttgtttttggatagcctattggttaggaaatattcatcacacccatcgtgttttacttttaccaatggatggctaatgattatgagcaataataatagaagcactctattctgttttttgttaaaaaaaaagttttgtactagattttcaaatgtcagactctaagcgaaaactaatttccataattagttggccgacctacatttacaaattattagcaaagataatttttttttttaaaagtacaataataacatatttcttttgtcggccaagtagtaactctttgaagactgtaagtgtaaacaatgaagttgtcgtttagaaagcactaaagcagctttgagaaattaccaaaaataaaaacgatgtcaagtcgtcaataatatttattgattggcccatattgctgattaaccaagtcaaggcccaatataggtcttgaaaactcacacaccttctaggtccaagatattaaacacgtacgatatgactatcatgaaaaaaaattacgcatccacattggttttcttagtaagtgaatgtctaaaacgatggataaatgaatattaattgatacttttcttgtaactcaatatcttaagactttaatctaaatctagcactcatttgttcaataatgttcaagcttatagtctggtagaaatagaattacgataagtattgtttaaacaataagtaattagtgcaccagtaaactaattagtgaaccagtaaattagacaaatatggtttaaacaataagtaacaagggaaaagagtttggtcaaagataaaaaattcgaaggtgagggacatgattaactgtggtgaggagggttaattatcttcacgaagacagaggtatggatgcttgggcttgaagactttgaagctttgactaatggtatttttcacatttacttattatgtactgtgaagaaataaacaacaatatgcatagtcatatagaaagaaaaagaggctcaaatatcaagtgcacacgcttgggaagtaaaaaccaaaaagagtcaaaactagaagagagacaaaatgggtataaaccgaggaaacttggctttttggaatttcattgggtttgacgtatcccctagctatgcctttagacttttgcctatagtgcgatctggttttgaagtcggtaccaaaaattaaactcaggtgacgctggaccatcaaactacattctatttttccagttttccacatgttaatttttttttaaagtatttttacgtcaattgacttgttgatgcccgataaaaaacctattatgaataaataaaatagcatatgatagtttcgactttcgacctattattcaaaattttgagaatgtgacgctgcgtatattttaaaattagactacagtatataagatttcataaaaatgaagtattgaaattatatgcatttcacataaaaaattttttttttgctatttaaaccgcacaacgatgaaagtttacgtttaaaaattacatgttaattaaacactagttcacatataaatttttaatcgctatctaaactgttaggaagtttagttttgaaacgtgaacgttaaacaacagattatgatacacttttcaaaaggcctttaacgttccaaaatgattgtgatgctgctgaataaaggatgatgtctcatgtactaagaatttcgatgtagatggaacgatgcaacaacattagttatccagtacagattcactagaaaacacttaaaaagtgacttgaatttactacttttaagtcttaattaaacgagttaacatatacagcacttaactaaatatcgagtaagtttttattctatctatgattgcaaataaaaaaacgaatgtatttttcataaacttcacatcatacggacacacataaaatgaagtatatatatatacgatttcaaaatattgaaaaagaacaatatatccttcatcaaactcattctctttattgcactatctattttcttaacaatacattcactaagaaacccatatataaagattgttttttggattttgtaatatcgaaatgtataagtccgatccatgtcattctacttaggtaatcaacatcaatttcaaataattctatttgccttgtcaactagcatgactttcgaaaaccgataaatttacaatttgacgctgtagtaaataattagttgatcaaattgacggtacttgtacatacacaaaaatgattaaagaaaagattttggatagatatttaaaacttcaactagattttactaaaagcaagaaaacgttgtgaaattctatactttggtattcggtatttaaaaaacccacaaaaatgacaagaaagtcgagtaaatttgacttttgccttataaatgctacacgcatccttcttgtcaatgttcatagttttagattattactgatgtagttaaccacaaactggataatattataacatattttcacctactactgtacttcagaactcagattactcttacagcctttttcgaatttaatttttactacgaactatggggatttgtttatcgttccttgaagatgaactgatatcgagacagcacgcatataaatattgatttccctatacatgtaccgcgtgtggttacttcaaccacaaaatgttgaccactagacgaattaagctctagtcaggtagcaattttgatttagtaaagtgattgtttacttaccaaaaaagtgattgtttggtttgactatgcgagtggagtcagagaattagtacttacaagttacatcttagtgctaatattagtagatgtagatcttaggattagtgtaaacttagtatcatcaaattaaatctactttatcattcttttagttatatatgtagatgatagtaatatgattaagttataaatgagtcactttcttattgcaattttactagatattcacaaaatattagctatgtaaactttctatctctgctttggctctctaaaccgttttagttatgaaagcggtttagataaaaagaaattctttatttgaacaagtacaaaatatgtatctcgaagtcgaacaaaaccatatttatttcatcttgcatctgactcgtttgattggtgtttgaacgaaatagataaaaaccttgctattttgttctttttgataatttgatgaaaccttgttacgtacggaatatgttgtttgtatgtactgcaaagcataagaatattcgtggagatgcctagttatttttctctgtaattcatacatttaagtcgtcaaaataaacatgaaggatatagattcattgaatttttaacgaatgaaaaatttattccatcaaaaactgtgtttacattatatgcagcctttttaagagagtttttgaaaagcattgaaacgtaaattgaaattgagcaacttctaaacaaatcttatcctctagatccaaacaaaatccgaagaacatcgtcgtgcttggatgaaccgttacttgaaaaatcattaatcatagctgatatcggacggatcgttcaatgaaagtgatgatctgcttgaccatgtttgtatcattgtatgctagccgcgttcgacgacggcaactttttttttctcaaaaaaagaaagatgattgtgtgtaaaattaaaggcaggcagaaaaatctcgtaagcataattataacgttaatgttgtaccaaagtgacgaaaattgatttgatttgactttttttttaaaaaaaatatttgattatatttacttgttttttttttttttttggggcaaaagattatatttacttgtttagtatgcatatttatgagtgttttgtggctttgggaatactatgcggctgagaggttaagatatggaagcaaggctacatgatatcatgaaaaatctactacttttgtgttggttgtataaacattataaatttatgatcatggatatgtaatcatttttgtagaagctacatgatattggtatattggctaaattatgggatggcacatagttgaagcttagattcaattaaaacttaacctcaatatactgatttcaagtaatttggtctcacgaacatagagatatcccctccattaccccccaaattggctgcccaagcggcagtatatcacatatggagacagcggaatcatctccttcacaatggcatctcaattccgcctccaattgttttcaagaacatcaatagcgaagtgagaaacaccattactgctagaacgcccccgtaaagtctttcgtgccttaattgctctttggatccgttaatgggttgattgatactcaactcttctttgtattattatttttcttgacaaagtttacatttgtaggttcagctttttgtaaaacttcaacacttcattctaatgatgtttacattcttataataataaaaacatagagatgtcatatttatttctatttatttatgtactatattacgacgaagtttgaacttgtgagaagttagaaaagaagttattactttctgaatcaacatttaaaaaataatagatgaacttaaatagtaaattgtacgtaaaagtcgaactccatcagctaatttctttaagtcttaccacaaaagactaatatgagtcaaacttgagacttgttcgttggaacgctgaagttaccaaaaaggtcagagtgaacaaaatcttttcaggcatttagtcagactgagatccaaactaagtggtgaaatggtaaattacactaatgtcattgccctccattggccattaaagccttctattttctgacattggtcagtgggaatagaaactgtgaagaagaatggaatagaagaaactcggattctgagaatccatttaaatttttttagtttaatcctaattagaaacctgaaagcaattgattagtgaatttaatttcgaatcttttgtagttgcagctggcctcgatcggcccttgtatccttttattaattaaagacttcaaaccaaagcgacaaaattaaagcggttcttaattggtctttaataatttttcatctcgtcctccatatatacgattatacacatacactgttcacacaaaaatacatacgtagatttcatgcacgtcaatgtgtatctatgttcgttgttcaccatatgtcacgatacacacatgtgcacgtgtgtatatatgcgtacacgatatgatgatagtgcatttttgtatcatatgcgctgattctagaagtaatggcaatgcttcattagtaattaagtatcgataacatactaaagtatcgatatgtacatatattttttttcatgataagaagaaatacgaaaggcctcaggcctgagatatagtatatagtacgttattgtcttattgattatattttttcttgatcttgtcctcgtgtttataacctttccttcagctccagttttgaatattgtttaataagtaaaaccaaagatagctttcaaacaaactttcttgggaaattaattcaaaaataaaatgaaattttaaaaactcagctgaaatggcggctgatccttcgggttcagacccctggcaaggaagcatatattgatttcaacttaagctaaaccacttcacttacttcacttcctcttctctaccaaactcactctagctagttccacttagggttcctctcttccaactcttttttgtttttagggttttagagaaatgggagatagaaacaacgacggtgatcagaaaatggaggatgtattgttgcccggatttaggtttcatccaaccgacgaagagctcgtaagcttctacctgaagcggaaggttcaacacaaccctctctccattgagctcataagacaactcgatatctacaaatatgacccctgggatcttccaagtatatatgactttcatacttttgtatatcatattataaggtttaatataagaaaataaagtctaaacaagtttttttgtttttttgttgttgttaaaatatcgtagagtttgcgatgacgggtgaaaaagaatggtacttttattgtccaagggacaggaagtataggaacagctcgaggccaaaccgagtgaccggagctggtttttggaaagccacgggaacggaccggccgatatactcgtcagaaggaaacaaatgcataggtttaaagaagtccttagtgttctacaaaggaagagcagcgaaaggagttaagactgattggatgatgcatgagtttcgtttgccttctctctccgaaccatctcctccttctaagagattcttcgactctcctgtctctcccaacgtaagctcatattctctcagtaattttttcttaggtattgtttattaacaaagaaaataggattggaagttatccggatcggacgacaagttaagctattattagttattaagatcgcaagatttggttagaagtttttgaagagtaaatacatatctcgaacatggtgcatttttgtgttgtaaagtagtgagtttgaacgagttaaatgagaaatttattgatttaattgttttgtatatctatctttaggtctgagaaagcaaaataaagtcttaagtttttggtagaagacatatttgacaaatattaaatgcgagagattttaatatatgtattttaggtactccttttatgtttctttgatattaagtttaaatcttaaattattgtgtgtgtgtgtgtttttttctttttgtactactaatctttcttttaataagtatgtttattcaaacaatttctcaaaagtaaaatataaaataattaaataaacaaagtgcaaatattattttgaaattagtggacttctattttctataaattaaactcatttgttattaacattttgaatgatatggaccactgcaggattcatgggctatatgcagaatcttcaaaaagaccaacacaacgaccctaagagctctctctcactcttttgtttcctcgttaccaccagaaacaagcaccgacacaatgtctaaccaaaagcaatcaaacacataccatttttcttcagacaagatcctcaaacctagctctcacttccagtttcaccatgagaatatgaacactcccaaaactagtaatagtacaactccatccgttcccactataagtcccttctcttacttggatttcacttcatacgacaaacccaccaacgttttcaatccggtttcatgtttagaccaacaatacctcacaaatctctttcttgccacacaagaaacacaacctcagtttcccaggctcccctcgtcaaatgaaatcccatcgtttctgctaaacacgtcttcagattcgaccttcttgggagaattcacgagccatatcgacctcagcgcagtgttggcccaagagcaatgtcccccgcttgtaagcctaccacaggagtatcaagagacgggattcgaaggaaatggtataatgaagaacatgcgtggttccaatgaagatcatcttggtgatcattgcgacacacttcggtttgatgatttcacttcaacaattaatgagaaccatcgtcatcatcaagacctgaaacagaacatgacattgctggagagttattattcttctttatcgtccatcaatagcgatttgccagcttgtttctccagtacaacctgatgtatgtggatagattttcccatctctgccttcttggcttgcttttttcaagctagggtatttcctctttgtaggctttctctttcactaaattaaatcgtttattaattatgcttccttgagtttttatttttcacaagcaactttgctttaatgaagaaggcatgaggtaagtcaagatgaacaagagaaaaactgaatcgagttttactatattcaaaataaagaccagtaagtatattatttctggagctgacttcattaatcgcatacgagactgtcgttgtagaattcccaaaaattgaagcatagttaagatttaagactcaaaattgctattccatagttgtgtcatgacgctgagaacattaaagtgcaagcttgatttagcctccgagagattcagaaatattatattaaccaagaaggtaatcacaacagcttatgtgatatgcatcaacaatagaacattaaagatgaattcaacaattccaaaactgaagagaagagaattgtcgacaaagttaagaactgataacagaatacaaagcttaaaaattggtcgagtaacatagatgtcctcacatgactgcaccaagtcctatcacttgaacatagccataattccaaaacagagaagaataaaacataaaagcttaagccttgggggctactttctccttagccttttggagtttcaacactttcttcacaatcttttgctcttcgacaaggaatgcccgaatgatcctgtcggaatccaaaaacaacattacgttaaagaacaccaaatttattgtaatagaaagatgactcaagtaagatggacaacaaacctttccctgactgcagaaccagacaagactccaccgtatgctcggtttacagtcctcctgtttcttgataatcttgacctcttgtactcagagggcctcaagtgagggatctgaataaacaaacaaagttattcacataatgcaaaaggaatatgccattgcataatcaaacatatatagttgggaataaactgaaaatttatgccaaaggtggatagcaaatccttatgtaatacaaggaacaacttgaaagacaaagtggcaccgacaatttagcttatgatttatgttatgtactgatgtgggatttatctaatcagcacaagaccgtcaataagcacaatactattaactaagtaacatggtttcttgaaataagaagacatgcccattaaaaatgagactgatcaatactcaaaacattctaaaacactcaatctgattgatttggttatacatagccatcaaattcctaaaaaattcaaactcttaactctatctagacctcaaatcaagactctagatacaagaaccatgtaaaccaaatcacacgaagccaaatcgaaatcagaagacttactccttgaatacgcttgccagtaacaggacatttggggccactagctctcttctttgtggtttgatacaccaatttacctcctgaaatcaacaatcccaacacacattacactatgaagaacagatcggtgattagagaattatgagactaaagcagaggagattgaagatatcaaggaagaagaagaagaagaagaaagggacctggagtcttgacgatacggtgctggttcgatttggtggcgtagctgtgtcgcgaccggtaaacaagacgctgcaccattttcgcctccttttctcttttagggttttcgtttggaacgaagaatataagggtgagactccaaacctaaactaagactacaactatatgggccttttctcattttggtctttaattatgctccagttaaaggcccatgtacaaataattaaaaaaaattcaacttgtaaaaaccaattctattattagctgcaattagaataagtatcgtttgtatgttgtagtgaacagaaactagaaacattattaccaatttttattttgattttttaagaaatcatagatgcattaaattatacgtagaactttaaaaagattaattagtattataatccgtttagtcaaaacacattcaatttattttatcaaatagtgtaacaacaaaaaatttaaattcatggcacgtaaaaacataatcgatacatttacaagggcgtggtgcaagcaattagagcaagccaagtagagaaattaatcaaggttggcggcaaaattgggaattggaaaataaattcatccaaaataacaaatggaaatataaggaccaggctagaaaatttggattttcaacaattttgtttggtttgatgattagatttttaagggaaaaaactaacaattatgtaagaatgagaatcgattgatatattttatgtgtgtctatattgcagttttactttaaaaattgggcaactttaatttagtttctttttttatatgcattaataatatatatatatatatatatatatatttttttttttttttctttgaacaaataataaatatttgtataataattgtttttttttgaaaaaaagctttataatatagactcacttttgtgtcacagccagcgacgagaaaaaagttccattggcgtctagctaggtatccggtatcccacatggccacatctatgggttgcttaagttgttggtcttttttttgggatattatacacgacgatgagcatatatcaactgttccagaaaccgaaagttgtcagataaacgaaactagaatctgtgcttttcctaacgatttgctcttgcagatcttgcatcacgtcccaacaaaagaggcagtcgccacttcaatcttgtctaaacgatggcgttatgtctggccgatggtgcctagactcgaattcaaagaagatgacagcgagagcgtggggtggtttattgaaaagtcattgcaactccataaggcaccgaaactagatagtttggttgtggaactcggtccacattgtcctgttgacgtagatgtcggaaagtgggttgagaacgtagttaatagaggtgtgaaagagttagatttcaatctcctctggaccgcagaacccacaggatttcctaagtgcctttacacatgcaacacgctcgttgatttaagtctatccaacaagattctagtgaacgtttcttcccctgttcgcctaccatctctcttaactctgagtcttcgctttgtggtgtacaaagacgaagaatctcttgttagccttttatcaagctcccctgttctcaactgcctgaaggtggatcgacataaggatgacaacttgacaaaatttaccgtgaaagtatctaccttgaaacagttacattataatactactcggcggaaggatggggtagaggatgaggaagacgtggtagaggaaaatgaggtagaggatgatgatgatgtagatgaggtagaggatgatgaggaaggtgtggttgaggaagttgacgtaggtgaggtagaggaggatgatgatgatgatctcaatagatccttggtaatagattcccctgcattagaaattttacgcttacgtaacgttttggactattgcttgatagagaatatttcttgccttcatatagcaaaactcggctatgttcataaccccgatcacaagtttctgagatctctttcttctgtcatacatatgtacttgtatttgaccaagccaatggtaccgattacatatctccgatcctcttcttttccttgttgcttagccaactaatgttatatttttttttaatcacaggttgcgtggtgtaacaccatcaagttctctcggctcttggagttttattttgttccaagcaatttggtagattggttggaaccacttatgtatttgcttcaaaattctcctaaactacaaattcttacgattgacactgtaagtataccatcctcctccccttaaacacaagtgcatctagtttatagatgaacttaacattatagcaaatgtattgatatcaggattctacgtgtctcccaccttcatggaaccagccgagttcttctactattcccgaatgcttgttgtctcatttacagatctttaggtggggaggctatggaggaagagaagatgagaaataactaatgacatacattctcgctaactcaaagtgtttaaagagagtggcgatctttctcttagcaacctgcaatcttgaagagacacaaatggagttagaatctatgcctaggaactcaacatcatctcaacttctaacctcctcccataaaatgaatatgtttaactaggtacgctatcatttcatgatttcattcacttgaactattaggttatgagttcaaccaatagagtttcatatatattctttctttcttttttaacagcatcatgacaacaattgagtagccacatactgactgtctaagattatgatccatcatgcccaaagccagcaacaaccatcatgttattaacaattgagtgagcttgttcacgtaagtaggaaacaaaacctagatgattcttttgcagccagaaacaattaacagaaggacaaacagagaagtgcttgggtggtgaaaaggggaaagaatgtttagagcccgtcaaatagatttttcacaatccatcaaaactgtttcattaagatcaattgtctcctttctttatacataagttactgttttaaagcataaagaaagagtaaatacaggggtttaccttattgaacaacattttgctgatatagttttcaacaaaaaggtcagaggtgaatgaacgccagagattgtctactctattctatttcaatggcgctgtatccagcttcttttctccctttattcaactcattatctaatgatttttctgggttccctgcaacagcgtgtgtcccagctagaagaattgcatctgccggatgagtctcacccatttcagccaatctcatcatcacactttcccccaaatctgcattcccgtatactctacaagcagctagcagagcacgccaagccgttgaatcacttgtgatcggtaagttccttattaactcatacgcttcctctaactgccccgctcgacctaaaagatcaaccacacaaccataatgttcaactttgggcgtgaagctgtaagcctcaaccatcctcttaaagcatctgattccttccattaccaaccctccatggctacaagcattcagcacaaccaagaaggtaatctcattgggtctcactttgcagttctcttcctccatcttattgaatagtgttactgcttctcttgctagtccatgagctccataacccgagatcatcgcggtccaggactttacatccttatccttcattctattgaaaatctcaacagctttttcaagcaatcctacttttgcatacatatcaacgagtgcagttccaagtattgcatccaaagctattctttcctcttccaatagatcagcaacagtacgtcctacgaatgctgcttcactgtacgcacaggaagacaacagcccaacaaatgtagatgaattcggtttcattttttcatacttcatctgcctcagtagccatacacactcttcaaggagacccgttttggcatattggtctatcatacagttccatgtaacaacatcctttcgaatggcgcaatcaaagatcctgcgtgctgaactgatacccccagttttgccgtacatccctatcaaagctgtgattaaatgcaagtctaaatcaaggccaatcttgatgcataacacatgagcagattctgctccagacaaatctcctagatcactaatagccgaaagaaagctaagcaacgtactgacattaacgaccacctcactttttctcataatcctaaacaaatccaaagccaacgctttcttagaaacctgaagatacccattcatcaaagtactaaacgtaacagcatcaacactctgcggcatttcgtcgaacactttccgagcatcactaatctttccacaaacacagtaaaaatgtataagagcattcctcaaatcagtaaaaaccataaacccagatctcaaagcaatcccatgcaatccctcaccaattgaaacacacaattcacgagaacatgatttaagagtcgtgataaacgagaatcggtccaaggtcaaacctttagctctcaattggttgaaaacagaaaatgctcgctccggctcatcgctaatcgagtaacctctgatcatagtgttgaacataaagagattagtgttggagacatgctcgaagatcgacgaagcgtatcgaatgtcaagtacagaggaaaaagcaagaagcttgctcactgcgaaatcgtccttgtcgagtcccgttttcaccatgtaaccatgaattcgagaaacttcgacggtgtctctgcaagaccttagatcgttgataagtttctgacattgtggagacaacaacgattcaagattcctacgacggaacacgaaattgcgcctgagccgtgacgtaatcgccaatgtcatcagaaagaaaaaaaagtcgccggaataaacacggatttgttttttaagcttaaaatatcaaattgggctttagttccttaatgggccttattttggtccaaatccagttacgtggcaaagagaattagggctctttgttcttcttatttaaaaaagttacgcctttcttcttcttcttcttcttcttcttcttcttcttcttcatttctaggattcgaaacaacaatcaacgcgatgggacgaagtaagcagattgctaaataatctatttctctgaatgtaatcgatcttctatggatagatagattcgttctctgcatatcgtatttgctagggtctctgtttttcgatctcattggagacgagttttgtcgccggaatcgtaaattagacttgcttaagctcggaatttacatgtggattaggttcgttttgttaggttcagtgtcaaaaatggatttttctaatcactcaagtcgcattattagatttgcttaagctcggaattttacatttggattaggcttttgtttgaattgcgtatcagaaaggattcaacttgttattgaaaatgtataaatgtattcaaatgtgtaggacctgcgagatgttaccgtcaaattaagggaaagccataccctaaatcaagatactgtcgtggtgttcccgatcctaagatcaggatttacgatgttggtatgaagaggaaaggagttgatgagttcccttactgtgttcatttggtttcatgggagaaagagaatgtttcaagtgaagctcttgaagctgctcgtattgcttgtaacaagtacatggtgaagtctgccgggaaagatgcgtttcatctccgtattagagttcatcctttccatgttcttaggatcaataagatgctttcttgtgctggagctgatagacttcagactggtatgagaggtgcttttggcaaagctcttggtacttgtgctagagttgctattggacaggttcttttgtctgtgaggtgcaaagatgctcatggtcatcatgctcaggaggctcttcgtcgtgctaagtttaagttccctggtcgtcaaaagatcattgttagcaggaaatggtatgatttgtgtttgcttttttatgttactttctttttgttttgcaaaaggcttcttgttgatgtttgaagttggaatattatagggggttcaccaagtttaaccgtgctgattacacaaagctaaggcaagagaagaggattgtccctgatggtgtaaatgccaagttcctatcttgccatggtccgttggctaaccgtcagcccggaagtgcgttcttgtcagctggtgcacagtgatgcagatgacttgtcgatgtggagttgatatcctagttttggcagatactcagtttttatttttttgttggtagtgacagttacaaacaattctcttgcggttctgttgttcatggataagttttatgaaagacttgttttgttatctttcatttatgcaaatttggaaatgagcttaatcattgttgtcatttgtgttctagcaccacttgagctcacaccttgaaacccggcattacccattggttcttatagtttacttcagtgttaacaatatcgattatgactactattacgtaaacctgcgtacggtccaagttcaggcccataaacttaaggactgtttctgtaagattcagctattccccattgacacatgaatctaaagcatcgttgctggtgaatccctagcttcaagatgagtacaggtgcgtcactttgctcttccatttctgtttatctatcgattagtctcctacttatctaagattatgagggatctattctggttttattttctgctattgaattttttcgatatcttgagaatttatgtgtttgtgatgcgtttgtgtaaaatcctctgttgcctcatcaaaaaccctatatagaaaattcagtgttcccacaactgttcttccctatccattatttatttaaatgtacttcaacttagattgttaaagaaattctttgcacataatgcaactccaatcattctcttgcaaatacttagatataacttagttaagcggtgttaattattgatggttagactgtaagattgattttggtattaaaaccggtcactgaaatctttgtcgccgactcatagtgtttactttgcttatggcaaggaaacaaagcattggtgttacttagttgtcacacagattatcattggcgtttgttgattcttgtggttaggtggagtgtttggagggaacagaggattgagaccaataccaccagaaaagggtattttacctttggatcatttgcatcaatgtgacacggtattgtttcatccttccttctctccaacctaagcctatctcatggaaatgttttcatgcgagtgttgtgtctttttttgtaggagaagaaaggttatcttaactgtctcaagtctactggtcataagtctgagcaatgtaggcatctttcaaagacgtatctcgagtgtcggatggctaagtcagtccttataagcctcctgtaatgcttttagttatattttggtttctggattcagaataatatcgcgaactagtgactttggattgatgtggttctgtttatcatgcaggaatttgatggcaaagcaagatatgtctgagctgggattcagtggtgaattactgaactggattctactgtggagaaagaaagatgaaagtttgcgattatatattgtgctgatcgattttgtggaacacttacatattgaaatttgaagactatatatttataactccaagattttattgagattagaaaagttagtaatgtttgtgtgtacactatacacaagagaaacttgaaattatcacactccattctccacatttggttcatttctgttaatccaatctattcaaatgttttagagagtctgagattccatttatgaggtctcagactttttctgtttttttgttggtattaaagtagacaaaataaactattttccagcaaatctctttgaaaataatgtaattcaaaattaatatcattctaatgacgtatttagcaagctaaaaagtggagacaaagagaatggaattgcaagagaatggcctatcaaaatatcgagattgtatcattctaatgattgttgttactattttggaattgcaagagaatggcctatcaaaatatctttgcaaatttgttatctccacctttctaaactagcttaaaattgccctcatctacatcaattttgtgaaaaagctatgttcgagtctactttttcgtctcataatatgattttttttatatagacattattatcaggcgacaagttatctttgaaaatctatggtattcatacatcgacaagatttcatatcaggtctttgttgttcatcagatgtaagaaaacaaaaaacaatttgaaaaatcatagactacattgatatggagagtccatgcatttaaatttgtgcctaactgagcaatggccaattaaaagccacttggtcataagttggccaccgcaccaatatgtgaccatttaggcacaaacttgaatgtggatggtcacaaattaaacattttcaaaacattatggccacaacgtgacattttgatggccacggttttgcatgtcacggtagtggctaaattgtaatattcttgtagcgagtagaactaaaagattataatttaggcagatgaatgaagcggacatggcatgatgcctctggttgtcattttgctttttattcaaataaccccgaaaagaaaaaaagaaaatagttgttagcgtactttgtgatgtttaattaggcccaactctaatcaatcaaacataatcacgctgtcttaatcatgactgttatcatcccactagatcttcttttatacacaacaatgtcggggaaaatttttctataattgttcgtgatcagtataaacaacaaaattaatgacattatttactttactcactttacgatattatttcgtggttaccaaatatctgattcgaaattgaaaattttctatgagaatgctaatacttcttatactaagttactatatcttagtatttgaacattatatcaagaataagttttgctttgtttctatttttcaataagtttggattcgttgtatatgatttgaagatgccatgtaaattttgtagctgccaatattacatactgatcttcgactttttatttgttaaccaaactgaatatatatttatattattatttttgtttttaggacaaaactaaactgaataaattaaaaaacgatgttgcctagattctaaacttgtcgacgcaaccattattaacatgatatatgaattagtaaacataagtatttattagatctcctcaagggatatgactaacttaatgaattatcaatgtcacgaacaggtggaacatcgcataagtggaccgaccacttcaataatttagatcgacggtggcactataatattgcgatggtatatgatttgataatggcgtatcatgaccattcaaccactatgcacatgccacctcctaccatggtagaccaacgaatggcccaagcattctggatattttaatatcgaaagcattgggttccagttagctattcgtattttagatttgttagtattattctattataacatgtcatcttttagtacaattataaagatgtggtgacataaaataacgaaaatgcggtacttgtttatactacgattttcattttatttaaagcttattatgtttctattctatatggtttttagtttttactttctgattccaataaatgattctttcgttaattctgcactgtttgtttcatatgttccattcgttcgttttaaccaccttgaaagtttgaatacacttgcttttgttcattctatttattcacaccaattatttcaagtcccactatgtatataaaaactacatgcatagcccattaacaaataaataaagtgtatcggctgctgaaattgagaaagtgagaggtacgtatgtatacaaaaccggtgtacggtgaccatgtgcatacgtacatgcatgtgtctacgttcttgaaattataatgtattgtagcagaaaattatatataattttttaaaaatgtattgcagctgaattaattctatgataattttctgatatatatatatatatatatatatatatatatatatgttgtaaacttttattgtaacaataatgcttttgatgtttaacttctccgatggtctattttttttatgtctttacatatcatgatttttctttttcatgtatcccattcatcgaccttttttcttaactccaactaggaaaggcaaggtaattcctggttgtgactaggctaatatagctcatttcaacatttttcatgactgatttctagattttgttaattaaaatgtgtaaacgataaaaatgagtagggagatattttttataatttaaatttaatagaattagatgaaatcttgaaaatttaccaacaactaaaatattctaccaacttaagatagtaataaattaaaaactccacgttttatacatatgaatatgatggaccttataaccattaattaaaagtagatagatatttaggataagaggatatggatggacctgaaaggctttcaaaaatcattcactccgtcccaagtcccaaccagctattcgttggaccagcaccacgaactcctcttaaatagtgacgtttacatatacaattttatatttcaattttgttatatatcacttagacaagtaaaaagccttagtagaaaggaaacctaaagagaggacttcacgcaatctagttgtcgattcaactaatcttaattttgacgtagctcgaaagagtcgaaggtgacttgggatgaaaaaagacgtaacccatttcaaatgttctagttttatagtatatatatatataaaatttaaaatcaattactaataagggacttatttgagggatgtttataaattttgtcatttggccaaaacaaattcaaaaatactattttcttataaataaaaaaaaaattaaacatgatgattgggtttattaggttcaagtttttttagggtaatagttttcgttatgaaatatgtattttatattaaaaaataatctgaaatctatagtttttacaagtgacaaaatggcaaatttgtaacaataccgtttagacaataatctcaaaatttaaaagcattagattttttttttaagttagtatctctgttcctcattttgtgactgcagtaacatatataatttaactgggtgaaagatcattattgaaaaaaatggcaagcaggccaataaagtaaacttaaaaaaacggaaaaatgaaaagtaaagatttgaagaagtgcttcgaaagaaagagaacaaaaacccacttgcgtaaccctacctcgaaccatgtatgtgttcatctttttttttagttaaaaaaaaaaacgaattttaagtccataatttcttcagagtaattaattggttatattggctataaccatctgtcttttttccaatttgtattatatctcctcgtaaccgtcttttgcctgtagttacgttcttttgttttgtacttgtattatatctcctcataaccgcataatttgtcagaaaatatttgactggtatggtaagcatccgattcaaaaaataatcaaaacgtctgcttcaaaaaaaaaagatcatgtaaacaaataattgaaaccgtcgcgactacaagaaataaaatgtttcataactattcgtaccatttcattaaattctttttcaagaggtagtacgtaaattcttttaaacaagtaatagtgttgcctttttatacaaaacgttaattggcattgggtccctcgaattacatagacgagaggaaaactacaccttaaagcatgataaacacacgtatgaattcaaccaactggaaatttgttttcaaaaacttattaaggtaatgaacttataaatttggatgttcttcgaattctgtgtgtgtaagtgtgtaacaactaaaatagtcccaccaaaaaataggtgaacaatgttcacatatgtaattaactaatgaaaaatagtgaagaggttgcgacttgtgagttgtgattagtttaatgtatggtcaagtgaacaatgagaacccgtctctttccatgtgcaatccatagacgtaaaatgacagtcgtccgattttccctcgtaatctacaagctcgttcttgaaggcaaatcctacggcggatacaacacaaaaatattgccaaatctcaatgacaccaacaacttgttttctttatcttttgtctctccctctgacaatatttaaaaataaataaagatgaaaaaatgtgagcatccttaaaagtttaacctcattgattcgaggcgaaacaaagaaaactcattttcttttaaaaacgcaacatttttaaaaaataggtgctccctttgaagtccactcaatatccctttttagaatctagatattttttggacactcaatcgatattccgaaacttatgtgtatttattatttaattttctttgtttttgaaatattgataaatttattgtatatttttcatattagatacaaatttatctgtaaataaatcatcgccataaattttaaagatttgcctggcatcatgcgttatgtgacaactaacaaccaacaaaggttacatgccgtaggatccattcttttactctgcctatatcagaaattttaaattattgaccaaatattttagatttctttccgtgtaatgcgataatttgaataaagcattcacatgtttcttcctcctgacatgcacgaagcaatttaaaataatactaaatcacattattattttaatactatacaatataaatagctattttgaccaaataatctctctatataatatatatatatatatatatatacatttcactctctatgactctatctcgcttatcaccctcacaatttctctctctaacgtttctaaaacatcctctctctctctctctcataacatggctgaaacatctgatgtatcgccattgaagcgttacagagaacaagaaaccctagtcgaggaagaaacgaacaaacgacaaaagccaacttcgtcatcatcctctgcctcttacaaccaaattctctgtcttctcaacgattcagacgaacaaaaccaacacaacaatgacctaacttccttcataaacgctcttcagcaagaaatatcatcggatgaccaatacgccgtcgtttcagaaacctccaacgtcgaagactcgttttcttcatgtgtttcctcaaaggaagaagaagtggaagatgacagcaaggagaaagtgatgcagcatcttttggaagcttccgatgacgaacttgggatccctaacacagattttggcgagagtaattatgaaaaggctaatgacggttacgtttatggagatagtttgttagatgggtttggtgatgcgttttgggagcttgaagacgaagctgctaattattacacgttgctgcagtctgagctgttcatgtagaaattatcctaatggttgggaaataacttcttttaaaacgtaaatctggaagaataggccaataacaaaacaaaacataaaagattgtgtcttttttttttagtatggaagttcatttcatttttttaaggcacatttcttttgtttttgtggagcttacaaaagatcattttaattgattgagtaatttgtagcaaggcactgatattatttttaatctactctacgtttttgcctcttccggttattgatgcgtataataataataaaaacaatcatgggttttcgttatcaaaatatacatcttgtgaataagaaaaagtgatgtattcgtgaaagtaatgtatattaacgtaacttaagcaaggaataaagttgattgagtcagaatcgtttcttgtgaaaattaaacaaagcgaaataaagaggtttcacgctcgctgcccacgcccagtgcccacactccaacgtttatgtttgccttacgattacgtatacgttttacatgttataatgaaatcataacgtctaatcttatagtcaaattgtatttgtatctagattttgcattatattttcttataatttttttttatgtagacccaaaattttgaaagcaaaagattgtgtttagaacaatctaggttttacaccatcaatttgaagcttttcaaaaaaaaaaaaaaaaaaatgtcgctgttcacgttctatttaattctataacatcaaatcctatgactgattactatatttgttttttttttaaaacaattatcagctggttaagaactttgaggatattgtatagggattattgttcagattgccattttttggccaaatcttttgtttatgccatttttgatatgggcttttggatttgccattttaggcctaatgcaattacgtttttgtccttgtcttcaacctttgtcttccatttcgtttttgcttgttgccggaccacaattatttgccgaccaccaccgtcgggcttcatccacgcatctacttcaactctatcaccaccttcagttttagttctattaacatcatcacttttgtctccgattcatgaaacgtcatcaccataaacaccatttcattcaatgattttgaatgaaaaaacattaaaccctaaggggataatgtctagtaaacccaagggcttcaactataaacattgaattaataaacccaagagctttaattataaacactgaattaatcaaaccttctaaattatcttcaaatcgaaaccaaatttgaaaattataatcatatattcatgaaatctttgagttttttaatttctcctgacaaatcgaaactcaaagataaagagattagtttcaaagctttcgtcctttggtgttgcttaaactggagttgtcatgagatctcgtcatgaaaaaccagatcgagaaattaactttgtggaagaacaattctgaatttttttttgcaacaaaacaagggtaaaattgtcttttccgatgaaataaaaatggctaactcacaaactgtttaaaaaatggcaaattcaacaaatgccatgtgaaaaaatggctttcttgtaattgattctattgtataacatataaaaaacaattaataaaatttaatcgattacgtatcaaaatgaaatgtctaactccaagcctgtttgacaacgtctaccttagctgcaactacttaatacaaaaattgaacccacctttctgatatttcatattctaatgtaacatataacaactaacaacaattttttaaaaaaattgtaaatcttttttcaagatacaaaaatagcacaacgaattttttttataacaatagcataaaaaaaggtaaggattttaaacgtttgaaaagggtcttatcatttatgaaaagtcttaaaatgttcaaaaatctctcataattaattttagtggttttgatttttttttttcttttgtaaatctcttttttgaaacaaactaaaaggattatctttaaaagtcctcaaaaatgttatttattttttataagaaaataatgtattttaactattaattggtgtaactctcaaaatcacatattaggtcatgaatattaattattagtgggacataaatattttgacggtagctggatacatcaactgaactctacttttttaaaagcatttgtcctttgatattttttgcgacaaaagatatatcttatatttttgggaaatataattataaaatataggatattggaaaataaaggttaagttaatgtaacagaaaccgaatactaaatgggtttcggtacgtcaaattaaatcgaccaagtaatcatgcatttgcattattaacaaaactttgcccaacaataatgacgatgttcgagtgagtggaccagccaaacaatgtgttggttatgcaaataatttcaatcttatgtgactatcgaattatttgcacaaaaagtataatctatatataattatactttagtcgaatctcataaaatcattaaattggaagatacatcctagctaatattttaaaaaacgttaagcagtaagcagatggagatctaaatacctaacacctaaaacgcctaattaggacttagataatttagacgttttaggtatttataatataacatattaaataaaaatatattaaatatgttagaaatataatattataaataaaagtatataaaattatttattaaaagctaaaatgtgaaatcttaaacaaaaattaaacaaaattatttgtttaattcatgtcaaacaatatacatatggagttataacttatcgcttaagtttatatcgttaaaaattaaaataatacattataacaaaacttatgcaattttagacggtcatttagacgtcaactaaacgcctaacgtctagaccgatttttagaatactcccgggtgcttcatatatattctttccatagctaatattaatatgtttcaaaggactaatgttatattataaacgagttatccattatttaaacatctatatactaacttgttaaacaaaataattatttgaattgagtgtttcagtttagcgagctacaaacatttgtcatgcatcatttactatctttattttagacacaacatttatgtgggctttaacttttcatttacaattttatgttaaccatatttttgtttataccctactttaaatcaatttatcccattttagtgaggagtcgttccattttatcccttctttttttttactatagtcgtgactatagacagctgtagttgtaaccacctgcgaaaaatgcacttgtcaattattaaccagattatggttacaagttacaacaactttagtaatcagctactatgagaaattaaaaataaacaactagaaattgacatggacaataaataggttggaagttccaattaaaatggccttgtttacacatttccgagtattgtcaaaaacccagttttggagtagggaaaactacacaaagatcaaaggtctctttgccaaaaaaaaaaaatcaaaggtctaaaaaaagataagtatcaatataaaaatagattcccgaatctgttgtcatttcaaattgagaacccgtaaatagaaaatatccaaaatggaaggtgcaaacataaagttgaaaaataattaattgtaaatgggaatatttaggcaaatgagaaatgcccacacaaaaaaaatttgcgaatttcactttaaatgagctatgcaagaagaatgaaccaactgaatctgctttatgagagaataacatatatacatattggtcgtattatatgatatgttcatataaatgtttttggatacttccctgttgttcatctatgaataattgttctagtgtgaataattctactttgcgtgcaatttgtacaaaacacagaattatttgaaataattgttctttcataaagccaatataccgacatattgcgagaatatggcttcgaagcacggttgtgtaatctcaagaacaatagtagacaatatgattcttgttcttgtaaaagttgattttgtatacaaataatgtccaacttaaataatttatttgtttctactttcgaatttcgaaatggtattttactttagagtagtgtggtcagaaacaataagcaaatcaattttcttttaaccaaacaagaaaaataaatatatcaaatcaatattctttgttatttacttttataatttgatgttgcattagtggaagaaacattagcgaatcaacaaaagtaatctcattttaagattttacagttgtatacttttgtattagacgacaaaataacaatgttattaaatgagaaaatgtctaaatgggctactagcctaagcctccaccaacactaaacttgctttacttttttatgcctcaatcatgggctctattttttccactgcaccaaaagaaaatatgaagtggtcaaataaaaaaactgtaattgtatcgaaccaaagttcttctactcgaatatgatcctcctgcaaaaacatctatatttctcataaggtcgaaagatgatatattgatattttaaaaagatatattcatcatatttttttacattggtactttagcataatcaaatagttgatgattcgactcgaataaatatgcttttagggttgatgcagctgctactgaacgtgaataaattcttcacagactttggacttaaagtactcgattgaatcaataactttcatgttttctttctttttctaattattttattaataaatgggttatcaatgaaagtacaaaacgacaaaaaaaacactagcaaatttttagtggtctactctgtttctacaaattaagatgtgataacacacagtttcaaatttctaacactttaaaccacttttaagtataattggcatacaaaaaaactcgaagagaatggaatcattagaggaagagaaagagctaatgtaacaaaatagaaagaagaaacatccattgaattgtaagatcaaaagataggattcgttaggaaacatgaaactacactattacaataagtaacatgaaaaaaacaatctcttggattttttttaaaattgataaactaataataagcatgtgttttatacccttattaaagacggctaaatccaacttcttctctctcgtaaatttctctatgcaaacaatgggcttttacggttttattctgcttcttcaacagttcattacaatgatgttatacacgaaattgaccgttgttttttgcctagtaaatgacattccggtgttggatcacttggtacccatgggttaagctcaatgaatccctcacatgaagcctttggtccaccaattactataacctgattcccacaagttctaaacgctaaacctaaaccgttcatcgaacccgcttgctaagacaagttcccaactttactccaaacccgtttttctttataaaccttctaaccgctatacaattattacaatttcagaatacataaatttaaattatgtaatatccagcgataattataagtatatatcatatattttcaaaaacatcaaaattaattaaaaagattactagattatttttgagaacaactattacaattattgaaaagtataaacaaaaacaaaaaaaaaactatattgaaaaaaacaatcatgtaaatattagcaaaacatatgttaaaacttaaaaaaagaaataagaattacatataaaatctatatatatatatatataatataattaattggatactcataaattataacttaaatgacgtgtgaatttgtttgtttctaaaacttcaatttttatagcaaacactttgataaatagaacgttctttatattaatatattttttgttttagaattactaatttgaataatttccttacaatattagttatcaattgtatttcgttaactatgaagtatatgttttttaagaaaaatgattatattcttacaagttataataatatatttacaaaattcgtaattaattgtataatttttttgtcagagaaatatatatttattttctaaaatcactcttttgcagttttatttcacttattcaacaactcatcacggcgcaattatacacgaaattaaccgactgtttcttgcctagtaaatgccattccggtgttgtaacacttggtacccatgagttaagctcaatgaatccttcacctggagcctttggtccaccaatcactataatccgatccccacaagctctaaaagctaaaccccaaccgttcatcgaacccgcttgctcaggcaagttcccaactttattccaaacacgtttctctttatcataccttctaaccgccataccagcatgatcagctgcataaagctggtcattcacaaccgctacaagcggtggagccatcgcagctgcagacattccgttcccctggttagaccgcggtggtgacatctcagggatctctgtccatttcctagtcttcaaatcaaactcttccccacaagtcaaaacctttggctcattctcttccccaacaccaatcccaccaatgacataaaacttcccatccataaacacaccggaacacattttcctcctcttgttcatcccgggtaacaccaaccaagtctgatcctcgtagttatacaactccgcagtatcaagaatcctaccgctcgaatcgcaaccacccgctaaaaccgcaatctctccgtaactagcagagccaaacaaacatctaggcatgttcatactcttcgcagtagaccaagagttagtcaaaagactgtatctatagattacgtaagaactcacttcccaaccaaacacaagcaaatcagttcctacagccaaagactctttatctgcatacctgaaacactcgttctgtggcatactcggcaaatgcatccaccgtttcgatcttggatcaaaagcttcccattcattgagatggcacgagaaataaacccaatgctcaagcgtcccttgtagtctcctgagtctataaatctctccacttcgaatcaaagaacgtaagctacgattcacagaagcaatggagcagtaatcagctctagagcaacgaatcaaacagcttaacgaatcatctctgttcatccctgggataagtgttcctgaatctgaagaagatccattgtcttctccttcacttgaatcagtagtaagcttgtacatcttcttgaagtgaagatcagactcatcgttgttgagaaaagatcgtttcccagaaaccaaaaagctccatttcgtttctttatggcttggcatggtgaaaagtgttgaaactagacaagaatcacgaggacgaccttcgaacatcttctcaaaatgggcaatgaatcaaaagcaagaacctttgttctgtcttcagataggatccaagcttttaacccagacgaagcttaaaatcgatcccatttgctgaaatctgaaacaagaaaagtcaaaatcttttaactttcttgcaactacaatataagaacaagaaaaaaagaatgagaattgtaattgaagaagaagaagttttaatatttgtatatatttgagagattaattaaactaattttctctctgtgtttttctttacatttgtctatctctcatattataccttaaggtttaagctcctttgcaaatcagaagaagcaaatggactttgtagacaaaactaatctcagtgttgtgttcttttttttttaattaattaatttcttatgtgttttattcttgtactgtgttttactgttttaggcaaaagctaaagaataattaattaaaaataaagagagattagtgaaagtgaaaaagcataagagacgtttcaagttctttgcttcagactaaacacgagcgtgtaatccgataccttgaatctaaccattctattgcttcaatcctacaatattgattttaagtacaattttcatcatacatttttttttaatacattatcatcaaaaatagtttataaattgagattgtactcttttctttcttgggacatgttggtgcctggaatgtggatgattttttgaaaatttaattgctgtaaaaaaaaggattaaaattggataaggacgaataaagtgtaattttatccaatggttgtgatattctccccggtggttctacgacggagccgccaagatttgcggtaagctaaagagccgatttgacacgtgttataaccccatccacaagcctgacttggtcagttttaaacttttatctttacgtacgacaaaacttttttatctttacttttgtttgactctattggttaagaacacaggctgtaatagcctacgtgcgagagtacgatatatctgatctgtttctactacagtatgatgctacaaggcccacttattatatgaaacttatgtatgatgtttatgtaatggtacctattttaattggtcaatgaaagtcatgacgattatggttttacacctaaaagttgactttttgttggtaaccaaaaagcatggatcaatggtttggattgttgttaaaaggtactgaaacactattcttcatgttgaaatgttatgaaatttttttacatgtatactcatgcttacgattatatttttaaatccatagtgtatggtagatggttttcattttcaacaaacacgaatttggtctaagacaaattatcttttacatgtgtgtctattttgtttttcttcattttgttaagcaatttttagttttttacatgtgttcatggactcaatgtcacaaattcagattcaaaattattattgttgttattttcttttggtatggtaataatggtggttgtgtggcttgaaaaaattaatatcacgtgttcatatgtgatctaatgttctttagttgagaaaattaataataattgcctgattctacagagtaataattatagtaagctgcatagttcgtccgtgtgaaattatacccacttttggtagacgatggtctcgtggtagcattgtatgatcgaaacttttccaactaataagattttcggaaattaactgtagttgattaggtttttacgtttggatatcaatttaataatacaagtagtcaactatatacattaaggatgaaggtcacaagaaaattttgtaaaaactaaatttcagagtatgagaaaaaaatatatatttaaccggttgaacattgtgttttagacttttaggttaggtatcaaacaaagttcgtagaataaattgctttaacaacccaattttcatataatttcagaatcaacaacaagttctccgaagtttaaaaccggtgtcaaatgttaattgattttaatccttttcaaatgttggttttttcttaaagtataaaaaatgcaaaagaattttgttaaattttgtgcttaaacaactgtattttattttatgtcacaagaaatgagaagttgatatttttttttggtagggagttgaaaacgttcatatcttgtatatcagatatttatactagtttaacaaaaaataataattcatattagttaccatatttctatgactttgacttttaactttcattttttttcatataggaaaagagaagtagagaacaactacgatatatgcaaacaatatcaaagagaatttaccttggacaagcaaataatttttttataggttagcacaaataataaaagttatgttcaccactttaactcgttggttgcgaaagaatgtatggtattttgtacgtaaacagaagctaacgttttcttacaaaattggtaaactgcttatttgtttcaacacgcatgggagcgaaaagcatataatgacaaatttggacaataatagtggtattaggaagcagggaaaagagaaaatgaatacgcaattaagggaaatttttccaagagaagaaaaatgtcaaaaaattaaaaattgagactcttggttttagtcacatgtcctgactcagcatctgactggattagactcgacgcttaagttggtggtggccctatatatctatcttcgtcgtcccatttaagtttggaaaaaatgcttggaaagatatcattgaaattcgttaccaaaaatgaagaaaaaatagtatgagagataaaggacaataaactttgaaagttatcagataatttcatctttatgttatctttttaaaaaaggagaataattggtagcaattgtcttgatctaagttggaagaattgctttggttcactaatgctaagttgcgttattttagcagttaaaataacaaaatatgaggcatataatgaaaaatgaatttgatcttttgaatgtagtgaagttttgggaaataaacgaataccaacaagtggtattagaggcaagttcaaataatcttattatcattgtctatatgaagaaataatatgcttatagaaaccatgattaaacttcgaaccattaatgacttatcatcattccaacaataacaaacacatgcatatatatcgtatttttgtcccactctaaactcttttttccaaccactcatatctactaatttgcttagataaatcatctttttttgtaacatttgcttatctgtatctaatggacagtatgctattttgctctttcattgaagaacgttcgtaatcatatcaaaataagtaaaggtatatgtaattatgtaaagtggatgtggtaaacattgaaaagaaaaaaaagatatcaaacgtgttgtgctgtggaggattaacgaaatgcgagaagtaagaaactacacacttttcctcgctaattgcggctcgtcgcatcgcttaaaaggcaaatggtatacacatcacacttggcttctccctttctctaattctttttcatttttgttcatttacatttctttcgttttattatcttttcatagctgaaatgttttagatgccgacaaaaagtaattgatacagtatgttttagggttgtaaatttttctgaagcatatgtacgtatagttaaatactagatctgactaagatacatgctttcgtggagctttagctaaatgcttatctgtctttgtaaattaatgatatgaagctatatattttgctattcgtgcttctcatctcatagcattaaatattgattttaaatcacaattggtggtacattttgggaaaattacagtatatcaataacgtcaagttgcatgttaataatatcaatatacacttgtcacacactgctacatgtatatatgttctctcggatgcttaacacagaaagtcagaaatatacagcatcattgttaccacacactgacacacataaatacaggcgtacataaacgtgtaaatatatatatatatatatatatatatatatatatatacacacataaaagataagaagaatttaaaaagcccaatatactgattttagaaaatcagattaggtggcaacccaccattttgtaaaataatataaacacacttcattttcttaccatattattattattgtgaacacattataactcttatctaactatgtatatataccattaagccattataagttcataaaccataactaacggatataagatgcatgttcttttaatctgatgcagagtcaataatatgaatcaataacattttaaatgaaagccaaaacttttttttttatgcaagaaagttgattttgtatttgacgtatatcaactattactagctataagtatgtaaaatatataattacctacaaaaaaataaagaaaatagagtgctcagtattagttggacgtcattttcataaaccacgattgatctctcatttatacgtaaatggagataatcaaattctaagtaagatttctttgtaaaatcatgttttagaaagacgtgttccattgtggatgttactcatcatgttattcaaaattagatatttcctagtagaggtattctttaatttagaatgtttaattcgtgggctatatagttgtatgcatctttaaaattaaaagatataggttgagcttaattaaatatatatattgttatataaagaaaacaatttgcatttcttttagcttttcgaaatcgatctgtttccgttgcaccgtggatatgtcgggaatcgtgttcttcgagggagcattaactctagatgttgattgatgtaactgaaacctaaaatcaaagcatgaatctgccctaacccaaattccaaaaacatacacaactaaaaaagtagaagacgaacaaatgcttttggccaagttttcaactcatttaacacccacatgccgttagtagaagctttttactcattgtttttaacaaccaaactcaagtacaaataattacctgcctaaccaaacaaaaaacaaaggaacaaagattgttttgaattcattctttttttttttcttactagttttctattatttcttaaattttcaactactttacatcatatactcgtgttatactgttacgtataatctattttgaatggataataagattataataaacatttaattattgagaaaagtctgatttagtttggtcggatcaaaatttgtagacaccggattacatgattctttttttggactgtcaagtagttgtaccattcatggcgaatgcatataattttttttattaatataaatattgggattcatagtttaaaacccaaatatattaatttcgattatatgcagattctggactatatagttagaatatttggacagtgtccaaccctaaaaccaaaactaaatccaaaaatatctcaagcccaagccaatatagaaaaataatactgcacaacagcacaagggattacttagaaaatgagatacacatgtacataagaatatgggccttactaaagggaacaatggtttactattttgggccttaactaaataaacattgggcccaatacgattccggttatcgtcttcttcgacgggttaattcacgactaacagaaaatttctctgccggtgttgacttcaaactctctttgattagatcggcgccaacttctaaacgcaaatgggaatcacgagaaacttgatcctgggtttggcttgtttagcctttgtctccattgctaaagctctgcctcatgaaccagaacttggctcggctcgtgtcgtcttccaggttcatttctcgtctcctcttctctgctacgtttaaccctagtcatagttcatgccgttatttgatttgattgtgttaaaagaaactttacagtgtataatccgatcaaaatctcaacttgaatttgggcaaaatcgattttagttttctttaactttctacccaaattcatgttccaggaacttgaaatgtgttaatggtattcggaatggatgataatggttgtgcagactagttatggagatatcgaatttgggttctatcccactgtggcacccaagacagtggatcacatcttcaagcttgttcgtttaggaggatacaacactaatcatttcttcagggtatatggcttaaaggctcaagctttgatgaaagttttgcatctttggcctgttctttttttggaagaaggggctaagtgtgagtcattttgcaggttgataaaggttttgttgctcaagttgcggatgtggcgagtggacgatcagctccaatgaatgaggagcaaaggaaagaagctgagaagaaaattgtgggagagttcagtgatgttaagcatgtcagaggtactctttccatgggaaggtatggtatcttttgatcttgtgtagcttggattgtttatatgtgttctgtgaatgtcctcgtgtagctcgtgactgttgctttttgttgtgttcatatcattttggtaaaggtaattgcatggtgatgtttcgtctttccgtgattttgtttttgttcggtagatatgacgatccaaacagtgcacaatcttcattttcgatgcttcttggcaatgctcctcatcttgatcgccaggtcagattgctaattcagcgcagactattggctttatcttaagatgactagtagtaataagattggaggtattcaacagtatgctgtgtttggtaaagttactaaaggagatgaaacattgagtaagctagaagaagttcccactcgccgcgaggggatttttgttatggtatgttttcaagaaaaccagaatttcgttagcttagtcaatagttggatttcattcaactttggtcattcttttaccatttcttttgcagccgacggagcggatcacgattttgtcgacatactattacggtaaatatagtcaaatctcaacttgtttgttagctaaaacatttttgataacatcttctcctgacgtttgatgttgaaatgggacgacacctcaattatggttaactacagtccataaagagagatgtgactctagcctgaatttctttaaaatcaggtcattcatgttgtcctaggtgataagactcaggatctagcctttttgaaagatatggttatgttttggatcatagtaaaatttgatactgacaattaagaatctttattagtactcttaattaaacaagcagagatcccttaacatggaattcattgatttagttcttataatcttgtttctcagacactaaaatggagagctgtgaagaagagagatctgtcctgaaaagaaggcttcaagcatcttttgtggaggtcgaaagacaggtgattgaaatgtctatagataacgttttgatgagaaggctcgagacacatttatcgtaacatttatggtcccttgtgttttgacagagaatgaagtgcttcccgtgaatgaagttaacacataagaaactgttcaacaaaagccttaaaacgccagggaacacaaaggtaaatgtatgtctagtaaaaaaactcagaatgctagacagtttatgagtggtttatcagtgtgagagattgtagttaacagtgtaaacagtttgagacattgaatcatggattgtttccttcactgtctgcaaaaatctgatagtcaccgggacaaaatcccaggttctgagcaccaaatagtcaaatactgaactagtgaaataagcttggagcaaatagcaacaacacatgtgctctgcttttgtgctcttctctctccaaaaaaacaaagcatgtctctcaattcacacaattagtcttttcactttcgttgacttttgtctcttccgtcatcctcacttttgtcactttcctcttaattttacattttaatgtttgtttttgagtcttaaaatccaaacattactacctcttatgcattaaaggagatgggcttgttgtgtctgttgtttagggtttataaaagactcttaataaaattgagacctcaagttttttagttagaaacctatgggtttgtgtttgggaattgtagtggtgtgacaactttaggtgaccggtgacccacatactacttgtttagcccattggttgcaacttaacaaaaatttcatatccagagttttatacaaatttaatttgtctattacaaaacataatctgacacgtgattcacatacccactttatgaatcagaatcacatcgaattcgatttctttaccaatgcatttgcggtgtcgagttgcatgaatgtactggttttttgttcacatgatcagagaaactaaccacgtgagaacatagtattatcaagctttaggcttataacaatattgctcaaatagaaaatgaggcctaagacatgcatgcatatccaagatttgttatgaaattgttattgtctaatcaactcaactaggaatacatttataaaaattaaaaaataaaaaattatgtcggtacaaaacacacaatcttttttggccaacactgtttaaacaagatgccattgaaacaaaacaatgaaattaccaagttgctcaaaatgaaagaaccaagtagcacaaaagatagaaattttataacccgtaattctttattgtttacttacaatcccacaatatcataattttttatttatttaaacaaattgacattcatttataaaaattgttttgaaatttgatgagattcaaaattaacttacatgattaattcatcaaatagttgggattcttagtttgtcgaattctatagaattgacagcttatcaaaatttggttctggtggtatgtttaaaactctttttttttttttggtttttttttttttttgttgtttttttttttttgttgtgaactgtgatcatgtagtttatttatatttttgttgaatgaatacgttcgttaatagctctatagttcgataccgtttaattatgtttaattacgggaattggggttgaatcatcaaacttgaatcttttatctaactttggaatagtgatattatttttttaattgtacaatagatcaaatcaaccaaagttttgaatttttcgaatgtcagattttgtgaagaagtaaatttatatcatctacatggatatatttaaagtgtacattcaatttcttagtgtatggacatacattttaatatgtttttttaagaaacattttaatatatttagatgtcaaattagtgtaatttaatttaatggtcagttttctctattttgcccaaaccccgaataaaagacatttgttttggggattgaactgatttttctaaggaatattggtcaaagtcacaagataattactcgactgttttgttcaatgactttatccactttgtttccaagtgtttgaataactacaagttttctacgtttatatttgttttctaacgtattaatgtattggccaaatatttatggctgagtacaaatatgaatacattgttatacctcccgataatatctggtccgtatttaaatttatttattacacatgtatcgttgataaattccaacaataaatattacattgcaatgtgtagacatcaatatatccagaaattggatttgtgagaggacgacagtggcagaaacatcacatgaggtttcatacaaccctacatcatttttgtttgcataaaatttgtaaaagccttatgggtttcggacaaatgttcatgtttgtatccgtcagataaatttgtaaacatgtaatatttgcacagatcaccaaatgtactctttcacttcaaattcttcgtctgcatcacatttatcaaagtaatatataatattcaccaattaagctttattcttcctattaaccaaaaattctcaactcatttctttgcttactgtatcttctagtatcatggtgtcatatactgacagtttaaataatgttcggtttaaatcaatagttatgtgaaaataaaatactaactttctagctatactagaagacttttgaagtattagactcatatatcctctttgaatcaagagcagatcatgccacttaatgcggttatagcacaagtctttctcaaacgtagcgattgcaaaataatttagtagaatctccaagatatcgaaaatatcaaaaagtctatcatacattttaaggatttgtgtatatcttattgtaaaatcattagttaggaatttaggttaactgtcatttatattagtaatgtaaccatttttttattattatgagactggtcgactggatatatatacatatattttgtgtgtgtgtgtgtgtgtgaaaaagagtggatatagttctttcaaatacaaacctctcaccgatcactctatcagcaatatatttattgtacttgaaatcggtctcgacatgccgacaaattaaaaatatcttatattcttgaactaattgtgtattagtaatatatgatttcatcaatctatattaaaaagaaaaaaaaaaacttttctcatcatatatgtggttagtgtagagtcaagttcatgcgaaatcaatatcaattattagtatagatttagtataacctaatcatactaacaagtagaacgcaaatcggattcgatcttaaggaatcctgatcctacctacatccaaactagtaatatgtaggccaggaaggtgccacaacacacacacgtattcctacaataattaacgagtttattaatactatttaaacaaaattaagaagattctctgcgtgatccgaagtccaaggacgttgtttagtaataataatctataaatctttggaacatcgtctttacactgttccacaagtaattcaatatatgaacatatgcttccatcaatgtataaggactaaaataatgagttatgattattattatttttgtaaatggaagaaaaaacagagattgcgagacaacacatgccatgttttaaaatctcggggatgggttggttttatcgttatatgtctttgaccgtcaacaatgtttggctcctcgatcgttttttaaccttttaacccatactatgaaatgtccgcaactactatttacttgtgacatgataagcatcttcacattaaaatcttgatattggtcggtctagggtttgccacaaacagataacaatttgttgaaaaagttacacttgttttaagaaataataatgtataagaaaacaagtgtactctctatagctgagtactagctagctagtagtgtagtcagttaatttaactttatcaattgatatttattcgaggcatattctttttcgaatttctataaccaaaatttgtggggggtttttcatgaagaatttgtgggttttaatgatgtaatttaagtcagagaaaacggcataaaactaagagatggggttcctaattaataggaaagctactgatctcggactgcgtgtaagggtaggtctcattaatagtagcatatgcatgttttgtattcactccgccggaattaaccgtatcattctctcagcttcctattcaaattaaaccttccatgtctccttttgaattctgacttggacgaatcaaatagtctaattggatatcgatatccaattcctatagtgtttttgttgtttattgctttaaatgtgtgttcatcaatgtattttcatgttacatgtgtctatatatcaatgtatatccgaatatgaactatagtagtcgcttccaattggatgattcttttcatagtaatccaagaggttgatttagttttttcggtacaagtaatctgtcctgtagctttggggttattttcaaacaaaacatgtatacatatatactaatttcaaactttaaagataccaaaccatgcagaatcaaattatgtcaatacaagtcttataaaagacaaatacatattttcattatttagcttaaaaaattaagaaaattttgtaattttattttgtttttaatgaataaatagatcaatcttgtcctttttatttatggtcctctgtaaacaatgacagcaacgatggcaaataaataaagtattcagaagttaaaatacacacatatatatagatcaagacctatatcttgttgacaacgaaaacaaagaaagaagattaatagatcaaatccgagttaaagcaaacatctaccacataataaatgcaatgcaaaatcaacgaactgaatccaatcgacaatcaaatgcctatctctgcatctaccacatgctacgtactcaaaatcagatttttatggaaggtattaaaaaaatcagagttgtcaactgtaattacatccaaaacatgatccgtaatttggcttcaacattttttggtgttttcttgtaccatatgtcctacactcttttcatgatatagaccaccacactaaagaaaaataataattaatcttataaatgacagtgattttttttcttttcacgatcatgtataggataacaatcatattattttcaaaaatatttggatgttacattacatcaaaggtcaaacatggatgtgtgaagaacaaacttatacatgttccaaaaccattgaatttccaaaaaaaatcaatgtaaaagtttgaaagatacaaaaaaaatggtaaaaaagagagaagtgattaaaaaaagggacaatgaagtaatacatataacgtggggatgcaatggtggtactgacagagagagaaggcaaagagggacagtttagtttggcgataaacacacattttgccattttaaaccccacttgatccctcttctcctttccatggccctcccctccttttctacgtccctttcccaattcttattttaattctttgtttttttctacttggatgcgttgagccaaaaatgttgcaatgaattaattctacttggcccgattttggaaagctctgtagctttgtggactgactttgatttggttttgatttcagagagtgcggatcaatccattgttatacgtgtttggatttttttttgggtttagccaaaatcgaaccgagtgacttgacttaagcatagttgtattttttattatatatattttttttggtcccatcactagtcactgaaaacctctacaatatcccttaagataggttctaatcgtcgtatcatacgactcgtatgagacgatacaaacactctttggtaaagtatcactattggtttagcactggatcttagttatttgataccctttctatttagtttcaaaatttgaattctccatgtcacattcattatacaaacgttttttgttgaacaaattttacattcattcataaaaacaaaagaatacattatcacaaaacatatataataagataaattattaaatagaatttttttaaaatagacatacaataagactagtcgtctgatatagactctgcacattatacggacttacatttgtaaactccatcaactcttatccatctattgtttagtcatgttcaatattgagaaaaattaaaggaaattaacatgtagcctttaaattttcaataaaggtcgttaagttgaagacttgaagttgatactacaccatgtgaatagctcgaaagaaagaaggttaagtggaacaggaataagagaaagagagcaaggaaaaaaacttgacgtgggtgagttttacacatataacaatcaagaagttgttctcgtgggaaagtaagtttagaagcttaccaaaaataaacagtatctttttgtactaagcgactatgaaaaaaactgagaacaaataataataaatatttgaaagctaaagacacccttattaaagaaacataacccacaccctccctccatgcacttgtctcttctccttcttattcttcttcttcttcttcttgatcttctctctcttcataaatttgcattataaaaacacatccactttgctcctccctcttcaacaccttcttctccactctcattctctctttctgacacattaactacttatccttcttgcattcttctctctctctacacccaaacaaacacacttataatatatcaagaaagaagatgtctagcagaagatcatcacgttcaagacagtcaggaagctcaagaatctctgacgatcagatttccgatcttgtttctaagctccaacacctcatccctgaacttcgccgccgccgttctgacaaggtatacacttcaaaataacaaattttaatctatctttcttgcatatacatacttattttgtatacttgtataacttagcctgcacatggacttagaaagttcaaatgaataggaaccatatagtatataataactaattaatatgcatggtgaaatccaacggcgtgtagacatgtggcctacaattaactatacgtagataaagtaacattaattcacagcctcatttatgcatatatcttgtttgttctttgaatgtttttttgcaattaaattttacaagttggtggtgtgggactcagtttgttcccttcctacttccacgtaccttaactacatgtctccccattactcttctctacctatatactcaccataattctatatatagctgaggaatatgataaataaattgtggccgtttataccgttgtgcacattgaagtggcaatcatgagaaaaaactaaagttctgttaaaagtttgaagatatatatgaaattgttacaaagaaagaaaaaaggcagtagcacatgttgtcacgtactctttgtaagggatataatgatcgttttttgtactttaaaactaattgtaaaatgtttaaactattggacaggtgtcagcatctaaggtactacaagagacttgcaactacatcaggaacttacacagagaggttgatgacctcagtgaccgtttgtcggaactcttggcttcgacggacgacaacagcgccgaagcagccatcattaggagcttgcttaattattaaatccgcattacttaatctgagagctattaatcatccgtttccggccaccaaatttatcttattatgggtatcgtctgtttacttctacatcatatattatgagatatagctagggtttcgggtcattgttaggccaactcatatatttatatttaatatatggttatgtatgtatgtatgcatgttaattgtatctgagggtccagacctggcgtatagtagcctgtgtatcatgagatcctctaatatttatgattaatgacacggtccgtttccttttttactatactgatctactgttataagtttcgtttatcatatctttttctataattaacaagctgaggagattatcggtgtatgctcgaaatttcttagttgaagaaattaagaacaatatatgtgtatgccaaataaataagttatacttggaagtatgtcaatacaattttatcaaaaaaaataaaatggtatgtatatacaatttaaaaacgtggagaagttgtgtctgaatttaaattgtttaaaatatgatagaaacagacgaagacctcgatgttttcgaagtcgtttagtttggattatctgttttttaatgttatctgtagtatatggtatggtcgtgccattttatttaaatcctcttgcatgtgatcattaatgtgttatcttcgtcgtgtatattataacacgtattgactcgataattacggtattagtgtggtgttattaatggagtagataatttatgattacgtgttaaaagtaaaatgtattgggatataaggttacataccttttctttgaacagagaaattcttgcgcctgaaagttaaatataatcatgtactgtatcagttcccgttttttttcggtcattgattttttttttcgggcaacacattagttgtttttatttatgagcaccaaagactaagtagaattttaaaaacatgatgaaatattaattatgacttgaagacatttgaaagtgtgatacatgtttaggagctggtaacacgtttttaatgataatctctcaatttagtatagaataaaatatacatattttgtattattctgacaaatcaaatagttttgagttatcacaaactctacaagaaacccatctaaattatagtataagaaaatactccggaacgccaacctttacttaatcaaccctaagttgacgacccaaaaaaaaaattaacctttaaatcatttgaataatggccataggcccaaatatgttaacaaaagagccttggcccagttcctggctagacttcctttcattttctgttattttttttttggtaaaccaacgggagggactgccgtctttattcaatagaaccaaaaataaaaaattacatgggcacatgtctagccccagcaacacctgcagcatcctcacgcataatcgaatcgacaaacggaagacctgagtcaaaagaaagaaagcctaaaagtaaactaaaagcatagtttgctaactcgtcagcaaaacggttagcttcccgataaacatgcgaaactcggactatccagtcctttgatgagaagccatagcacaaacgtactaggaatgacaacagatgagagtcttctatccctgtcgtgagaaaaccagccaccaattttgaatctacctcaagctccagccgcgttatacccttctcccaagctataaccaacccgtagtacacaccccaaagctctgctaacggagccgtgcaccgccctaaattcagggcaaaacttcctcgccaatccccgtactcgtcccgcaaagctcctctttttctgttattgtagtgtgtgatttggcttgttctcgcaaacatatataccaacattaaacaatactcaagtttgtccccccaaaaaaactaatactcaagaaaatatacaagttgtttttccatttcaacaattggccttagccatatgtgtatactacaatttaagattgcataatacattaagaaggaataggcttgcaatgtgattttttattaagcaaaaaaatgaaaaaatatatattttgtgtacaccttttgatactaaatgaaaaattgagcatatttatttatatgcgtttgtttgtatgtcgttgaattgcacttttcatatctcatgcaacataaaaaattcatagaataaatagtttatgcttttagataaatacaattgaggttaaaacacacaaaaaagaacaactcgtggtaatttataaaatagtttcaacaaaaatatttaaacttgtagaatatagacttgttgattacaaaatgatttgatagggagaccaatttatacagtagttgggcctatattaaagtattttatcataaaaccgaccaaaacgtctaagaaagttgataagtgggggacctgagaaagagaagaagaagaaggaagaaaccggcctcgcatataaaatgggctttgtgtcaaaacacaatctgcggtgatgaagagctttttgtgtcccccgaaagtatgtttacctaccatagagaaaaagtcatgttatgttgtaaaaggttttaaaaagaagaagtctaatcatatcatagactagtgagagttaccatgtaggaccttagagtttgctttcatttcatatcattgagacatagacaagtgataccatgtagggcctctaagagtttgcttgcatatacttcttgacgaccaaaatcactagttttagttctcgttagaaataaaattccattgacttgaacacttatgcatgcaaccatccaaatgcttatgtagggcatgctgttaaaagaaattttaattagatatcaactttgaaatatttcattaagaatatcagttttttttacatatcatatttaaattcaactctttttttgaagagaaagtggtaagagtatctagatctataaactcccaaaatttgaagtatttgttacaaatactcaaattgttcattacggtacatatttaattatacacatctgaattaaatatattcacaataaattaattatgataatctagtggttgaaaaaattactattaaattgagtgaccataatctaatcaattcactgtaatatcaatcatggttgaccactgtaaacatcttaaattgcaagaatatgctatctttcacaatgtccggagattattatgaatttcgtttcaaaaattctataatagaaaaatatacatatataattagtatgactatgatatatctgtctttctattcgtaaaaaacaagaattatctttaaaaatacttgatatgaaaaactacatagtacatatccgtaatctaccaaaacggatacaacgtagtaaaattagggattttccaaaacatacaaaagcccatattccacccctccaaagactataatcatcccatgtctacctctctgtctcatcggctttgagtcttgtctcctattttatatactcatataataaacaaaataaaaccaaattttctaatctagctagtatttagcctataagtggtgtatactcagtcttctaattcatttcaccaccatccttcttcttctttatttagttttctttctgtactttgaaccaagacaaggtggtggagaggagaagaagaaaacaaccaacaagagacatgtcttgtaataataatggcttagctttcttccctgaaaatttcagtctccaaaaccatcaccaagaagaagaagatcaccctcaacttcttcaagacttccatggtacatcatctcaattaacacctttgttcaaaatttctaatcctttttttttctacttctcaagatcttctctgtttttagggtttctaggtaaaagatctccaatgaacaacgtgcaagggttttgtaatctagatatgaacggagatgaagaatattcagacgatggatctaagatgggagagaagaagaggagattgaacatggaacaattgaaggcactagagaaggactttgagcttggtaataaacttgaatcagatcgaaaattagagctagctcgtgccttgggattgcaacctagacaaattgctatatggttccaaaacagaagagctcgatccaaaaccaagcagcttgagaaagactatgacatgcttaagcgtcaattcgaaagtctcagagatgagaacgaagttcttcaaactcaaaatcaaaagcttcaagctcaggtaaaagcagaaacttcataacacaaaagtactctgtttcttttttaatcttaaatactctgttttttaaatcatatatttcataaaatatgaatcttttttagttgaattttataaaaacaatgctcttttttgttttttattgatgttattctttcagtttcgaattcataatttggaatatatttgttttaggtcaaaacataatttggaatcattttgcaattttacgttctttcttaaatagtttgtgtaaattatgcaggtaatggcattgaaaagcagagaaccaatagaatcaatcaatctgaacaaagaaacagaaggatcatgtagtgacagaagtgagaacatttctggtgacatcaggccaccggagatcgatagccaattcgccctaggccatccaccgacaactacaacgatgcagttttttcagaattcatcgtcagaacagagaatggtgaaagaagagaacagtatcagtaacatgttctgtggaattgatgaccagtctgggttctggccatggcttgaccagcaacaatacaattgaatgtggtcgatctgttcttgtttgtattaaaattttcgttttctttaagtggtcagatgaaccaattcatgtttcaagaatctatatttagtctatatgcaccaactaagctagtagtttttttgggtaatgtgatgtaagagaattaatgggggaaatattcatcatattatatgataattaatcaatcatatgggccatatgattagacattaaaaaaagtctgaaccatgtgcttttatatcgtacaactaatatccagaaaactctaagaaataaaaattttaaaaacccacccaaaaagacttttccatgaaacaaattatgcttatgtcataattaagtctataagatgaacaaaaatagaagacatgatcttaaaaatagatcattaattacgattagcggtacaataaactgtagaaatcatatagttaaatggcacggttgaagtaaaatgtgaagtgtgtgaaagaaagagcatcaatttacagattccgaggagaggatgcaaacaaatagggttggaaagtggtcattctctttctgaaaatggacccaacactttttaccctttcatcgacactgacattgcccgacgactccaaatttgttattcatataagccatctcttaggctatgaatggtgacatacaccgtacccaaaaccgcaccgcaacagtgtcaaaatctctacatatacatatgtatttatatatttttgttactatttgaaccgcaccgcacttcttccgtaccgcaaaacgcagtcgccattcggacctttaattaaaaaataataataattaataacacacaccatgacttacaaaagttgtgaaccaccaaggcactaagtttggagtcgtcgagcagtgtcagtaacggtgctctttatacattatatctctaccgtttaacttgtattggagccgcgttttaattagtaagtggtgtattttgcatcgcaccgatacaaatgttagcaatcacacacccatggaatctatgggttttgttttttttttttttttccgaatatgtgtaaaaagacctcatttgactggtaaattaaaacctatacgagtattaacaatgactaaacgagttaaaatggaattgcatagcattagaaaaaacttttcggaaaatgaaaaggtgataaagtttccattgatgattagtctagcgccgggtggaataaaaattgactggggaacaagaaagcgacagaatctgaaagccaagagggcaagaggattatcttcgtattctaacgttgacaaccaaacaccgaggttaagcttgtaaaatgtgtcattttggactaattaattcaagaatcttcatgggatcatgtgcatttccttaatctaatgttttattggttactgtaatattctaaggatattttcttatacgcaaattttaaatctttgacatttagggtgacggttcttcatatgccaacacgcaattccacttctctaagaacaattagttttaaaatgtaatacataataattcaatgactctaaccaaataaataattacctgtaaagaagaacttgttatgtggccatgtgcatagaggtttagttccctaatgaagtattcacttccaatggacacgccgaacatacattgaccacaggaatgtaatgcggaaagtatcaattacttcttcgatggaattttatattccatttgttatgtactatacattcttaagaaactaagcatttattttaaaaaaatttaattagataattcattaacttaaaataaattttaattttatactattagatttaatttattatagtttaatttaatttaactcaaattaatttaattaaaataaacttaatttttcattttattttaaattgctgattaaaatcaaatttatttatttagttttatttttattgtatattaaattaactagtttttttttttgtaattttagcattcgctggcaaccaatgactaatgaatgggaccagtcgcaggaggtcgatgaaatttcactcgtatatgtattctcattttcttttatttacgaagacaaagatgatatgatgatttgatgatgctgcggtcactactcgctgcttctttacatccaattcaaattataatgcctctatgattttctgcaaatacttatctcttaaggagtattaaaatgggaattatttcatcttatatatagttaaaccataatctctcaaaagtaatgttcgtgatcgagtcacgcattgaaataaattaaccatattttggatatgcatctttggaagtgaaagcagaccaaatcagagatgagtgttgcacacgtttgtttctgtttgaccattctcatattacttcaacttttgtcttttatgttgtttttgttctgccctgttttctttctcattgcaatgtctctatcctctgtttcttcttcccatcttctctctgttttacttttaatcttttgtcctgtatatgaaactttttatttgctacattggatatgataatttttatttcaattcttgcatccaagttttatttactttctctgagtttttctaatgggaaattgctttgggttttccgcaaaagtaggtaatagagaaagtccttatcgtggtatgcaaccaaacatctctcttctctaagatttctctacttcttgtcatatcttatttctgattataaagtcttaaattgagttgagacatctttgatttgattaactgttgattcatcaggttcgtcaagaatctctgccaaaagaagtcaatcgtctcggctttcaagcttaacaatacaatcatcatcttacaacgatgacacgagtgtggcgtctcttcaaacgcctagaagtgaaggagagctcttagcatcgcccacgctaaaggcatttacgtttaacgagctaaagacagccactaggaatttcagacccgatagtgttatcggtgaaggcggtttcggttatgtctacaaaggatggatcgatgaacgcactttatcgccttcaaaaccagggtcaggcatggtcgttgctgtcaaaaagcttaaagaagaagggtttcaaggacacaggcagtggttggtacgcttatataattaattatcctctgaatcagttttaggtctttagccgtagaaaccaaaatcgaaacctaaataaggaattgttgatttaacaggcggaggttgattgtcttgggaggcttcaccatatgaatcttgtgaaactaattggatattgctcgaagggtgatcatattcggcttttggtgtatgagtacatgccaaagggaagcttggagaatcatctctttagacgtaagaaaacttgtctctcaagtaaagatcaatgctcaaattatctcgagagcctttgcgaatgtgatagcaagattcaaatgtatagttgttattgtataacagatttagaaaatttagttggttttatattcacaaattttcatttattttaaaaagttgaaatcaggactattatgtgtaggtggggcagaaccgattccgtggagaacaaggattaaagtggctatcggtgcggcgagagggcttgctttccttcatgaagctcaagtcatatacagagacttcaaggcctccaatattctacttgattcggtacaactggataacaaatttacatgtttttgttcatcaaatttcaatcatagaaattttgagatttaatgcaaaccaaacaaaataatatgttgagtttgattgaaaaataaaactaatcggttcatgacatattatggtttaagttttggttttgaccgagcacttccgtttgatttatatgtccatctttacgtaggaattcaatgcaaagctttctgattttggattggcgaaagtaggaccaaccggagacagaacacacgtatcaacccaagtgatgggaactcaaggctatgcagcacctgaatacgttgccactggtcggataacagccaaaagtgacgtctacagcttcggtgtggtcttgctagagttactgtcgggacgtctgaccgtagacaaaacgaaagtaggagtggaacgaaatctggttgattgggcaataccttacttaggagacaaaaggaaagtgtttaggataatggacacaaagcttgggggacaatatcctcacaaaggagcttgtttgactgctaatactgcgttgcaatgtcttaatcaagaacctaagttgaggccaaagatgtctgatgtgttatctactcttgaagagttggagatgacgttgaagtcgggttctatttcaaactcggttatgaaattgacatcttcttcctcttctttcacggcgaaacagagagtaagaactccggttgctgatccggtgttgtctagtagacgatgtcgacgtgttcggtgaagtagcgacagagatagttaggttttatgagtgcatgcatttttttttgttttttttccctggaaaaggtgacatatagctgtgtgcttgtttgattttccatatattatttctattttatcaaaatcagattttgtggacattttcatttgtattcttctttaatagtcctctttagttttgatgataacaagtttgtttaatactttttttctttcaagtttgttctaattctatattgttcttagttcttataggagtaggaatatttgaagaattgtaagggtccacatatctactttttgacaaagcattatttataaatggtgaatattttgaagaacaaatatatatatattttttttctaaaccaaaatggttaccacaaatatgttaggggtatttgtatgacaaagaattattagtaattttcctaatgtgtcataaatcctccccaatgagggacggaaatatcattgtcaccgagttttaagttgtttcattttgcaatcataattcacaactaattttgttttggtgcacattcatcccaaattaattttcgacaaaattactaagatttgggagagaaaatcccatggctatgaagttttttccaatgactaaattcagatattgcatatgactaaagtaactataacaaatttggaaaatagatagaataaacaaattgttaattaacaaaaatgctagtaagtaataacaataggaaactacccgacgatgtttgaataacttgaaaataccaaatatcatccggagttcctctaaacacttcagtaaaaaaaagttaccgaacggataacattttttcaatgaattgctgatataagaatgagagttgacgtgaaagctaatggattcactgatggaccagctgataaactttatgaagaacttgctgatggactagctgaaagactttctgaagaacccgctgacgaactatatgacagaccattcctactcacatgaaccacccgaccactttgaagacttcctgttgttttatctcactcttttgaagactacacaacgtttagaagctgcatgaatgaatgtgtcaagctggagagacatgggtttagggatttgtattccaaattcgacgaatgcgaattatttatgtggaacatagttaattgtttatcaaatccaagctatgagacgtttgattatgtgaagatatctccaattgatcaaaacccggtttgatagtaatagttaagatttgatttactgatttacgtaggtatttaatgcaaagctgtctgattttaaatttggattgcacaactagagtaatgtacactatgtttatccatatctatggataaacctcgacaaccgcttatacgtatttaacattacgaaaatgtgttctcaaatgctttgacctttatatctttaagccattcaaacaacaattaaaaccttaaacatctaaaatgataagatggaagtgtttaccatataaaatctcgtctcgacctgcggaaatccgttgaatgggtccgggagttcccccaaacacttcagtggataatcatttagaaaaattgtatccccaatgaagtgctcagaggaactctaggagacatccaaccaagaatattgtttcttgagtatttcatgtactatgagtggaatacgactatacgagtacaagaggttgatgtaagttttgagaagatgaaagtagttacgtttctttatatatagactatagttaaaggcttaaaggataatctccatacatatgtctattattacacagagatagcgagacagagagatcataagatgatgaccaaggaaagctttttgaatatagacgcaattttgggttaaaggaaagagtaaaaagaatacgaatgttgaagaaaagtccatacggcttttcacatgatagaaaggatgcaaaacacgtagagattctgttttataatttatatgcttttagtacccataacggttatttctcactacattctcctgcttgtcaatcttttaatattttttaatttttaatgttatgactatggagaaaagcttatggatgttgatattttttcattaccaaaaatccattttatttgacattttgtcccgcactgattaaagaaatgatgaaaaacgaaaactagctgcctacatatgtggcgcatcgtatgatatgtaccaactagatattgcatggaaaaggtgaaagtcccctcaaataaatgatgttaaagtcgatcagctgaaataaattaatgcttacctttgtatggatcgtttatgaaaaatatgaagtagtaccactttctttagtctatacaatattctaccatattttttccaaagtaaaattctaataatatatactcccacattctatattgtttaactacctttgtatggtaagattaaatggtctgatcatatttttttctttaatcggaaattacgttgggaatatgatgagtggcagcaattaaaaaagagtccatgtaaagaattttctgtcgtttcaaaatatttcaagcaaattaatcgaaggaatatagaatgaatatttggtcaaataatatctaaggacaaggcccaacatttcgactcgattcatctttcaaatttccacacgttctttagttttatgattcgaatatatgattattggtcccattatgaaaattctcattgaaaaaggaagaactggagacccttagcactgatatataaataggtatgaagttattgttgtttatatcaggacagagctacaagaagagagtcaaatgtccccatgagttccctttaacgcttcattgttaaatactcaaagccacattggtttgtatacaacactgaagtgtttggggggactcttggtgtcattctggcgtagtgaccaccattgcagccgttttatgggttcttttacattagtaagctcttcgtactatagatatatttttttcaataacaagtaatatgtgagacgaattcaaagtggtgatacaaatacaatgatgacactagctaatgtaaaccactaaactataggtcttggtcagatttatagttgttttctcattaaaaaattaagggtccttaagttttgattctacagaaagaaactttaggcctaaatttgatattgaaagttgaaacagggtgtttagatttcatagagttacaagacttttacaaggatagaaatagttatggtaactaaactaacacattcgtcttcttcccacttcacgaccacttcgttcatcaaaattaagcttacgctaaatatttaaatatcattagaaatgaaagttaaggcattgcaagaaattattacctataagagagtaatttggcaacaaaaaaatataagtctacaataaagctacacaaaatttggtgtttaactatcggatccaaaggagcataagcttccgccaataatttcttagtcttccagaagagatagtgttacggacttggcgggggtgatgttcttgaagatgatcgttggagcgattggctgcgagttgtgatagaagttattctgttgcttccgtatgtgaaaaattaccgctagagctgctacttgatgcatacaatgaattttatttaatgtactattatactattattcagctgaagatgtttttttttgacaaattgttattgtaactttcattttcttgcaagtatatcacacgtggaaatatgtatacaagaggttgacatatataaggttaaaaaggtcgatttagtttctctatattgttaaaaggcatagagaataatcctcaaatcctttgagacagagatagagagcgatcaaagattatggtcaccaaggagagcactttgaagtttgaatatagacgcaaattggggttaaaggaaagagtaaactagaatacgaattctgaagaaaagtactaaatcatgcttttcacaagatagaaaggagattctttttatagtgcccataccggttcttgaatattgtcctcactaaattttgttaattataatatagagaaaagcttaattagtgatgttgatatcaattctctacaataaagtccaagaattttgctaacatattgatattttgttcgtgcgccgattaaagaaaattttgtttatttatcaaagatcgattgttctttataaactaactagctaacaaacaaaaactaactaactaagccacatatgtggcgcatcgtatgatatgtataccaaaaatatctcactgaatagatgaaaagtcaaatagatgatgacggaatcgattaactgaattatatgcatgacgtaggaacataaatcccttattattgtaaaggttaacagatttatttttcaattttttttgctaaggactccctgataatgactaccgtgatatatgattcttacttaatacaattttttcatatatattgaaaaaattgtataaaatatattttcaatttgcctctaccattttcaatgatatttaaaaatgaaatattaggttttgcatacttttaggcataaagtatataatattttcacatacatgtaaaaaaaaaatatatatatgatataatgccacttttaatatcaataaatgtcaaatcatctatataatcagagagttttctctcctcctaagttgggaacctaaactaaattaacaaaaacagtttacattaatatcttatgaaaacaatcaatttacattattattaattataattcgtagaaaattaagttaataaaatgcaaaaacaatgaagtaaaattatgaaaattaaattagtaaatataatcttcctccaatttttgttttgtttctctcggtatgattttacattcatcgatcaggacaattatcctccaaaatttattactacttgctaaaagagagtactacttttttttttctctttcccaactatatgtttggcctttatcatcattcaatggagcgtaggatacatagcttatacatgtaattcactgttctgatttgtaaacattaatcaatggggaatatttggtaatagcagtgagtggaaattaaaaaaatgaaggagaaaagacatatcagaggaaagagtccatgcagagaatacttatgtcgtttcaaaatatttcaagcaaacttagggacaagataaatattcggtcaaatatctaagaacgaggcccaaaatttcgactcgattcaactttcaaattcccacatgttctttgattgtatgattcgaatatatgattattggtcccattatgaaaattctcattgaaaaagaaggaagaattagagactctttgcaataatatataaataggcatgcagtgttagtgttgtttgtatcatgacagagcaagaagaagaaagtcaaatgtccacatgagttccctttaacgcttcattgttgaatactcaaagccacattggtttgtatataacactgaagtgtttggggggactcttggtgtcattctggcgttgaagtggccaccattgctgcggttttctattatcttttaaatcattagtaagctctttttagttaattccaaatgttttcatgaattttgtatttatcatggattcatggtgtggacctgtggtatacattattcattgaaaccacaagtaggattaccaaaccgttaggtaattcaggttgatttgagttacaccttcaaatttatttgtttacacccaaacctaaaattattttggtttggtttggtttggttaaaaatctaaatatacattttgcagccattttgtgaaataaatcttgtagttgagatttatttataatgactgtcactcgcatttattatttagttttacaaaattttaaaatgatattaaccaaacaatattttgcctaatttgtttctaaaaatctctacacaatcttccatatatcttcaaaaacaaaatccatgaattattggatttaaaacaataataatttattttcttggattttgtaacactaataatttagctaagaagataatatagacgggtttatatagaacgacgggttttgatcgatatatataaagaaaagtatatcacgaatgaaatcctaaaatgaacaatcaaaatacaattatacaaccaaaaatacaaaaaaagcatacaatattaacaaaataaatataacttgaaatttaaaaaatttaactataaaaaatcgaccaacagtatactacagataaaatattcaaaattttaaaatcaaccatacatcgttacttaaaaaaatatatcaatataaataaaaaaaacagagacaatagaattctggtccagtcttgacaatgatgagcaagtggtgttcctcagtgcaacctgaaagtctaattttctggctctttcttcaggccaacacagtgaaaacgatgtgaaaaatgtattgattggaagtttgctcaaaagaatgggcttgatagctcttaatatggactctcttcagatgagagtcttcaacgtctacaaagcatttgcctcacaattgaatcaagaagactgtcgcctatacgccttcagaatcatgctcccgttgtacaaagtttgccaaggatttaccggaaaagtcatcacagatgaattgaaacagctagcggaagatgtaagagacaatatatattagaaatcatgaacaaagagaattgtagaatgattttctatttcctcgaagaataaatgtgttacaatgagagtatatatacaattactctaaaccatctaaaccaatgtacaatctctaaatagctaaaccaatctaatcaaactggaatactatatacaatctaatagcccccctcaagcttgagcttcataaatgttcagaagaccaagcttgctgttgttttcccggaaaggtttcggatatagaggtttggttagtgtgtcagcgagctgattatcagtcctgacaaatatcgtcttgagaattcctgcttcaatgcactctctgactttgtgacagtcattctcaatatgtttggttcgctcgtggaagacagaattattcgcaatatgtaaagcagcctcattatcacagtataagtatgcagggtgtgtgaaaggaatcttaaaagctgtgaggatgtatcccagccaaatgagctccttagtagcaacactcattgcacgatactcagcctcagctgaactcatagagaccacgtcttgcttcttcgagcgccaagaaaccagagaattacccacaaatatagcaaaaccagtaacacatcttctagtatcaggacaagtctgccaatctgaatctgagaaacctctcaagtcaaagtttgtatcagcgccataaaagagaccctgaccaatagtacctttcaagtatctcagaatcttgtgaagagcctgaagatgtatatcagttggagcagaagaatactgggcaagcttcgagacagcaaagttgatgtcaggccttgtcaagcagagatattgtaatttgccaagaattcgccgatactgtttaccatcttcaagtaaagttccagtatctttagagagcttctgattaggttccatggggatggaggagggtttgcaatcagagaaatcagaagaagccaacaagtcaagaacatactttcgttgacataaggatattccatctgcattcctggcgatctcaatcccaagaaagaattttggttctccaaggtctctcaactggaaaaaactactcagttgcgaagttagttcagcagatgcagcttctgtagtactcgcaataagtatatcgtcaacataaaccagaaccaccaaaaagaatccatcttgagctttcacaaatagagtatgatcaccatgacatttctcaaatccaagactaaccaaagtggttttaaacttgatgaaccactgtcgggaagcttatttgagaccataaatagatttgtgtaatctacacacagcattaggagagacttcctgaccttgtatttctgaatatccaggtggcagcttcatgtatatctcttcctcaaggtcaccattaagaagggcattagaaatgtcaagttgatgtaaataccatttcatctttggtgcaagtgaaagaagaaccttgactgtaaccattttagccacaggagagaaagtattaaagaagtcaatgccctcttgctgagtgtaacctttagctacaagacgcgccttatgacgttcaatacttccatctgctaagaatttgatagtgattatccatttgcaacctactgcaactttcccagcaggaagatcacatatgctccatgtacctgttctcacaaatgcactaatctcctttcccatagcatcattccatactttgtccagcctagcttcagaatatttttgaggtaattttgtggcggtgattatattaataaaagctccaaaaggctcagataaatatgaataagaaatataatttgttaatggataaggggaagttttagtagtagtaggagtattattatagcaatgaaagtcctgcaaatgggaaggcagttttctctgtcgagttgatttaggttcagaaggaacaaaaatcatggatgatgactcatcatgattgtgaggagcatcggaagatgattgcactagaggcagatgttcatcgttgtttggtgcagggagataaatatgaggaaagaagtcttttgcagcatccgtgatattagatgaagcaaaaggaaaaatatcctcataaaaaatgacatgtcgagaaatagaaactgagtatgtctctatatctaatagcttgtaccctttataacccatcggatagcctaaaaatatgcaagctttggctctaggatcaaacttagtcctagacttaggagaagtagaacaataacataaacacccaaaggctttaagactagagtaatctggttttcccttagttagtctttcataaggagtttcattatttataacaggtgagagtaatctattaataagaaacacagctgttaaaacacaatctccccaatattctaatggaattccagattgaaacataagagccctagcaacattcaacaggtgctgatgctttctctctactacaaaattttgttcaggagtttcaggacatggatgatcagctttaattccttctttagcaaataactcattaaattttaattcatgtgcattatcagacctaactgaacaaactttagtgtgatattgagtttctaccattttcaggaatgaaggaaaaacagtgagaacatcagatttctgtttaagtaaataaatccaagtagcacgactaaaatcatcaacaattgtcaagaaatacctataactatcaacagttggcacagaaaacggtccccaagtatctatatgaaccaattcaaaagctttttcacgaatgtgattcacagatttaaaaggtaaatgtttctgttttgataaatggcaaacatgacaatgagaagaatctttattaatcttttgtttaggtaacatcaaaacatcagaaagagtatcaatctttgcaaaagaagggtgacctaaacgtttatgccacatttcagattcattcttaacactagaacatacagacttaccaggaaaagacgacacatcaacaagacttttatccagattcagaatatataagttgccgacttgactacctttgccaagcatcaattccttggtaagagcctgaatcatacattcatcagatgtaaaactcactttagattgtaaagttttagttaaaacactaacactcaaaagattaaatttaaattcaggaataaacaaaacattgtgtaaagacaaagcatcagtgagttgaataaaaccagtgccctctattttaaccgtatggccattagggagtctaacaaaggttctatctaaggctttgtaagtgtggtataaattcctttcatgagtaacatgatgactagcccccgaatctataacccaagctctaagagacaactcagtttcaataggtatagaagaggttaacatttcataataagtagagtcatataaagaaaagaatgtaccagttatctgtgagatagaaggtactggatttgaacttgaagctatagccttgtctgccactggacatgagagtatgtctaatgatcacatccaacaactgatctcatacttaagcactaagctccagtccaacatgtcataataagtagagtcatataaagaaaggaatgtaccagttatctgtgagatagaaggtacgggatttgaacttgaagctatagccttgtcaaaacatgaagtgatactaggggactggagcttagtgcttaagtatgagatcagttgttggatgtgatcattagacatagtctcatgtccagtggcagacatagtcggaggtgcctgagtctcaatctgatcagtactagccaagtttgtgcttccaacataagtgttctctttggctcgtggatgacctggaggatacccgtggactttgtagcacttgtccacagtgtggccaatccggttgcaatgagtacattttggtttcttgaagttaccttgagctagtagaatagtgttctgatcattgagaactccttgagtttgaaaagcagctggacttggacttggaactgattttgcagcaaacccaaccaaacgctgactttcatcttgatctagcatattgtagatttcattaagccctggtcgtggcttcatgttgaaaatttgactccgaatagtgttaaaatcatcactcaaacccatcaaaaattgtatcactcgacttgtctctgcctcttctagcagctccttcacttggtcacaatcacatttctttacactgcgagactttgtgttagcaagttgttcccacaaggtcttcttcttcgtaaagtatgtagagagatccagtttgccctgctgaagagtcatcacagcttgttcaagttgatacctcctaggcaaattgttcaccttaaaacgagtaaacaaatcaatccaatttcaacaccatcctcataatataagatactgtcataaatctccttgttcacaacattaagaatccatgacttcaccatactgttgcatctactccagatccgaaaagtagaatcatcaacagagggtcgcaacaaagaaccatcaacaaaacccagcttgtttttcgcatctaagctaattctcattgcaatcgaccaactgttatagttactaccatccagaatatgagctacaatagataaacctggatgatcggaggaatggaggagcagtgggttttcaccagagtcagaaaccttaaacccatttccaccataaacgtccgatcgttgagctagctgttgtttcagtgtcgtgagcttctgatcttcaaggattgctgcttcacgaacagatctgacagctgaaccttcatcatcaggtgtagaaccgcgagtcttcatttttcctcccttcttcaccatttttcttcaaatccaaggtcgcggaaagacaatcggagaagaaagaagatcagaaaaggtgtgattaagaagaaattgaagaaacgatggtgaaaatcaccagatttgtgtgaggaaatgctctgataccatattagaaatcatgaacaaagagaattgtagaatgattttctatttcctcgaagaataaatgtgttacaatgagagtatatatacaattactctaaaccatctaaaccaatgtacaatctctaaatagctaaaccaatctaatcaaaccggaatactatatacaatctaatagtataagagacaagagcttaggcagtcaaatgtttgtgcaagtttaaggcgaaatcaaaaagagtaaggaagcgaaaaaagagaagaggaaacgagaggagaagctaatggcggtgatacatcctgagagaaatgcaaagaagaaactcaagttagctgcaaagaacaaggctaacaagaaaagaaggattatgagcaataaaatggatagatggtcacactcttaagctcccataaccacattaaaccatttttgtttatgttaacatagaaattattatttgagattagactttttcaggtatttatgatccatttttggtctgttacaatccaattctaaaccattgcatttaacttgtttcttagcagaaaaaaattccgacatttatttgattacataaacttaaaagagataaactttattaaattatgattactaaaaaaaatatttaacaagattatcaatatgattacgtctgttaaaaacaaaaaaggaatttgccacgtggcgacactaaaattacgtaatgttcaagtcaatcaccggcgatgtggcttttctcgccgcgagttgaggcggttgaaattgagtttcgagacgacgtcgtttccaagtaaattgcactagcacgtttaaaaaaaaaatgcaataagaaaaataaaccatgagttcgtcttcttaatacctaaattaaattcgatttttgagacaaagctcgacaagtcgtcggcggcggtgtaaaaatagtcggagctatggcgatgcaggccggagttggcttatccaggatctttctcttagccggagcaggtacttcactttgatttctctgctcaatctaactcgctcgtttacttactgctaattgggatctgtatatcctcctgatacgtttttcgatttgatggaatcaaggttacactggtacgatcatgatgaagaatggaaaattgtcggatttgttgggtgaattgcaggtacttttttgattctatgcatttttttttttgtttctctccttgatttttttatttttgactaattgatttgtgctttcgatagagtttggtgaagggaatggagaaatctggagaagggtctgagggagattctgatgtttctgatgctatagctgcacaggtacataaactcatattcattggatataggaatattggtgagggatggtattgatatcttttgcaatattggtgagaaggttcgccggttggctatggagattcgacagctagcttcgcagcaacacataacggtcatgaatggagtttctggtggtatgtgaagattagggatttgtatttctactcaaatagttttgctaagtgtgtctctgtgtgtgtgtgtgttcatcagactctcttgttttttcagcaaacctacaagcccttgctgttcctgctgcggcattgggagctctcggatatggttatatgtggtggaaggtgggattactaagttttcaatctcttctcttgtgaattctgctgttttgttgaaaagagatttcagtgttgtaagggaactaaaaactgtttgtgattgttcactgattagggactctcattcactgaccttatgtatgtgacaaaagccaacatggctgctgcagtggctaacttgacaaagaatctggagcaagtttctgagactcttgcggtgagttttttttgttgctttgtgtatggtgtttctggtgatatattaagctgcagggttaaaattggatcttaattggttgattgtcaggctgcgaaaaggcatttaacacaaaggattcagaatctggatgataaggtagaaaagcagatcgatctctcgaaggaaatcaatagccaggtatgataatgatgatgtttaccttctctttagttcctatgattagagctattggctttcattgttatgcatctgtagtgtcttgaacagttttggaacgtgatgtggttgtggttatgctacacaggttatttctgctcgtgagaatatcagctcacttgagatggatttggaatcattgcataatttgattactggactggtgagtcttagttttattttgttatgccatatataagcaatgctgaatatcaatagttttcttctctttcacactcaattggcatgtgctttactgcatctgtcatgattaaggcgattgcagctgtgaatcattcagtctttaagattagataaggaatcagaatccttctctatggcatttcactccttttagtatatctcctaattattttggcatttaaccttgttttgcaggatgggaagttggacacgctggaatacaagcaggtacattcatcttttatgttctattaagcaggcatcattacccagagaatcaccaacaattggtaactcagtactgattctaattctgtttctggtggcaggatgtcacaaatgttttcatgctaaacttgtataactattttggaggcaagagcacaaagctgcctgaaatggtaattcagatatgggatatgtaaaatcgaattgatctccctatttctctccatagttatgactatgtctatttttggtgttaaaacctaaaagtgttctaatccctttttctttaatatctataacttttgcagtgcaaatatattgtatagttgtttatcttacaaagcaattaacttaatcttacaggaacagcttcagcttcctgtaaaccagagggctcgtaatttgcttgcagatgttgaaactaaggtgtcttttctgttttatttatttaagaagtcacgtttgcttgtatttaacgtgattgttcgcactattctaacaaaataaatggaaacttcttctcttgctgataacaatatttcgtccaatctgtttcagggtctgaaaaacttggctgaagagctgtttaaaagcaatggcacacaggtgacaaccacagtgaaacaaatcagtttgagtaaagtgaatgtgaagtcgaggccattgttatcaaggtttggtcactttgcttcactgtctctgtcttgtgagtttcatatgttgatataatagaggtgtgataaaggaaatgtgaatgcagggctgcttcagctaagtgttgatatggaagttttcctgatggcggtttggcttgcgggatgtatataacaaaactcttacttatacaaatggtctcgtgagccgtagaatgctctcttacatctattcgttggtttggcttttttcccccaaaacttgggtcttatgatattttggtttgcactttggaggtttttcctcgaattggagtttgtttattgacatgtgtagtgtccacttttgaactttgacgcaatttaaaataaagtacatgtggggaataattatattatacctaatcatgtgatgcatgtttgcaataaaagtggttaataggttaaaagtttatggtgtttccatagatgtatgtacagagttaaataatcaactatttctggatcaatacatttaaaagagggtgataaataactgggatgccgcgacatgacgggcaagtggagcataactgaaaccacttgtcaatgcaaaaagcgtggaactgatgtccacaatgtggcaacactctcacaatgtcactaaccatgtaatcctcaagacatatcacacatctactattacataacctcacaccacattcctgcgagaatgttaatttcgggagagacttcaaaatctccttcttcaagggttttgttttctgcctaaacctgcagttgcagtagtggaatagagacggtgtaaacgatcattccgattaagagatagagtggtaatgaatctggtgacttcaagaaaccaacgatggtcaggtcagggtcattaggcaaatctgctgctacggcggctgcaggggaaatagcgaagggagaaggaggggatgtcatgagtgtaagagtcctcgaagagatttgctgaaagaagctt

SEQ ID NO: 60 - DNA, 111390 bp, Arabidopsis thaliana
aagcttgtaaaatgtgtcattttggactaattaattcaagaatcttcatgggatcatgtgcatttccttaatctaatgttttattggttactgtaatattctaaggatattttcttatacgcaaattttaaatctttgacatttagggtgacggttcttcatatgccaacacgcaattccacttctctaagaacaattagttttaaaatgtaatacataataattcaatgactctaaccaaataaataattacctgtaaagaagaacttgttatgtggccatgtgcatagaggtttagttccctaatgaagtattcacttccaatggacacgccgaacatacattgaccacaggaatgtaatgcggaaagtatcaattacttcttcgatggaattttatattccatttgttatgtactatacattcttaagaaactaagcatttattttaaaaaaatttaattagataattcattaacttaaaataaattttaattttatactattagatttaatttattatagtttaatttaatttaactcaaattaatttaattaaaataaacttaatttttcattttattttaaattgctgattaaaatcaaatttatttatttagttttatttttattgtatattaaattaactagtttttttttttgtaattttagcattcgctggcaaccaatgactaatgaatgggaccagtcgcaggaggtcgatgaaatttcactcgtatatgtattctcattttcttttatttacgaagacaaagatgatatgatgatttgatgatgctgcggtcactactcgctgcttctttacatccaattcaaattataatgcctctatgattttctgcaaatacttatctcttaaggagtattaaaatgggaattatttcatcttatatatagttaaaccataatctctcaaaagtaatgttcgtgatcgagtcacgcattgaaataaattaaccatattttggatatgcatctttggaagtgaaagcagaccaaatcagagatgagtgttgcacacgtttgtttctgtttgaccattctcatattacttcaacttttgtcttttatgttgtttttgttctgccctgttttctttctcattgcaatgtctctatcctctgtttcttcttcccatcttctctctgttttacttttaatcttttgtcctgtatatgaaactttttatttgctacattggatatgataatttttatttcaattcttgcatccaagttttatttactttctctgagtttttctaatgggaaattgctttgggttttccgcaaaagtaggtaatagagaaagtccttatcgtggtatgcaaccaaacatctctcttctctaagatttctctacttcttgtcatatcttatttctgattataaagtcttaaattgagttgagacatctttgatttgattaactgttgattcatcaggttcgtcaagaatctctgccaaaagaagtcaatcgtctcggctttcaagcttaacaatacaatcatcatcttacaacgatgacacgagtgtggcgtctcttcaaacgcctagaagtgaaggagagctcttagcatcgcccacgctaaaggcatttacgtttaacgagctaaagacagccactaggaatttcagacccgatagtgttatcggtgaaggcggtttcggttatgtctacaaaggatggatcgatgaacgcactttatcgccttcaaaaccagggtcaggcatggtcgttgctgtcaaaaagcttaaagaagaagggtttcaaggacacaggcagtggttggtacgcttatataattaattatcctctgaatcagttttaggtctttagccgtagaaaccaaaatcgaaacctaaataaggaattgttgatttaacaggcggaggttgattgtcttgggaggcttcaccatatgaatcttgtgaaactaattggatattgctcgaagggtgatcatattcggcttttggtgtatgagtacatgccaaagggaagcttggagaatcatctctttagacgtaagaaaacttgtctctcaagtaaagatcaatgctcaaattatctcgagagcctttgcgaatgtgatagcaagattcaaatgtatagttgttattgtataacagatttagaaaatttagttggttttatattcacaaattttcatttattttaaaaagttgaaatcaggactattatgtgtaggtggggcagaaccgattccgtggagaacaaggattaaagtggctatcggtgcggcgagagggcttgctttccttcatgaagctcaagtcatatacagagacttcaaggcctccaatattctacttgattcggtacaactggataacaaatttacatgtttttgttcatcaaatttcaatcatagaaattttgagatttaatgcaaaccaaacaaaataatatgttgagtttgattgaaaaataaaactaatcggttcatgacatattatggtttaagttttggttttgaccgagcacttccgtttgatttatatgtccatctttacgtaggaattcaatgcaaagctttctgattttggattggcgaaagtaggaccaaccggagacagaacacacgtatcaacccaagtgatgggaactcaaggctatgcagcacctgaatacgttgccactggtcggataacagccaaaagtgacgtctacagcttcggtgtggtcttgctagagttactgtcgggacgtctgaccgtagacaaaacgaaagtaggagtggaacgaaatctggttgattgggcaataccttacttaggagacaaaaggaaagtgtttaggataatggacacaaagcttgggggacaatatcctcacaaaggagcttgtttgactgctaatactgcgttgcaatgtcttaatcaagaacctaagttgaggccaaagatgtctgatgtgttatctactcttgaagagttggagatgacgttgaagtcgggttctatttcaaactcggttatgaaattgacatcttcttcctcttctttcacggcgaaacagagagtaagaactccggttgctgatccggtgttgtctagtagacgatgtcgacgtgttcggtgaagtagcgacagagatagttaggttttatgagtgcatgcatttttttttgttttttttccctggaaaaggtgacatatagctgtgtgcttgtttgattttccatatattatttctattttatcaaaatcagattttgtggacattttcatttgtattcttctttaatagtcctctttagttttgatgataacaagtttgtttaatactttttttctttcaagtttgttctaattctatattgttcttagttcttataggagtaggaatatttgaagaattgtaagggtccacatatctactttttgacaaagcattatttataaatggtgaatattttgaagaacaaatatatatatattttttttctaaaccaaaatggttaccacaaatatgttaggggtatttgtatgacaaagaattattagtaattttcctaatgtgtcataaatcctccccaatgagggacggaaatatcattgtcaccgagttttaagttgtttcattttgcaatcataattcacaactaattttgttttggtgcacattcatcccaaattaattttcgacaaaattactaagatttgggagagaaaatcccatggctatgaagttttttccaatgactaaattcagatattgcatatgactaaagtaactataacaaatttggaaaatagatagaataaacaaattgttaattaacaaaaatgctagtaagtaataacaataggaaactacccgacgatgtttgaataacttgaaaataccaaatatcatccggagttcctctaaacacttcagtaaaaaaaagttaccgaacggataacattttttcaatgaattgctgatataagaatgagagttgacgtgaaagctaatggattcactgatggaccagctgataaactttatgaagaacttgctgatggactagctgaaagactttctgaagaacccgctgacgaactatatgacagaccattcctactcacatgaaccacccgaccactttgaagacttcctgttgttttatctcactcttttgaagactacacaacgtttagaagctgcatgaatgaatgtgtcaagctggagagacatgggtttagggatttgtattccaaattcgacgaatgcgaattatttatgtggaacatagttaattgtttatcaaatccaagctatgagacgtttgattatgtgaagatatctccaattgatcaaaacccggtttgatagtaatagttaagatttgatttactgatttacgtaggtatttaatgcaaagctgtctgattttaaatttggattgcacaactagagtaatgtacactatgtttatccatatctatggataaacctcgacaaccgcttatacgtatttaacattacgaaaatgtgttctcaaatgctttgacctttatatctttaagccattcaaacaacaattaaaaccttaaacatctaaaatgataagatggaagtgtttaccatataaaatctcgtctcgacctgcggaaatccgttgaatgggtccgggagttcccccaaacacttcagtggataatcatttagaaaaattgtatccccaatgaagtgctcagaggaactctaggagacatccaaccaagaatattgtttcttgagtatttcatgtactatgagtggaatacgactatacgagtacaagaggttgatgtaagttttgagaagatgaaagtagttacgtttctttatatatagactatagttaaaggcttaaaggataatctccatacatatgtctattattacacagagatagcgagacagagagatcataagatgatgaccaaggaaagctttttgaatatagacgcaattttgggttaaaggaaagagtaaaaagaatacgaatgttgaagaaaagtccatacggcttttcacatgatagaaaggatgcaaaacacgtagagattctgttttataatttatatgcttttagtacccataacggttatttctcactacattctcctgcttgtcaatcttttaatattttttaatttttaatgttatgactatggagaaaagcttatggatgttgatattttttcattaccaaaaatccattttatttgacattttgtcccgcactgattaaagaaatgatgaaaaacgaaaactagctgcctacatatgtggcgcatcgtatgatatgtaccaactagatattgcatggaaaaggtgaaagtcccctcaaataaatgatgttaaagtcgatcagctgaaataaattaatgcttacctttgtatggatcgtttatgaaaaatatgaagtagtaccactttctttagtctatacaatattctaccatattttttccaaagtaaaattctaataatatatactcccacattctatattgtttaactacctttgtatggtaagattaaatggtctgatcatatttttttctttaatcggaaattacgttgggaatatgatgagtggcagcaattaaaaaagagtccatgtaaagaattttctgtcgtttcaaaatatttcaagcaaattaatcgaaggaatatagaatgaatatttggtcaaataatatctaaggacaaggcccaacatttcgactcgattcatctttcaaatttccacacgttctttagttttatgattcgaatatatgattattggtcccattatgaaaattctcattgaaaaaggaagaactggagacccttagcactgatatataaataggtatgaagttattgttgtttatatcaggacagagctacaagaagagagtcaaatgtccccatgagttccctttaacgcttcattgttaaatactcaaagccacattggtttgtatacaacactgaagtgtttggggggactcttggtgtcattctggcgtagtgaccaccattgcagccgttttatgggttcttttacattagtaagctcttcgtactatagatatatttttttcaataacaagtaatatgtgagacgaattcaaagtggtgatacaaatacaatgatgacactagctaatgtaaaccactaaactataggtcttggtcagatttatagttgttttctcattaaaaaattaagggtccttaagttttgattctacagaaagaaactttaggcctaaatttgatattgaaagttgaaacagggtgtttagatttcatagagttacaagacttttacaaggatagaaatagttatggtaactaaactaacacattcgtcttcttcccacttcacgaccacttcgttcatcaaaattaagcttacgctaaatatttaaatatcattagaaatgaaagttaaggcattgcaagaaattattacctataagagagtaatttggcaacaaaaaaatataagtctacaataaagctacacaaaatttggtgtttaactatcggatccaaaggagcataagcttccgccaataatttcttagtcttccagaagagatagtgttacggacttggcgggggtgatgttcttgaagatgatcgttggagcgattggctgcgagttgtgatagaagttattctgttgcttccgtatgtgaaaaattaccgctagagctgctacttgatgcatacaatgaattttatttaatgtactattatactattattcagctgaagatgtttttttttgacaaattgttattgtaactttcattttcttgcaagtatatcacacgtggaaatatgtatacaagaggttgacatatataaggttaaaaaggtcgatttagtttctctatattgttaaaaggcatagagaataatcctcaaatcctttgagacagagatagagagcgatcaaagattatggtcaccaaggagagcactttgaagtttgaatatagacgcaaattggggttaaaggaaagagtaaactagaatacgaattctgaagaaaagtactaaatcatgcttttcacaagatagaaaggagattctttttatagtgcccataccggttcttgaatattgtcctcactaaattttgttaattataatatagagaaaagcttaattagtgatgttgatatcaattctctacaataaagtccaagaattttgctaacatattgatattttgttcgtgcgccgattaaagaaaattttgtttatttatcaaagatcgattgttctttataaactaactagctaacaaacaaaaactaactaactaagccacatatgtggcgcatcgtatgatatgtataccaaaaatatctcactgaatagatgaaaagtcaaatagatgatgacggaatcgattaactgaattatatgcatgacgtaggaacataaatcccttattattgtaaaggttaacagatttatttttcaattttttttgctaaggactccctgataatgactaccgtgatatatgattcttacttaatacaattttttcatatatattgaaaaaattgtataaaatatattttcaatttgcctctaccattttcaatgatatttaaaaatgaaatattaggttttgcatacttttaggcataaagtatataatattttcacatacatgtaaaaaaaaaatatatatatgatataatgccacttttaatatcaataaatgtcaaatcatctatataatcagagagttttctctcctcctaagttgggaacctaaactaaattaacaaaaacagtttacattaatatcttatgaaaacaatcaatttacattattattaattataattcgtagaaaattaagttaataaaatgcaaaaacaatgaagtaaaattatgaaaattaaattagtaaatataatcttcctccaatttttgttttgttctctcggtatgattttacattcatcgatcaggacaattatcctccaaaatttattactacttgctaaaagagagtactacttttttttttctctttcccaactatatgtttggcctttatcatcattcaatggagcgtaggatacatagcttatacatgtaattcactgttctgatttgtaaacattaatcaatggggaatatttggtaatagcagtgagtggaaattaaaaaaatgaaggagaaaagacatatcagaggaaagagtccatgcagagaatacttatgtcgtttcaaaatatttcaagcaaacttagggacaagataaatattcggtcaaatatctaagaacgaggcccaaaatttcgactcgattcaactttcaaattcccacatgttctttgattgtatgattcgaatatatgattattggtcccattatgaaaattctcattgaaaaagaaggaagaattagagactctttgcaataatatataaataggcatgcagtgttagtgttgtttgtatcatgacagagcaagaagaagaaagtcaaatgtccacatgagttccctttaacgcttcattgttgaatactcaaagccacattggtttgtatataacactgaagtgtttggggggactcttggtgtcattctggcgttgaagtggccaccattgctgcggttttctattatcttttaaatcattagtaagctctttttagttaattccaaatgttttcatgaattttgtatttatcatggattcatggtgtggacctgtggtatacattattcattgaaaccacaagtaggattaccaaaccgttaggtaattcaggttgatttgagttacaccttcaaatttatttgtttacacccaaacctaaaattattttggtttggtttggtttggttaaaaatctaaatatacattttgcagccattttgtgaaataaatcttgtagttgagatttatttataatgactgtcactcgcatttattatttagttttacaaaattttaaaatgatattaaccaaacaatattttgcctaatttgtttctaaaaatctctacacaatcttccatatatcttcaaaaacaaaatccatgaattattggatttaaaacaataataatttattttcttggattttgtaacactaataatttagctaagaagataatatagacgggtttatatagaacgacgggttttgatcgatatatataaagaaaagtatatcacgaatgaaatcctaaaatgaacaatcaaaatacaattatacaaccaaaaatacaaaaaaagcatacaatattaacaaaataaatataacttgaaatttaaaaaatttaactataaaaaatcgaccaacagtatactacagataaaatattcaaaattttaaaatcaaccatacatcgttacttaaaaaaatatatcaatataaataaaaaaaacagagacaatagaattctggtccagtcttgacaatgatgagcaagtggtgttcctcagtgcaacctgaaagtctaattttctggctctttcttcaggccaacacagtgaaaacgatgtgaaaaatgtattgattggaagtttgctcaaaagaatgggcttgatagctcttaatatggactctcttcagatgagagtcttcaacgtctacaaagcatttgcctcacaattgaatcaagaagactgtcgcctatacgccttcagaatcatgctcccgttgtacaaagtttgccaaggatttaccggaaaagtcatcacagatgaattgaaacagctagcggaagatgtaagagacaatatatattagaaatcatgaacaaagagaattgtagaatgattttctatttcctcgaagaataaatgtgttacaatgagagtatatatacaattactctaaaccatctaaaccaatgtacaatctctaaatagctaaaccaatctaatcaaactggaatactatatacaatctaatagcccccctcaagcttgagcttcataaatgttcagaagaccaagcttgctgttgttttcccggaaaggtttcggatatagaggtttggttagtgtgtcagcgagctgattatcagtcctgacaaatatcgtcttgagaattcctgcttcaatgcactctctgactttgtgacagtcattctcaatatgtttggttcgctcgtggaagacagaattattcgcaatatgtaaagcagcctcattatcacagtataagtatgcagggtgtgtgaaaggaatcttaaaagctgtgaggatgtatcccagccaaatgagctccttagtagcaacactcattgcacgatactcagcctcagctgaactcatagagaccacgtcttgcttcttcgagcgccaagaaaccagagaattacccacaaatatagcaaaaccagtaacacatcttctagtatcaggacaagtctgccaatctgaatctgagaaacctctcaagtcaaagtttgtatcagcgccataaaagagaccctgaccaatagtacctttcaagtatctcagaatcttgtgaagagcctgaagatgtatatcagttggagcagaagaatactgggcaagcttcgagacagcaaagttgatgtcaggccttgtcaagcagagatattgtaatttgccaagaattcgccgatactgtttaccatcttcaagtaaagttccagtatctttagagagcttctgattaggttccatggggatggaggagggtttgcaatcagagaaatcagaagaagccaacaagtcaagaacatactttcgttgacataaggatattccatctgcattcctggcgatctcaatcccaagaaagaattttggttctccaaggtctctcaactggaaaaaactactcagttgcgaagttagttcagcagatgcagcttctgtagtactcgcaataagtatatcgtcaacataaaccagaaccaccaaaaagaatccatcttgagctttcacaaatagagtatgatcaccatgacatttctcaaatccaagactaaccaaagtggttttaaacttgatgaaccactgtcgggaagcttatttgagaccataaatagatttgtgtaatctacacacagcattaggagagacttcctgaccttgtatttctgaatatccaggtggcagcttcatgtatatctcttcctcaaggtcaccattaagaagggcattagaaatgtcaagttgatgtaaataccatttcatctttggtgcaagtgaaagaagaaccttgactgtaaccattttagccacaggagagaaagtattaaagaagtcaatgccctcttgctgagtgtaacctttagctacaagacgcgccttatgacgttcaatacttccatctgctaagaatttgatagtgattatccatttgcaacctactgcaactttcccagcaggaagatcacatatgctccatgtacctgttctcacaaatgcactaatctcctttcccatagcatcattccatactttgtccagcctagcttcagaatatttttgaggtaattttgtggcggtgattatattaataaaagctccaaaaggctcagataaatatgaataagaaatataatttgttaatggataaggggaagttttagtagtagtaggagtattattatagcaatgaaagtcctgcaaatgggaaggcagttttctctgtcgagttgatttaggttcagaaggaacaaaaatcatggatgatgactcatcatgattgtgaggagcatcggaagatgattgcactagaggcagatgttcatcgttgtttggtgcagggagataaatatgaggaaagaagtcttttgcagcatccgtgatattagatgaagcaaaaggaaaaatatcctcataaaaaatgacatgtcgagaaatagaaactgagtatgtctctatatctaatagcttgtaccctttataacccatcggatagcctaaaaatatgcaagctttggctctaggatcaaacttagtcctagacttaggagaagtagaacaataacataaacacccaaaggctttaagactagagtaatctggttttcccttagttagtctttcataaggagtttcattatttataacaggtgagagtaatctattaataagaaacacagctgttaaaacacaatctccccaatattctaatggaattccagattgaaacataagagccctagcaacattcaacaggtgctgatgctttctctctactacaaaattttgttcaggagtttcaggacatggatgatcagctttaattccttctttagcaaataactcattaaattttaattcatgtgcattatcagacctaactgaacaaactttagtgtgatattgagtttctaccattttcaggaatgaaggaaaaacagtgagaacatcagatttctgtttaagtaaataaatccaagtagcacgactaaaatcatcaacaattgtcaagaaatacctataactatcaacagttggcacagaaaacggtccccaagtatctatatgaaccaattcaaaagctttttcacgaatgtgattcacagatttaaaaggtaaatgtttctgttttgataaatggcaaacatgacaatgagaagaatctttattaatcttttgtttaggtaacatcaaaacatcagaaagagtatcaatctttgcaaaagaagggtgacctaaacgtttatgccacatttcagattcattcttaacactagaacatacagacttaccaggaaaagacgacacatcaacaagacttttatccagattcagaatatataagttgccgacttgactacctttgccaagcatcaattccttggtaagagcctgaatcatacattcatcagatgtaaaactcactttagattgtaaagttttagttaaaacactaacactcaaaagattaaatttaaattcaggaataaacaaaacattgtgtaaagacaaagcatcagtgagttgaataaaaccagtgccctctattttaaccgtatggccattagggagtctaacaaaggttctatctaaggctttgtaagtgtggtataaattcctttcatgagtaacatgatgactagcccccgaatctataacccaagctctaagagacaactcagtttcaataggtatagaagaggttaacatttcataataagtagagtcatataaagaaaggaatgtaccagttatctgtgagatagaaggtacgggatttgaacttgaagctatagccttgtcaaaacatgaagtgatactaggggactggagcttagtgcttaagtatgagatcagttgttggatgtgatcattagacatagtctcatgtccagtggcagacatagtcggaggtgcctgagtctcaatctgatcagtactagccaagtttgtgcttccaacataagtgttctctttggctcgtggatgacctggaggatacccgtggactttgtagcacttgtccacagtgtggccaatccggttgcaatgagtacattttggtttcttgaagttaccttgagctagtagaatagtgttctgatcattgagaactccttgagtttgaaaagcagctggacttggacttggaactgattttgcagcaaacccaaccaaacgctgactttcatcttgatctagcatattgtagatttcattaagccctggtcgtggcttcatgttgaaaatttgactccgaatagtgttaaaatcatcactcaaacccatcaaaaattgtatcactcgacttgtctctgcctcttctagcagctccttcacttggtcacaatcacatttctttacactgcgagactttgtgttagcaagttgttcccacaaggtcttcttcttcgtaaagtatgtagagagatccagtttgccctgctgaagagtcatcacagcttgttcaagttgatacctcctaggcaaattgttcaccttaaaacgagtaaacaaatcaatccaatttcaacaccatcctcataatataagatactgtcataaatctccttgttcacaacattaagaatccatgacttcaccatactgttgcatctactccagatccgaaaagtagaatcatcaacagagggtcgcaacaaagaaccatcaacaaaacccagcttgtttttcgcatctaagctaattctcattgcaatcgaccaactgttatagttactaccatccagaatatgagctacaatagataaacctggatgatcggaggaatggaggagcagtgggttttcaccagagtcagaaaccttaaacccatttccaccataaacgtccgatcgttgagctagctgttgtttcagtgtcgtgagcttctgatcttcaaggattgctgcttcacgaacagatctgacagctgaaccttcatcatcaggtgtagaaccgcgagtcttcatttttcctcccttcttcaccatttttcttcaaatccaaggtcgcggaaagacaatcggagaagaaagaagatcagaaaaggtgtgattaagaagaaattgaagaaacgatggtgaaaatcaccagatttgtgtgaggaaatgctctgataccatattagaaatcatgaacaaagagaattgtagaatgattttctatttcctcgaagaataaatgtgttacaatgagagtatatatacaattactctaaaccatctaaaccaatgtacaatctctaaatagctaaaccaatctaatcaaaccggaatactatatacaatctaatagtataagagacaagagcttaggcagtcaaatgtttgtgcaagtttaaggcgaaatcaaaaagagtaaggaagcgaaaaaagagaagaggaaacgagaggagaagctaatggcggtgatacatcctgagagaaatgcaaagaagaaactcaagttagctgcaaagaacaaggctaacaagaaaagaaggattatgagcaataaaatggatagatggtcacactcttaagctcccataaccacattaaaccatttttgtttatgttaacatagaaattattatttgagattagactttttcaggtatttatgatccatttttggtctgttacaatccaattctaaaccattgcatttaacttgtttcttagcagaaaaaaattccgacatttatttgattacataaacttaaaagagataaactttattaaattatgattactaaaaaaaatatttaacaagattatcaatatgattacgtctgttaaaaacaaaaaaggaatttgccacgtggcgacactaaaattacgtaatgttcaagtcaatcaccggcgatgtggcttttctcgccgcgagttgaggcggttgaaattgagtttcgagacgacgtcgtttccaagtaaattgcactagcacgtttaaaaaaaaaatgcaataagaaaaataaaccatgagttcgtcttcttaatacctaaattaaattcgatttttgagacaaagctcgacaagtcgtcggcggcggtgtaaaaatagtcggagctatggcgatgcaggccggagttggcttatccaggatctttctcttagccggagcaggtacttcactttgatttctctgctcaatctaactcgctcgtttacttactgctaattgggatctgtatatcctcctgatacgtttttcgatttgatggaatcaaggttacactggtacgatcatgatgaagaatggaaaattgtcggatttgttgggtgaattgcaggtacttttttgattctatgcatttttttttttgtttctctccttgatttttttatttttgactaattgatttgtgctttcgatagagtttggtgaagggaatggagaaatctggagaagggtctgagggagattctgatgtttctgatgctatagctgcacaggtacataaactcatattcattggatataggaatattggtgagggatggtattgatatcttttgcaatattggtgagaaggttcgccggttggctatggagattcgacagctagcttcgcagcaacacataacggtcatgaatggagtttctggtggtatgtgaagattagggatttgtatttctactcaaatagttttgctaagtgtgtctctgtgtgtgtgtgtgttcatcagactctcttgttttttcagcaaacctacaagcccttgctgttcctgctgcggcattgggagctctcggatatggttatatgtggtggaaggtgggattactaagttttcaatctcttctcttgtgaattctgctgttttgttgaaaagagatttcagtgttgtaagggaactaaaaactgtttgtgattgttcactgattagggactctcattcactgaccttatgtatgtgacaaaagccaacatggctgctgcagtggctaacttgacaaagaatctggagcaagtttctgagactcttgcggtgagttttttttgttgctttgtgtatggtgtttctggtgatatattaagctgcagggttaaaattggatcttaattggttgattgtcaggctgcgaaaaggcatttaacacaaaggattcagaatctggatgataaggtagaaaagcagatcgatctctcgaaggaaatcaatagccaggtatgataatgatgatgtttaccttctctttagttcctatgattagagctattggctttcattgttatgcatctgtagtgtcttgaacagttttggaacgtgatgtggttgtggttatgctacacaggttatttctgctcgtgagaatatcagctcacttgagatggatttggaatcattgcataatttgattactggactggtgagtcttagttttattttgttatgccatatataagcaatgctgaatatcaatagttttcttctctttcacactcaattggcatgtgctttactgcatctgtcatgattaaggcgattgcagctgtgaatcattcagtctttaagattagataaggaatcagaatccttctctatggcatttcactccttttagtatatctcctaattattttggcatttaaccttgttttgcaggatgggaagttggacacgctggaatacaagcaggtacattcatcttttatgttctattaagcaggcatcattacccagagaatcaccaacaattggtaactcagtactgattctaattctgtttctggtggcaggatgtcacaaatgttttcatgctaaacttgtataactattttggaggcaagagcacaaagctgcctgaaatggtaattcagatatgggatatgtaaaatcgaattgatctccctatttctctccatagttatgactatgtctatttttggtgttaaaacctaaaagtgttctaatccctttttctttaatatctataacttttgcagtgcaaatatattgtatagttgtttatcttacaaagcaattaacttaatcttacaggaacagcttcagcttcctgtaaaccagagggctcgtaatttgcttgcagatgttgaaactaaggtgtcttttctgttttatttatttaagaagtcacgtttgcttgtatttaacgtgattgttcgcactattctaacaaaataaatggaaacttcttctcttgctgataacaatatttcgtccaatctgtttcagggtctgaaaaacttggctgaagagctgtttaaaagcaatggcacacaggtgacaaccacagtgaaacaaatcagtttgagtaaagtgaatgtgaagtcgaggccattgttatcaaggtttggtcactttgcttcactgtctctgtcttgtgagtttcatatgttgatataatagaggtgtgataaaggaaatgtgaatgcagggctgcttcagctaagtgttgatatggaagttttcctgatggcggtttggcttgcgggatgtatataacaaaactcttacttatacaaatggtctcgtgagccgtagaatgctctcttacatctattcgttggtttggcttttttcccccaaaacttgggtcttatgatattttggtttgcactttggaggtttttcctcgaattggagtttgtttattgacatgtgtagtgtccacttttgaactttgacgcaatttaaaataaagtacatgtggggaataattatattatacctaatcatgtgatgcatgtttgcaataaaagtggttaataggttaaaagtttatggtgtttccatagatgtatgtacagagttaaataatcaactatttctggatcaatacatttaaaagagggtgataaataactgggatgccgcgacatgacgggcaagtggagcataactgaaaccacttgtcaatgcaaaaagcgtggaactgatgtccacaatgtggcaacactctcacaatgtcactaaccatgtaatcctcaagacatatcacacatctactattacataacctcacaccacattcctgcgagaatgttaatttcgggagagacttcaaaatctccttcttcaagggttttgttttctgcctaaacctgcagttgcagtagtggaatagagacggtgtaaacgatcattccgattaagagatagagtggtaatgaatctggtgacttcaagaaaccaacgatggtcaggtcagggtcattaggcaaatctgctgctacggcggctgcaggggaaatagcgaagggagaaggaggggatgtcatgagtgtaagagtcctcgaagagatttgctgaaagaagcttccgacgaagagaagattacgatgttatcagggcgtacgtatgtatgtgtgtttgaccttttcttgttacagtctaaaataccttagattattgagaattatgtatagtttatatttcttaatggcgaatgcatacattctttgtttatggatttttttttataggagtttacttccaataccaatttgaagaaggaattgtgtatattcctattcattgagggaaaaacaatgtattatttttatacatattaggatcatgcataaaattgtgtatttgaattacgttaactctctattgaccattgttgagtagagtgacaccaatagagaattttctttttcatttaaaacctctcttcttaatgttatcttcttttgagtccttgttctcattaactttgtttttcttaagcaaattataaattattttttcttttattataaaacgacgtctattatattctataaggaagccaaaccaacacaagtctaagaatgttttgtttgtacgcagaaaaatgttagactacagttttattattcataattcatagtactaaagtaattttttgaagaatgattttctttaataaggtatcatcaacatatactaccaaaaatatttaatttatcccactaattttgaaggcatcacgattaataatacgtgcttaaaatcttaattccgtaataatgctacacttttgagaaatttgttaagtttatgatagtttgtatgatagccatcttttgactgatctagtcggacataaccaaacacccatttactgttattatcatctggaaacccaatgagaagataagagttttatgaagcacacaagtgagaaacaaaaataaggaacatatttggttggatctatcattaaaccaaagatagataagagggaaacgaaactggagtaataatcaaaatacaatctaccatgtagatagggaaaatactcggtggttttagttgaaaaatgtaaatagttgaaagttatcaaaattttctaatatttaaacaccaaagttgaccaagatggcaaaaaggcaagaaacaagaaaatgaaagacaactatcgttatgatacaaatttgaccaaaatgaagatatgataatgtttccaaaattctcgatgcaagtagttcgctcaattatttgataagaatgatttccccactagctcaataaaaaacaattaatccttgtacgcaagttatcatagtgaagcattgacactgtgacccttggcattataaattacgaatttaagataaagaagagaagaatcaagcaaaagttgtgtttctcataaagatctcaaagatattcctactacacatgggttctcttgacttgccttacgcttcatcgttcaaggtttttttctcagtttatatttataaaaatcaaatgaattactcatcactataacacactaattatgttgttatcagggaggaagtgaaacctttctccagaatgtatttgaaagtatactgaaaacgtatttgaggaagaacccgatggcgaagacgatatgggaactagttaagtcggtggacaacgaaaagatctcttacgaccacttctttttcaggacatttaaggtatgaatttactcttcaaaaatttggtgaaattgtgtgcaggaggatctaaaaccttaacaaattggtcaaatatattgattagcaagttctttgcaaatacgattatagtaaatctacctatttaacaattaaaaaagtggttttatacttttaattgatgcctttgcaaatatatacttttcttcaagctcatcttgtaatccttgagatcttctaacattaacggcatcaattaaaagtataagcgctaaatggttttaattttatacttttatgtcagcaatttttgagacctgttttttctattttaccagtgtatttgttagtgggctcaaattttttaatttttctttaggcccgaaatacttggggccggcctgattgtataaattgattttttcttttttgctttgggggtgtatgggtttaggtcgatggttatggaattgattccctggcgagttttttcatggattatggatataaagttggaggcagacttgattttccaaagaagaaagtacaagttctctggctttctcctccggatgttcacttccccgataatggttacggtattggcaatggccctttgccaagacttgttatagctgagcttcttgtggaggaactaagccctgagtcacaggtattagtgatcacaaacataatgttgttataatgagtctttaataatacataataacttttttgttggtcctaatttctggttaactaggagataataaggaagtatttgaaaccggaaggtggtaagcaagctgttctttcaagtactttggggtctttaatttgggagaagccaacatccaccgatttcaatcaacttgccaagtatatgttctaagtttataatcaataatcacacagtatctttgatggttagctaatttaatttttgagttttgtaaatttttataaatgatgaagagaaagcgaatttgccgcatggacgcttgtctacggctacacaatgaaccatcttgctttcgcggttcatcgtcttaaacaccgtttcagcgacatcaaatgcgtcaaagagtattttgaagaaaacggtttcgaactcaacaaggatggaggagtcctcaaaggttttctttacttattcttcacatgacatctttcatttagattggttctattctataaccattatttaagttgtatggaaaaatatttcagtgagtgaagacagtctactgttacaagtgtcggctatgtcggagaaacttgtggttgaatttgcagacggagtaactcaaatcgtcccggcttcatacattgagttcgttgaacgtctagttcttccacagttcaaagatatgccgtgtgatgaggtaagaagcaattcacattaatcgaattcttttataattagacatttttatatatttccgttgtaatgcagatcaaagagtttcatagacgcgagggcttggagcaagctagcgcctaccacataatggaaagcacccgtttcacagcgtaaatatagaaccagcttgttttgttccgctcaatatgtcaagtatgtgtacgtactattaaaatgttttgtatcttatttggacaatttgtgtgtgagatatttctgttcttgtgttgtgaagtgacggtataacttaatattacccgttaccgacgaataatggaaaacaaagtgtcatggtggggtgtggtatttgtggtgtttttgcatgtaatatcttttgatagtaacgtgacacttgattttggtgactcgtaacacctcttggggttgaagaccaacgtgcccaatctttcatttaccttagtgtcttcttctttttgcattattggattttggtgtttcacgtagagaaactgacatcacattgtcttttgttagtttttttttgtgttgttaaccttaagtgtttttacgtagttaatatatcttagagaacttaaccttttcatttagctattattcgtttataattatagtttggatctaaattagtctaacagttgtattatgtgttttagaccatcgcattcctcgatcttaaccaaatatcttaacaattatttacaataaaattttgaaacatgacatgtaactgttttttcactcataaaaacctcttagctaagaagcaagtctttaatttttaatttgttttgatttatttttcagaatttaattttaagatattagtctaagatacatttaagatacatcattgaagatggtctactaattagtagcttagcaatttccaaagttggtttaaggatcaactttttgtatcattttatattagtgatcaaaatagttacataccaaaaattatttatttcatttaatatagtttttaccccccactagctctggaaaagtccaattatattcttgtcgttagcaatcattgatccttggctttttttcccactctttctagctgtataaaatacgaatttacgataagatattagaaaaaccaaacaaagctgtgtttctctcgtacacttaaagcatcgtcccgcaacggttctcttgacttgccaaacgtttcataattaaattttttctctaattatgatttacaaaaacaaaaatcacgataatccatgatctaactataagagggagtaagagaaacatttcacttggtttttcttactgagtactgatataaataaatatagaatcagacaaagattcgtttgctgaacgattttatataaatttagtccttacctgcgcagctaatcatcgtgagcggagcgactatgcgtcaagaaaaaaaaactaaaatactaataattaagtgactccttctctctccttttttttggggtatgcaccaacctttatttataagtataagcaagaataaataagaacaacaaagcaaacggctcatttctcagaaacaactcaaacatgggttccttcgacttgcctcacagttcatcgttcaaggttctttctcaaatttatattttttttgaaggagaaatatcttttgttacgataatacacaatctgcatctaacagggagaaagtgaaatatttcttcggaatgtgttcgagaatatattgaaaacgtacctaaggaagaacccgacggcgaagacaatatgggaactggttcagtcgttggacaacgaaaagatctgctacgaccacttcactttcaggacactaaaggtaataattttactcttcaagatttggtgaaactaattgtttaaattattattttgtttttacttttttttctttggggttatgagtttaggtcgatggttatggaatagactccttgtcgagttttttcatggcttatggatataaaattggtggtggacttgattttcccaagaagaaactacgagttctttggttttctccacctgatgttcacgttcctaatgatggtcacggtctaggcaacggccctttgccgcgacttgttatagctgaggttcttgtggacgaactaagccctgaatcacaggtatatatgttgatcgcagacacaaaaatttcattatgagtttttaacatatctaatttcgcttttgttggtcctatatattgattaggggataataaggaagtatttgaaacaagaaggtggcaagcaagcggttctttctagtactttggggtctttaatatgggagaagcctacatggaccgacttcaagcagcttgccaagtatatatattaactttcaattaatagtcatatatctttacttgataaatttcagaaaagtaattcattctatcaaaatctaacagctagctaattgtaaatacattaatttattttaaataaataaaaatgaatactcttacacgaactatactgtattactctactagtacatatttagtaactaactatttattaaataagattttgggtgataggttcgatggtattaaggacaagttttgatgaacaagtacaaaaaaatggtagtttctaacaaagctttgagaaattgatagatcagcacttaaacagaaaaaaaaatgatagatgaacactatttttttctgaaatgtttataaaaaaagaagaagaagtaagaattgagttttgtttttgtttttaaatttttttattttataactattttaatggttagagctaattatttggaattgtatgtatgaatgatgcagagaaagcgaatttgcggcatggacgcttatccacggctacacaatgaatcatcttgcttttgcggttcatcgattcaaacatcgtttcagtgacatcaaattcgtcaaacagcgtcttgaggaaaagggattcaaactcaacagtgacggagaaatcctcaaaggttttttaatacttatattcccatcatgagttactttcttgaaacgtttctatttaaatatgttgttcaatagaaatgattaatgaatgtggacatacatattgcagtgagtcaagatggtctactatttcaagtttcatcgatctcggaaaggcttccggtaacatttgcagatggagtaactgaaacaatcccagcttcatacattgaattcactcagcgtcaagttcttccagagttcaaagatgtgccgcttgatgaggtaattgatgtaagaaagaatcgcgaaataaatgatttgcattttttcgcattattttgtttattcagaatttttttcattgccatgcactgtgatgcagatcaaagaatttcatagacgtgaagcttttgaactcgataacgccaaccacgtaatggaaagcacccgtttcacaactaaattctagaaccagacttgtcttgctcgacttagtatatgccaaatttgtgcaactatatatgtgagtgtgtgtttgtgtgcaatctttccatatatatgcatgtgtgtatttgcgatatctttatgttgttattttactgtgaagggacaatgtaagcatatgttatctctcatgatggtaattgttgattagagtgaccaacttgtaaaatggatcacatgattgacgaatcatgggaaataaaatgtattttgtgattgaaatatgtgatatttgtgaagttttcgtctctctcttaaaataatttttatgggtgtgattgagtgtatgtttgctataaataggggatttacttggacaattttaaaacattaacccatatttgttagtatacaagtttttagtatcttgtagagatatggtataactgttttttttgcagctataagatgcactagattttaactcgcggtacaccgtggggacaatttattttttaaagttagtatatataaaaatttataaattgtatctatctataaaatatttttattttatagtttacaactgttattaagtaacgtcctgccaaacccgtcccgcaaaacccatcctgcaaaaaaaactatttattttattaatgttgatcttatttatgaatcattgtctaaatattttagtcgatgcgggatgttgaacccacacatttttcgccaattggttaatatatgttcatttttaaaattttgaatcacaaaatatgacggaattttttttgagattttttaaactatatattatataatgatgttaaattttttgatatattaaactttttataagtttaaatattaataatgttttataaagtttaaatatataaataataatatttaaaaaaatatatattttttgccttttaggtaatgacataataactctaaaagcaaatatttagaagatttaaatcgttaattaaatatttttatttctaaataattaatgtcaatagcatgacattgtaaataagttcaaatacaagatttatttatttaaacaaaaaacgtttaataagaataatatttatttaaacaaaaaattttgttttaaaatattgttaacaaatacgtttatgctaattttaagggattaatgtgaagtttgtttggattaaatttgattgataatgtgattgacaatttaaattaagaatttaaagtaaaattaattatattggaaaacaattaatgctaatggcattgggttgtaaataagtccaactctaagatttatttgttaaaatggctgcaaaaatgtatatatagatgttatattatatcaccttacttttgctgaatatcttaattctacattctttatattccacattttttttttacagaaaatgtaaagttataattagacatcttttacaatgaattttgttttacaatgaatgtttcatattgagcttagtgttcttaggagaaaattttaaaaatcaaccacaaaacaaattagacgttgagacgagattacggattcctatgacgccgatatggtatttgcgctcttccaaaatcgacatctttttaatctcccttttctattgtttgtttactcacgaatattattgttttcaatgtcgacgtgtacaaatccaaaatcacctctgctctcgcttaatatgccaagtttcacctaccgtttattatgacgtgtttcttgtataaaggcaaaaaatgtaatctaaagatattgagaaacaagttgtattagtttccttaaaaaaaaaaaaaaaaaaaaagagttatattggttaccgactgtttctcagttagattgattcgttccgttccaatatatatttttttaaaattcgggtggtagtataatactttggttaattgatgttaagtttacaagattccagaaaaccgagttaggttaggtgaaaaccaagacctcgtgtatcatgttttttgtttttgtttgtttgttaataaattcacaaaaaaagttcattatctgataaataaaaagattcgttgaatgattttaaataattgagcacatcatgtccaataaatatatatctatctcgtgtataatatttaattaatgttcttttgttaataattaataaaagaattctattatcttataaaattcaaaaaaaaaaaaaaagattcgttcactgattgatataagtaatcccatactgtccagtaaaatatatttattttgtgcatatttttttaaaaagtgtataagtttcaggtaaacaatcggagcagacggttcggattgagcataaaaatactaaaattatgacatatattttaaattttttataatagagtattacttatttttgcaaaacagaattacttttaaagacaaattttttgatctaatagatatattaatatctaaacgaattcggatagacattatgtaaaagatgagtgtttgacactaattatcgactaattgaaaaatcataataatgaattgatgcttatgttatctagtttttatttttattaaataataaactaaaacaatcattataaaatcatactttagtcttactttatcgattcagaaaagcaagtatgattaataaaacgaaggtttatcaagttttttgtgtatatgtgtgtttttaggtaatattttcagactacagagtgtatctttatgttgtttgtttaagtatcttttctgttatttttattttcttgtgaattaagaattaccaaattatatatcttccaatggattatgattgctattattgataagagtggcgaacttgtaaaatggatattgacaaataatgaaaaacaaagttcactggtgagttttatgatatgtgatgtattttttttttttaaggtaattgtgtgcttgctataaatagtgttacacattcaaatcatttaacacaaaattgttatttaaatttttcattagctagtgaaaatatgatatgatattatttcactttctatctcttgttgaaaataagttttaaaaatttcacttgataataacaggaaattaagaaatttatgaacttttcatggtattattggcgttctttctccaaagtcgacatcactaatcttctttctctattgattgtttattctatctattaaagaggttatgtatatcatatcaacttattgaaccagttgagatatacttgtaacgctttgcccagaagagatagtgcaagaagttaacaacacttaggacacacatgagccaataaaacaagtctagtctgttacggttaagtttttctccaagccatgggctttgtccagcactcttagttactctgttcactatcggcaccatcaccgagcttagataataccctaatgccaaagaagcccatgagagcgatgtagccaatgatctcatagaagaaggtgcttctgtgaagaaaaactctagcaatccagctagtgtgaacagatcagctgatcctagaaacagatactgaagagcaatccacagaaaagtgattggtaaagtttcttcagagtcaagtaatccagcttctctagccacttgcttccgctttaactcgactaaagcagccactgccattgctactatcgaaaggactaagcctacaccgattctttgcaaatgagtgataccaatttcggatttggttacttttcttgcgaatgggataatcagatggtcataggttggagcaagaatcagcatgaaaacaaccggaaaaaccggtaaagaagctgaaggaacattgaagttaacgatctttctgttcatcgttgcagcttggtggacagagtaagtagaaagctgagctaagcagcaattgagcattatggtgcaaccaaatattggaagcatttttagcacaatcttcacgtcttctacttgttggaccgtgcattcgagccaaatatggtgtgttttcccctctattgctttgtttagacatgtcaagctattggtaagtgactgagaaggcgtcttttcttcatgttctgattgaacttctctggaagtaaagtgattactcgaagttttactcgagcaactaactatggaagctgcgagaagaacctgttgagatgttaggaaacaaaaaaataaaatatgattcactgataataatagaaaacatgttttttcaaaacatgttttttcaagttaccttaaagattgtggtaagaggactaccacgagggattttgtttttataaaacctcgaacctaatagaaagacaagaatggagagaaatatagagatggtggagactccaaatccccactcccagcctttgttgtcctcgatccagacaacgaacgtcacggccacaagtgctccacatgagagacagaacacatagtagttgaagaatgtggatctttgttttcgacctttgggcgtgccctcgtcgaattgctctgctccgtgtgacggtaatgacccttttatccctccgattcctagagacactagatatagtcccacaaacagaaacgccgccttcgaaccaccaacgacctcgcatcgcaatgcggcagagctcttgcatggcggcggcattaaggacggacgccgggcttggattgtgagcaggataagtccctgagtacatcagtatatgtacgtagaaagacataaacatgaaattaataaaattcatatttaattttaaaatgtaaaccaaaaacactataggactaaaaagaagaatacatataattgattttttcaattaatttgactaatatgattatgtgttatagaaaattatgagagaaaaatagattaaacaaaaattcaaaacatatgcaaaaaaacataagttagctactaagtattttgtccaaaaaaaaaaaaagctactaagtatatttttaattttaaaatattcgaaattaatttattatattactgaaaagtaaacacttctttgttaataacatgtataaataatacgagttcatacataggtgttgacacatcaacaatgaaaataggataataattaatatataataaacccatataattaacgctcttacaacaacaacaaaaatatacgtatactaacgatgcatcatgattatgagttggatcaggcctataatctgtggtgactattcactaacaccaagaacggatcggagagtacaagtctacttctgcactacagcatgtttgtctttcgtcaatttttattaacgtatttggcaattcgacagctcataacatacattattaagcgaatgccacaatttaagcaaagcagataaaacagcgaccctagacattcacaactacgaatacgacgggccccacttggagataataatgcggggcccaataaatcaaactcttcttacatcgcaaagcggtgcacgctccttggtcagttagattttgcaacataggtggtgagaaacgattttctaaagtcaactgatttgggtatcgatataattaatacatacatttatgtgtgtatgttgtaaatgatcattaagtatgaaactatgaatgatgaaactatgattagggtttataatatatagtatgaatgggttaaagcttgtggttgactaattttaatatcataaaatgaagattgaggaagaaaagtgaatatttattaaagtaccagaaactcgatggaggcggagatgaggaaaatgacgaatgtggagaagaaggcgtcagcaaggaagccaccgaggagagcgagaaggaaggctgtggccatgaaagtggtcacttcactcgacgatctggctagagacatgtgcatgaagttcttgagatacaacaccaagttgcttgcgttcgctaaaaacgctagattctccaatatctccaccgcttgaaaacacatgcacatacacaagaaaaagcaaaataaaagaaatcaatcacatgattcccaaaagattaatcaagactagagaagttaaggaaaaaggggtaaatttggaattttgagactgacccaagacgaaggaggcggcgagcattccgccgtgacggcctctcaaggcggctttgtttctccagtcagcgtagccttcccatttggagacatcaccatgcatttctacttcctgtatttggaaataatcaaaattaaaagactttagaaaatatctatttctctaaatagaaactaacatcagcaccccaaaactgatgtcttgttcttaaacaactaaaaattgcaacaacaaaaaataattagaatgagaacaatattagatgcttgaagaacccaccatttgatttctctctcaaattttgatgagaaataaaggtaagggtttttgaagtatataagtgataagaagggtgttttcggaattacaaaaagtagattttaagaaccctaattagtaattagattttaaagacataaaaatgataatttaatcaagactcgataaaaaaaagtaagcaatctcgtggaattttctgaatagtagactcactaagatctagtattattaaagaatagtagattttctgacatctaataatcaataatacacttctttaactaaataacaaaattttctagaaaaagagagagagaataaggttttacaacgtaagtgtgacaatgtatattacaaatagagaatagtttttcagtctgttatctgaatctagacgagacagcacatttttggattttatttatttaagaggtttagctttgagtttgcttactgttaatagaggaggatatgcgttacaaaaaaaaaaaaaatccaaattgaccaaaagatataaatctaaacgtgtcattactcattagtgtgaactgtgaagacctaatggttatattacatgctacttgatttcatcgtagtaaattggctttgcaaaatcgccaaatgtcgagcattaatacttttttggcaaatgtctccatatattaactgttcactttttatatacatgcatgtaaataaatgttaaaatacctctgatagtttcactttcacccaagaaagaattacttataagattaaatttaaatgtatatatattataaatttctataaatcaaataaacctaaagttgtgattggcccattacaatacagaaaccccatttaaggacccaaatatatcgtagcccaacctaaaccagtaatagaacctaatttcgaaccacacaattcccatcggagagtctgcattggttagtttgtttcttataagaacaattgctgatatttccattctaagaaatagcaagcaaggacttaagcagaggaaggcttcaaggagatcacaaagctccacgaaaattacgaaaagaaggaaatgttataaacaatgatgagtttaaaaaacaaaagagatgttaagatagttaccactttatatgtatacgaagtgataaataaaatctgatatggcagaatggagatttttcattttgtttttattatattgattagttccgaaatcaaaagctttatagcctctataacttcatcactcattcccctcacgatatgttgtcgccaaggtgtgaaatgctaaatcatacatatttttgggattgtcaaatttataatttctatttgtttccgtcacatagcatacaacccaaacaagagaaacaagacctatagttttacgtcaataaacaaaagcaagctaatacttacagcactggacattcacaattttcacaaaaccaaaccaaaagaatctgatgtatacggaaaaaaaaaaagaatgggtcacttttaaaatttcttttttcgtcaaatgtaggacatatgtattgtttgtgtcacttaaggaaatattgtgcccacttgcaatataaatagagacaacaaaggtgattagagagcatctccaatccaacttgcgaaatcattcacaccatttaaaaaacaaaaatcacacctattgaatggaaaaatgtaaaatcaatcaccttaataattattaaccacaagtataatccctattatagcaaaacagcacattcgtctccttcttcttaccagacactaaaacaagcaaaaggaatcgttttttctttctcttgtaacttttatgtttcgtcattctacaatttcttctttataaaaagtgactcttaagagtcccaacattttcagtaaaaatggaaaactcagacactgattcagaagttttcttttggtttcagaaccaaaaccaaaaccatagccataagtttccttcttcttgttttcctccgagctctcactctgctttttatggtatatctctgttcctccattctaattttattttattttattttcttgaaatgcatctttttcacctttgacgaatcttcatccccaaaatgtaaccactcagattaaaagattgtcctttcattttaaaagagtttgaaaagaatagcaagaactttgaagaacctcatgtgacgacataggtcagattctcttctataaaatttgtgtcattcctcattctcttcttaattcaggatctagctcaatgatcaacacagagactgcaactatggacgaagaagacgtatgtgagagctacatgatgcgtgagataaccaagaaacggaagctaacaccgatccaattgcgtttactagaggagagtttcgaagaagagaaaagactcgaaccagacaggaaactctggctagccgagaagctagggctgcagccaagccaagtcgctgtctggttccaaaacagaagagctagatacaagaccaaacagctcgaacacgactgtgactctcttaaagctagctatgctaagctcaagactgactgggacattctctttgtacaaaaccaaaccctcaagagcaaggtacagtttcttaatagattaacaagccactattttcaagagtctgttcaaaattttgatgacacattcaaacaggtcgatcttctcaaagagaagctgaaaatgcaagagaatcttgaaactcagtctattgagaggaaaagacttggggaagaaggtagttcggtgaaaagcgataacacgcagtacagtgaagaagaaggtttggagaatcaatacagtttcccggagcttgcagttctcggattttattatgatccaaccttaactgcttcaaatctaaggttgtgatagtgtaggtcaacaacgttccgtgtgcctcaagttatcttcgctgtctccatcctttttatcttagacttcatattctaagaaagaaagcagtaataatattcattgatggaataaaaatgcattgtaatttaagtcgttaagttatatgaactttttatgaaaatggaaaaggtcacaaggccatattttcagtgactagataaatgaaaagtgcatgcttttcaaatgatatggacgttttggtatttacctcaataattcgtatgctacattttcatataaaccaagagaacctcgagattagaaagtgaacacattccaattagtcaataattcagcaaatagtagaagaaagtagaattgattcatttgagaaaaggactggcactatttgatatatacagtatgctgataatatatattaccattatgcaataatataaaccttatcacaacaaatctttatccgaaccaccaccaatggaagatgttcaaaactcagacaagaacctttgaaagtcacgtgtgcggatcagatgactcagatccaaatatctgacgtcacagaacctgcgagctccgcacatgtaaactcctgccggagttcatctaacgacacgcggcaatatgtgtgtgggttaacaaatgtggattttgtggggtccgctacctatctgttatacactcggatggacagtccagttactatgtgggccttgaggctatgttaatccggcccatttagcttaaccccaatttaatttctatattttcaaaggtagaaaaaaattgaagtgacacagcgaagttcgagtatgagccgcaagagagataaaccctacacaaaccgtcacacaccggcgcgaatttcgaaacgccggcgaccatgggcgccttcgtcatcggagcacgatgagattatcgacaaaccgatcaccaaacctccgccgccaccggcgttggtagttatgggacttcccgccaactgttcagttctggagctaaaatctcgattcgagatctacggttcaatctcccgaatccgaatccataaagacggaattggctccgtttcgtatcgaaccgccgagtcagcagaagccgccattgctggtagtcacgagccttctttcggtatctccatcgattccaaaaaggtaactcgatcgcttcatcgatttgatctaattaccagtttaaaatttgggaactagggtttgattgggtaattgtttgttgcagttggaggtggtttgggcgacggatccattggtgaagtggaaggaaggtgtgacggcgggagaaggaaaggagagaacgtcgtcgttttcgtcgaagcttttacgacctgtgatgcctttgagaaaacatgggagaagcagtaggttagcgtcagctattgttaatccgagaagtgataatactaaaggaattagtggagatggagggatatcatctccggcgacgacaagtgaagttaaacagagaaatatagtaacctacgacgatatcgtttaacaccattctactacaattatagtaactttgattcttttacatattttggcaattttatgagtttagctaatcctgttggtaatctcagttgtcgaatgttgtgaaatgagttgagttttgtttatttgtatgattgtaacttataagaaagagaaggattccaaaatgggtagaagattcaaactcaaccggcaagtaaaaatcgacaaaaattcttaatccggttactggtttggttgatttttcattgccataagcaagccatacgtttgtggacgtgctaatagttgatgctagtctccgtacagctacatagcgttgtaaaccgttacaaatcaaattcagactctgtttccttcacatgaacaattcgattccctggtagaatctaatccccaagccaaaaaccctaataaacttcactacggcatcgtttcagccactttggttcaaatttcgtggtatttgtgtccgattattagaaagtgtcacgaccaggtcaaccggagacagaactagccacgagatttcaatcacggtgtatcgtccaacaattaaaacaaacccagattgattgattccactgagaaatccgtcagaagcggtttgaaagaatggccgaacacggtgagactcaagctgatgaagaagaagaagaacaagtatggagctggggtgctggtacggacggacagttagggacgacaaagctgcaagacgagcttcttccgcagcttctctctctgacatcacttccttccatatcaatgctcgcttgtggcggcgctcacgtcatcgctttgacttctggtaaacctcccaaaatctctctgatcaaaggaatgttgttggttttagtccaagtaaacattttaattatgctttttgcaggtggtaaagtcttcacatggggaagaggaagctctggtcagttaggacatggagacatcctcaacattactttgccaaagcttgtatctttctttgacgactctgttattactcaagctgctgctggatggagtcattctggttttgtttcaggtaaacattaatagatttttgtaactgatttaagaccaagagcttgatctatctccgttttgtgttcttgtgtgagtgtagattctggttgtattttcacatgtggcaatggctcgtttgggcagcttggtcatggtgataccttgtcattaagcactccagctaaagtctctcactttaacaatgacagtgtgaagatggtagcttgtggtatgcgccactcacttgttttgtttgcaggtaacatctcatatacaacactggtttgcgagaaaagtgtttttctccatttgaattatcttgtgttcttcagggaatcaagtgtgtggatttggatctggaaaacgtggacagttaggtttctcatcagacagaataaaatcagtaaatcttccttgtgttgtctctggattaaaagatgttgaggttgttcgtatatcagctaatggagatcatagtgcagctatatccggtaaacccttaactctcgtgttccgtttcattgatcaatcgaattatgtgtatcttatgttaacctgtccgccttctgatttgtctgaccagctgatggacagttcttcagttggggaagaggattctgcggcggccctgatgttcatgcccctcagagcttgccttcacctctatctttcagagaagttgctgtaggatggaatcatgctttactactgaccggtaatttctgcgtagatgcattgattaccttccagagctcactgaacctttctcatctgcctgtgggtttgttgaacagtcgatggtgaggtgttcaagcttggtagcactcttaataaacaacctgagaagcaacaactgcaaatagattcctctgaagctctctttgagaaagttccggattttgatggagttaaagttatgcagatagcagcaggagcagagcattctgctgccgtaacaggtaaaaggggaggggcaattctgttatttctttcttctttacactcagctaatataaaacaaacaacctttgaatgtcttgcagagaatggagaagttaagacatggggatggggagaacatggtcagctaggccttggaaataccaatgaccaaaccagtcctgaattggtgagcttaggaagtatagacctgcgaacgaaagagatcaaagtatattgcggaagtggatttacttatgcagtaaaacgaaaacaagagctttcaccaacctcgtcatagccatcttaatgtgtaaaattgtacaatgcaataagccaattgtttacatgcctcttgtgactcttgtcagaggaccacagtggtcgtatagtacaatatacagatcattcttactttcttgttttgtcaagataaaacctagtactactgcttacttgcctaccttaccctacatgaaagtgaaattcctaaagaaaaactaaaaccctactgattcagctcatgctacatcgatggtgggattagttcagaaatattgttgcctttgacctcaagagatgattagcagattgttttcatatccaccactagtaacaatgggtcgaagcgggtcaactttccactggccatcaactataaactttatctgtaaggaaaatatagcaaggttaagattttagtttgcctcgtgaatgggggaaaaatgttaatagaatgatctaacctcatattttccaggatatagctttagagacaaagagaagactccgttctcagctttcttcatcttcctctggttgtaaaatcatataatgaattaactaatgatataattaaggaacaaaaacatcaaaagagagcaatacaattcctaagtggatggctttatgtcaacttcaacggaacaccagatatcgagattaaccatatttttaaatcgatatgaactgacctgggtagaccaaccgtcaaatgaacccgttaatagaacttctgaggctgaattaggccacactatggatgcagttcgaagtaatcgtaaagctctactagcatgatctattcttctctgtttctcccgtacaatcctctgtgcatctctagaagaagaaaaaaattaaccaatgtgagagataatagcctaagattcctgctatcttttcccacaaaagtaatgagtaaagcatacattatagccatagccatttttccttcaagaacagccaactttgctcgtgtagaccgcaacttattttgggcatgtatgatctcattctctttgtactcccaatcatcagagaggttctccaagttcccagcagttgtctcactatcctaaacgaaatcagaaaccaaaactaagccaaatcgcaatcacttctagtttgatagtaaaaatgtttctagatgccatctggtcaaacaattaccttacttgtcacaactttatcaggaggagatctaagggagtgaagaacagaagaaagttctgactggagctgttgaagacggtgtttgatatgagttttatttacatcttctgaggaagatgcaattctatctttcccattcatgctatcaccagaatccttcttcgtatcatctttcttcacaccagtcaaaccactggaggaaatttcagcagctgtaccatttatacattaaggctttagatatttttactataaagtctttatatggcagaagacagaagtcactccataccttcaaaatcttcatcagtaaatccagctcttctcatactccacgtcctccatgtttctgacgtaggtgaatcgcttaagcctggctttcctgaaaccgacttggctccttgatacctactttgtgcatattcacctgagcctctactgccgtcgacttcttgaatttcactagctgtctttagaaaaatgtaggcaacacctcaggacgtattcatcagaattatttgcatactggacagcaaagtttgcagataaaaaacataccacaatcctggaagaccaaggaactgaaccatttggggagatatcatgcatggcaccattgcttttcccattctccctcacgctaatccctagactcaaattcctttctttctccaatctggtcaaaatgccttcaattccactatcgtttctagattccacttgtctaataaaacagaaccaatgttaacatccaaaaaaggtgtttcaagagaccaaatatatgcacagactaagaactgtaaattagattactcactctgtcgaagatgaaagatttgaggaaagatcaagatctccatgattcaaagttttatccatttctggagaattacaattaggaagctgtttctcgatatgtaaatcctgtggcgtcacgttctcatttactcggaccttctcttcttgttcatccaaatcccatcccatagaaagccatccaccttggtttacaattctctccacaagatcaaatcttccagaacgaatcaaatccttcttactcggaaacatcccaggtttctccgaattcttcataaactccaaaatctcggtttcaagatccttacttccctcgctatcccaacccaaattacgcttattacacatcctcgaaaccccattacaacgagaacaacaacttttcttcctcggcttcacctcaagaaaccctagaacagtagacccacaaacttttcttgcaaaacgtatgcaagctttggccttataattgggattaaaagttgaaccaaaagaagaaagatgcaaaagggtatcggaatcaatcatcgaatagcgagaaacaaaagatgaaatggggccggagttgatagagaccatggttggagcatttcgacgaacactttgtgtgcgctctattcacgcggccttcatcaagaagaagaagaagaggtaataccaagcaacgaacaaaaaccttctgggaaaaagtgatccactagctagtacgtgatttgatcaagccagccagtaatctaaagaagccatgtgaccgcacaaaaaccaaagctttatatttcaatctgattccgaaaatgaaagaagtatgctttattcggacgttaatcgaattcttaagatcatcaatgttgctgttaagtttctttttagattctcatttttatgtttctctagtctttttatcaatttgactgtttaacatcattatttttacttgcggtaaaatgggcgcaaaatcgcagttttatatgatgggccctttttggcagcgattataggcccatttttggtctgttttattctcattcgattgttgattttattgttcgaaatcttttaaaatttttgttataactttgtgaattataaacattttataagaatctttttgagtcatatctcgaaagattcgtgaactgaaattttaatcagctaacgtgtataatgaactgataaggtaataatgttcttgcattccttgtgtaattttgagtattttcaaaagggtatacaacttttatgatcaaatttgtattcctgttatttataacttgtatgatctctagcattgcaaagttctagtgttcagtttttaggttgcctaggaaatgtttagagactcttgagggaatgtgtgattgtgtggagcatttctttggtcggaaatcacatcaaaaccgataatatgattatatatatatcaaataatttgatttactaaatagaaatatcatcagctatagccacccacaacactactattatataccataaactttacgagatgattaattgtgttactaattgtaaattaaaattggacttggaaacatacaaatatataagtctattcaactcaccattcaaataagacattttaaattgtcaataaacttatatatatttataacattacactttaacctctaataagtgaaacgagatccacacttatatgtgtaataacaagggaaagagaataactttcttctctcgctctctttctcaatctgtgtctataaataagaaatcatcctcatcttccagttgaaaagttgtgccgtgtgtggatagtgccttagtcagaatatattgtttctgatcacaccattccacccaaaaagcaacttcaaaatattcctgtatattctaaactttgagattgttcataagaagaagaaaaaacacaattcatcttcttagtcattttttttggttttttttagaacatcttcttcatcttgttgttacttgttcgaacctttcccatagctttttctcatcgtcgttgccggagatgggagttgttgagaatcggaaaattttgccagagaaaaaacttggaggctggagagccattacgttcatcctaggtatgttctttctttccatttcgtttcttccaataatgtttttttctttgaagagaattattaatcttccatttgcctcaaatattcatatggtccattcaaaaaaatatatctaaacatggtaaactattaaatgaatagccattttagccatgcatttaacaaattatggtggaccgaccacattgatgcctttcaggttctatcgatttatgattaggtatttgttgtcttgtaattcacatctttgtttgttttagatagagtacttacacaatatgacattttcttgaaatatcaccccaaaaaaaacacatttttcttcatatatcaattttcttgatatctaaagataacaaacagtcaatcaaagttaaaaatatatacgtttcataactatgattctctaaatttaaatttcattgacaatacctacaatgatatgccatcacttttttctttcctaatcggtagttgtgtccaacaccatgctaatatcatgactcatgagcacactaaacttcttttgcgagtcatgcaattcaataatctaagaaaatatatagtagcaatagaaatggaatcagaaatcaaattatctgatttcaagtttatattttcgaccgtttcaagtttttgtttaggcataaacctttgcatataacagttataagtttcagacagatcttgagtttatacattaattgaatatttgtatttaacggtccaacttaagttataccagaaccatccattcataataaaagatgcttcatattttggacaccatatatatgttattatctgctgagaccaaaacttactaaatgatgagaataaaggtaatgagacgttggagaagttaggatcgattggagtatcagcaaattttatgttgtatttgaggaatgtgtttcacatggagccagtagaagcttttaacgtatactacttgtggatgggtctcactaactttgctccactcctcggcgcattaatctccgacgcctacattggccgtttcaagaccatcgcttacgcatccctcttctcaattctagtacgttctctctatatctatttttcatttcaaacaattatacaaacgttcacatgattataagcttaaaatggagtactgaataactatatcaacccacaaaaaattggtcgtgataagacctaatgttgacaaatgaacaaggtaaatatttggttttcaatttctatacataatgcagaaaaaaataagacggcaaatatatcactaagctatagagtgtagactaaaacagcaaaaatgccatttgttttaatctttctcaaagtttagctagctaactttttccattagcaaataccatttcttattaatgaacttacgtaacacattggagttgtgagacttgtgacaaataattgtaacgttttaccccaaaaaaaaaaactatgctataaagtgaacttttgctcgatgtgtattccataaataagtaatcaaccaaatctgtaataaatccaaacagggactaatgacggtgacactcaccgcctgcctgcctcaactccacccaccaccgtgcaacaaccctcatccagacgaatgcgacgatccgaacaagctccagctcgggattctattcctcggtctcggctttctctccatcggtagcggcggaatccggccttgcagcattccattcggagttgatcagtttgaccaacgaacagagcaaggccttaaaggagtggccagtttctttaattggtactacttgaccttaactatggttctcatcttttcgcataccgttgtggtctacttacagactgtcagttgggtcatcgggtttagcatcccgactagtttaatggcttgtgcagtggttctgttctttgtcggtatgcggttttacgtatatgtcaaaccggaaggtagtgtattctctggtattgctcgggtcatcgtggcagctcgtaagaaacgggacctcaaaatttcgcttgtggacgatgggactgaggagtattatgagccgccggtgaaacctggcgtgttatccaagttacctcttactgaccaattcaagtatttacatcgtatacttttagaaacatttaagtttgattggtctttgaaaggcaattgagttagtaatttattggttatatttaggtttctggacaaagctgcggtgatactagacggtgatcttacatctgaaggagttccggcaaataagtggcggctatgtagcatccaagaagttgaagaggtcaagtgcctgatcagagttgttccggtttggtctgctggaataatttcaatcgttgcaatgaccacgcaagcaactttcatggtctttcaagctacaaaaatggatcgacacatgggtccacactttgagatcccggccgcctccataaccgtcatttcttacatcactataggcatttgggtgcctatctacgaacacctcttagtcccgttcctttggcgaatgagaaagttcagggtcactctccttcaacggatggggatagggatcgtcttcgccattctctccatgttcactgcagggtttgtagagggagtgaggcggacacgggctactgaaatgactcaaatgtcggtgttttggctggctttgccactgattctgatggggctctgcgagtcatttaatttcattggactgatcgagttcttcaacagtcagtttccagagcacatgagaagcatagcgaattcgctatttccactctcatttgctgcagctaattatctgagcagtctgctggtgaccaccgtgcataaagtctcaggcacaaaagaccaccctgactggctgaacaaggaccttgatagagggaagttggactacttctactatctgattgccgttttgggtgtggttaaccttgtgtatttctggtactgtgcccatagataccagtataaagccggttcgcaaattgaagatttcaatgaggagaagtctcttctagacatcgaaccaaaccagagacacgatcaatctccaagttaggatccgtatgctaattattcctgctgtttgaatatcttataatattatttaactatcgctttcatggaaaaaagatcaatagttgacatgtcgaagacgataaaattgatggccacaaaaaaaaaaaaaaaagttcatagcaataaccgagccattgtcaaacgtttcaaacacgagattaggcttatatgcgttatagcataaacgcaagataatgaaagagacgcacccaaaagacagaggcacaaaagctaagacgcaacagcaacattggggtcttggtagttgttgtatgaatggccatttcctccaccaccaccaccaccacgtccccttcctctgttgttgtagtagttcctttgataaccgtttccaccagattgatcataagattcgtaccgcccattctggtagccaccaccaccacctcgtcctcctcgcccattctgatagccaccaccacctcttcgagcacctcgacgacctctttggttctggtaagacccacgtggcacatagtctcttttagcattctctgctcctcccacctgagtatagccctgttcttgctgtccatggaccacctctccttcggtcactaactcaaccttcacaacaaaacaatatcatcagattcatccttgagtaactcattgaaagatgattcgagctctacaattcactggattaccttttgatgctcatcttgttgagattgatcattaacaactgattctacttctttggaatttgatgcatcttcttcctgtaaacagggaatatcagacccacataaatcattagagaccacatgggagggatttatgttctctaattcatataatgagacacaccgaaacatgtcaacattcactacagtgaagacacatattgtcacagtttgttaacatcgatcacatgtataaacaaaaatatattgacagctcatatcgtagacccaccacaaagattattctaaccaggatagagttctccaaataccaagagaacagtcgaaaaatcaaataagcaacaggccatatcaaaaattaagaatgtacttctccatcctatccaaacaacttaactcactaatgatctcataccacatctcactctaatgctgcataattcaacttcagacatcttctactttataggagaaacaataataaactctgaatccttgaaaattaagctcaatctcaccacaactaaagaaatgtgattgttaatttcctccttcagattaagtaagagctttgcataccacaaagccctgaactatatagtatgtaatgaatcagaacaactagtccgcgaaattcactaccaatttgatgaaagtcagagacttcaggaaatcaacaaaacctaatctaaagtggataccttttgctggtaatgccctgaagcctccacgtccacaggcacctggtaagaagtatagttaccagctgcagccgccacatcaaccggagctttcatttccggagtagtggtgaaatagtcagacgccataatcttcttcaacttctctctcaatgcagcatctgcatcacaaatctaagtaatcaacacagagaaactaaaacacagagatgtaagagacaaacagatttaggaatttttattttacatgaagtattgcagtttgattcgattggctgctcggaattagctaaccatagcttagcgtgctcaacacaacgctccaaagcgttcttgtgagataagcttgaatccaccggacgagaaaccatcaggctccaaagctgagaaatagaatccaaatcccgatcgccgaggagatcagtggcatcatcggtaacgtaatcgtaagacaagcagcaacttctctcatgagtcctggtcaacattatcgaagtgaactcgttctgtgacttgacgtcgaagagtgaaccaaagtagaggaaattcaccagatcctccaacttagcgccatcatcgccgccgctaacttcctgcgggatatcagtgacttccttttgctcagatgcggtggtttgatcggatgaagcacggttaagctgagtagcgaggctgatttcctctgtcacagcggcggagagaggagcacggatcttttcaagctcgtcgattaggatgacgacggcaggtttagagcggaggacttcttcttgctccttgtttagggttttgccttgagaaatcgattcttccatttgagtgattcggttgtatttcttacggagagcacggagacgcttgttgatgagacccatcactggtccttcagaagcttcggaggaagcagtggcggccatgattatggatttgtgtaggattgtcgataaaaagaggatcgaactgaccgtatagaaaattcaccaccgttgagtagcggcggcggcagtggcggaacaagaggaggatttgttagggttttcagagaaatggggataagttgaagcgtctggtttttgggtagtgatagttttgagctaaatatataataattgatgaaaaattccagtaatgcaagtgaaattatccgtctcaaaacaaaaggaaaaaaataaataaataggagtgttctattttcaactattttgtgtagattttttcaaattatttttgtggattacgtttcttgtataaaaaaattatttgtcaatttattattagttacttggaatgacatagggtatttgtattattttaaaattgtatcaagaggcactctcttttcctaaatgcaatacttaattttattagtaaatataccatttaaaagggtaatatgtaaataggtaatttttgaaataccatgtatataatgacaagtacataggtaatttttgaaatatcatgtaaataatgagttttaagttaagaaatgaaatacggtattgttacataataaaaacagtttgaaattaagatattatcaaagttgttaggatattgggaaatattccacttttttggtgtactttagattcaattttattctagatccttctagatacataatgttgtttaaatattctgtaagtaattagaaaactccaatcgtagtatcgtacgttttttttttttttttcgtcaacgtagtatcgtacgtatacattaggaattattcctctttttgtatattcattctgtatatgacttgatattaaggtcttcgtatgcttcatgatttgtattttatgtttaacgatagcttaatggatactttaacttggagatagtttcaacttctaacccctttaacattcgtgaattgtgacaacaaagtatttataagatttcttgtcacaactatcgtctactggtcactaaatcactatattaagataggtgattattctgatttggttgttcacgtcatccaaactaaatttggctacattcgagtcataatctccatttactagtgaataacttataagaaattaatgatttttgtttatgaatccatgctcacacaaataaacccccaaaatccaaatgttcgtttacaaagaaatcgcttatttacaaaaacaaacttgtattatattcccccaaaaaataatttataagtccttcctattatcaaaactcttacaaatagtctatagattaagcaaggttcatgtgccgacgccttttttcaatctatgtaacaacgagtcttgtaccaactaccaactcttactatcttcttatacggttcatatcatatgcttcaccaaacaatcacacaatcactcatttctaattgtctcgggtcgattctagaggctcgcgctggagggtagtaaaatgacatgcaatgttccgttgttaggaggaagttgcaaacgaagaggaaacagcttgccgtttaaaggactacgagtacacaccacagcgtcttccatgcacgtttcttctcgcaatgtctgagtcagctccgccacgctatttcctttaaacgtgaaagcatatccaacggttgtttcatcttccacgtgtccttcctcgtcagcgacatggtaatatatggttcgtccatcagatttaggcggagactcaaccgactggtcaaaatcaaaatcaaaattttcaataaccggaaaacggtacaactgtaattttaaacaaaaccaaaggtgttttaggaatttaggaaaagtactcacatctgaatcggatctgtctgaaagagaagacgaagtccttggagactcagccgacaacggcgaactcgtcggtctccgatgcggcggtggagacgtcgtcttcggtggcggcgctttcgcagactccgtcttgaattcggaatcagtcaagatctcaacaacatcaacatcccaagaaatcgaatcctgagtagcagacaaatgaggaacgtcgtgtgtgaccgagtttctccaaggaggaagaccaccattacctcgtaaatagttaccagatctagtcctaagcttaatcttagacccttctctaagcggttcccactcaacagacgaatcaacccgactcagtttcaactgaatcactttcttccccgtagccccgagcaagaaccgctcgttagaagcggttaagtacttaccgtaacagcttttaagacgaataacatggaaagaatcacgaaccggttcgacggtccatcgagcgtttttggtagatccgttacggttttgagttacggtttcttcatcgtcgtctgctgttagatacttgttgtgactgttacgcattcgaatagcttttgctttctggaaaaattccattgctgagacagatactggtgtttctttttggttgaagctactcgccgtcgacttctgtaacaacagagaaggggaaatgagcgaatagtgataagaagaagaagaagaagaagtgagagatatggttattttatatgtgtggtggatctgacactggactggtctaaattgggttttttagttttttacggttacgcggactaggtaaggtaagaaatctggaaaagtcgttgctagctggattagagcgcgtatctaatatccacgtcagcagaaatttatgatttggatttctttccttattagtatttgttagagcttgtaacgcgttgttgtttcacgtgttttggattttgttactttgtaatgtttgtaaatcttgagattaaagttaattacgaggattccaagacaccaactattgttaatttaaacagattttcaagaaacaaagcaggatttagattgtaactaaagtttgtatttgattatatataaaaaaatcaatgctttgaatttttctttaaaaaatttggtgttaaatcttataggagaagatgaaaaaaattggccttaaattgtgttttatttttctatatatctattaattactacaatgactttgtgaaaacttttatcagttggaacaattttctcttacatatcttccaatcattcatgatgtttatttcagattcttcaattcatagaagatttaaacataatactaggagtcaatgttgactattgaagattcatttgaaataataataaaaggtatggtacatacatttggtaaacttttatttgctatgtatataataatctatatgaagagaataaattacgatagagataggtaaccaaatttcccaataaagtatcattttacattgttactctatactttttccattatcttttaatttttcagtacgtatttagttctatgataagatcaaaatcggaactaatggacgtaattcttgatgaataatatgtgattttcagttagattataagcaattatgtggtataagcaaatcaatattaaatggaaaatattgaaaaatataaataaataattaaaaagataaaagtatatgcccttttccccaaaaataatagtgtccctatgccataaaagaatggatcgaaaagataggatttaagcgaatatttagaaaataaatctataaacccttgcccgcaagaaagaccaagagaggaaattcatgagtgtgggactctcctaattgcatccctggaccatatgctccatcactaaatcataactaccaacttttttaccttactttttgttacacttgtcttatgttaactggcactagatttgtttatcttaagccattaggtacaagtttttattgttaaggaataataatcgtatttttcttctttaatcatccttaggtatagcttttgtaagaaatatacagtcacttagttacattttagaggttctactacaagcatttcaaaactatccttcaatcattgaagtaaacttaagttggattgttaagtgtcatattttcaactatagtctattataatagataaactaatcaaaactatacaattaaaaaatcctatacattttggtggtattaggttggtaaaacgatgtgtgtgcttgtggagcattatctatgttagtggagaaaagaaatgatacagatcatgtaattttctttaaattgtagatactaatacgggtaatcctcatctttttttccatatgttcatgcatgccaactaatttcttatatacagaattgtctaagttcaactcacaataataaatttctatattagccttaatttaaacacagaaattaagaaaaactaatcaatgcacactgaataaaagacttagtcaaacttaccggttttgaggaccatctcggagacgtagataaaccaagagaagcaaaccggctaatactactcttcgtagacctggcagaaacaggtgacccgggttctgatccgaattcagacccgaccggagaagaaacagagctttcatcaccatcagacatgttttcaagatcagaaccatcaatagttataacatcccaaatcaaccagttctttgtctttgacgtatgaggctcatcgtgagtaacagagtttctccacggcggcgttccaccgttagccctcatccacttaccgcaccaagattttagcttcacctgaaacccatctcgctccggttcccactgcgtttgccaatccatcagcttgttaaacgacgccgtttgagtcactttctcaccggtcatacctaacaataacggtttgttgctcgccgttaagtacgtgccgtggctgctctttaaccttatcagattaggtttatcgacgacgggctccaccgtccaaacggcacgccgtgcatctcctttacggctttgacggatggtttcttggtcatcgtcggcgactaaaaacttatctaggtggctacgtaacttaacgttgttaccttttgtgaatagctccattttttcttttgcttgagattttgaaagaagaagaaacaaaaacagagaattttaagtttgtgaaatgaaggagaaagatgatgtttgtgtttggttatatagtttaatgacaaaaaaataagacagaaaaagcctggctaaaagggtactttgtaagttaatagtcggagggattatgcagctcgcaattatttagaaatttcgcaaaatcaaatgaagaaaagactaatgaaaaagtattacgaaggttctcctccacctacgtaacttgttgaacattttacctcacgcgcgtaaagaacgtgatgtgaagactttgatagaaaatgtcttaggttgtggttcaatgttggttctttgtttaaaccggtatccggttatagtataaggttttatggatgtgattacagtcctgtgtgcgtgataactgataagtgtcttttgatccctctagtaatgagtctatggaccttatcgtcgataaatccgcaccataattcaaatcttatcaatgtaaatttgagaatttaaattaatgagggaaatgtaaactcatagattcatgaaaaccatgacgatcatgtaatattgatgaaagatcagttcagctagttaaattatgttatatgtagctccataattgaatggaataattatataatcatagaagaaatcagaatactacaataaaacttcatattaaatgttgtgaaaagaatgtatttatgaagaggtaatgtagagcgcgtgggcttattgtgtagaattgtctcttttccgtagatagaaccaagaaagtcatgaagtagacttgtgaatatttgtgtagaataatttaggattagtacattttctaaacagttgcatataaatagatctagatacacacaacacattgccttgttatatacgtgtgactcctatctttctggataagccgaaaagtattgatatcagattttttggcaacatgtcatagttgagtttttaatttttttatatccattggttggcttatgtggccgacgtagggctttgagagactcggtcttaatttgtaccttccacaccaaataaatatattggtttgttttccggagaactcatgaaatttcaatgtttttaggtgacgcatgtaactacaagtcttaacactaatttgtttatagtgaatttcagaaacatattagacgtctggtcattggtgtattttatatggtatgagaaaatcactataagatcaaccttataaattcatggaagtttcacgacttcttgtttaagtgatacactgatgcatgtaatttacatgatgtggatgtggtttcgggtctggagagcttacgggtttcggttcagaacctcttagtattaaaaaaaaaaaagttacaagtttttagatattaaattacgaaattaatgttggaagcttggtgtaaattataagatatatgttcgaaaaaaataattaattttatcagcctttttgaaaaaatttatatagaatttgcgatacagtcacttgacattttggagatcaataatgtggtattcaatttttctttgaatgttattgaaataatctcgtgtataggactaagatttaagtcattttattattaaaatataaaatatctttattaagataaaaaaaagttgcatgttaaaaatcatataaaaaatgcagaaatgggcgtcccctaatccttagacatgtttccatgtcgcaattgaacaacatatctaactgtaacatacagctttcaagatccattttaatggtcttctagtagtttttttctcataaacatctttataaaatactaatacaaagtcaatagaatgtaaatttcaattatattaacaaaattattattattcttatgcattgaccataaccattgacttattataaaacaacaagacaaatgccgttttggcgatcaagcagacttgaaatatgaagattccaatgcttttgctttcttacctgcacttataccagctttttccttgccttccattgagtaactctcttcctgccaaaagaaagtcaacgtttcataaactgtagacgtatatgaatcaacttgtcttgtctggtcatataaatgacttaccagcaaacgccacaagaaaggagcaccatctctctgtttggtcaccttctctagtacttcaatagctgcaggttcgggtgttgtaaacgcagagttagtagctgagaaaacgaagatatagccgaagtatatggatataatagtgtttttgaggagtgtaccagttgaagatttgccgttgagtaacagcaacttgtaccagatttcattaaaaacatccatctgtaaacccgatcctccaatcacctatatcgtcaccaaaagagacaatagcatttgctgtgtattcttcaataagttttgatttgacatatatcttataagaacatcgcattaccttatagttagcagcgtcaaagtctaatccaagcagttctaaagctatctcgtagtttcctttcccgtattcataaacagcttcagcaagctgatttgaaagaaagaaaaagacggttcttatgatatgacatagaactcaaaaaagtctccataattgtaaatcaggatcagcaagaacagaccagaatcgctttctgcatcagcttttgtttcttcgggttcatagcggatgttctgttagagtaataatattagccagatgataagtcaagagacaaaactctccatttggaaaaaatgtcacaaatgagaaagcggtagtactgaccgggacttgaggccctcgagcaattcatgtgctagtgaagttttttcaactttactcaatgcccaaattgtcgtaatatcaaaaagccagtcttgataccacattgcctgaacattcgaagttgcacaaatcgttattaaaagaagagcaaaataaatgtatatgaacgcaagggcaaacaagtgcatcacttactttatcagtcaaagagtctgccagtttctctagtctgtcctgaaacccatcatctagtttaccgcgtgtgtctaaacgcaacaacaaaccaagagcatccgtataaacctgatgtgtaatagtacaagtataaaacatcagattgctaatggaagttcagtttttaaggggaagaaaaatgataagggaattacatctctagcaacagcatcgtctttctccagctctttccacatctgatgatcatatacttcttctaccttacttatgtgagaccctccttccaagtaacaaacagctacgtgccaccaattatgcgaaaacctaattaaaatgttcaaaaattatctagttttctttagcaggtgattccagagatgatcagaagatggttcttacttgtttgtaaatgctattaccttaaggatgagcaagaatcccatgaatctgagtgttcttccatgaactttactgcttctttaaaacgacattcagtttgaagaacatgacataactgccaaaaagagacattattaatgacattttgtatatggattaccaagtaacaacaaaagaccgggacaataagtgttggaaactcacggcgtgatgagcccaagaatcgttttcgttgatctcacagcctttcctagcagcttcctcagcttctctcaaatgtccaagctcaattaaacagaatgcaagcataccattaacataaacttggccttcattctgcggtagaatctgccaagtttacgttgttcagtgagggaagtcaattaatcaaagatagtgataacaaagatcatgtttcatttataagtcatgaggtatccatcaatttgatttcaacatcttacataccttccggaaaagaggcaaagagagatcgtgtcgacccatgtaggaacacagagtctctactctcttccaagatagcaaatctttcgggaactttttcaagagctgcaaaacataaaagagttatatacaagagttataataactgcgtcaaaggaaagatatatcaagctatagcaagaagaactaataagaacaagaagccaagaaatatcctaaccttagagtgtaactccaaagccacatcgtcgtccatattctcagagagtaagtaactaacagcctcgaaaactgccttctcatacagtgtggctttcccctaaaaccaatgaatttcagagagctcaatgacaccaaactcataaagtatcacggattatagacatgggatagctacagagcatcatttgtttcacttagaatgaatcatagacactaaaagagataacaaggtagagcttacaagacgggattctgcagctagagcatatgatctggctctaacagggtcaaaagagctaaggtaatgagcagccaaaatgttggccaaaacacaatcattatcatagtttggcgcttctagaatcaccttcttctctcttccataaccaagaaccttcataagacggtgcaacaatgtcacgaaagataaaaatcataactttaagcatagcaaaccagaaaaacacaacttgaaagctacaaatatcatctttcagcaaaacaacttttttccaatcgacagaacaatcaatactcttcgataactacagaaggagactttacaaaacccaccacatcatcgaatcgtctaaagtatcaaaccatagaaactaaagacaaccctaatgtgaaaaagagagacgaacctggtcagaataagagttaatggaagcaatgcaatcatctgaagaggtgttgacctcataaccacagctaacaaatctgctttcttctttctgtttatcggagattacgaaacagagttcacgcgtgagtctaatcgaaacagaacagactaatatttgttgaccaaaaaagagagagagtaatttatgcacgaaggacgatgaattttcacattgtttgaataatgttttttaaaaaatcttatgaaaataccattttttgaataatatacagattttgctatttttaacacattgaaatatatgtatttatgagtttataaatattaccaaatactaaatcataagaactacataaacttgactaaaaccaaacaaactaataaaacacatgttaattattttttgaagtctgaaaaataataaaatttacaaactattataaaaatggcaaaatccataaatgccactatcaaaatgacaaaatccataattgattcttggttttttaatagatatgaattttcctatcattacagtacaaatatttgaataaatatcatgtttttagaaagttgaatagtgctaactgctaaccaataaacaaactatatagttcaatccgaatttcgatcaaagtttggttttaagatgtatcgaaagtgaaacttcatacgatatgaatagtttgatatatatttttttggtttcgaactttagtcaaatatattattagttttaaaataaatttggattttagataattttatagagtgtttttttttgtttagatttagatttggtttttggttatacaaaatataattattacatacttattcaaaataaatatatttcatagttaaatgtttcttacttcatgtatttggttcataaaaaacagcatcaagtaatataataaattataaataaaaaatatgacaaactaaaaaatatatattttgaattcttagatcctccggattaataattttattataatacttagcatgtattttattatccttagagtttagattgacggcatgattttgataaaaagaaaaaattagggttttgagaattaacgttaatatatatatatagtttataatatattttaacttttattttggtgtttatgtatttttaaaatatatataggattgattattttataaattgcttacgctacggtgctaccgttcgcaaccgcaaataattgtggaaatgagcttttaaattcagtggttttgaacggtttagaaaggtttaaaacgtttgtttatgattaattttaaacgctagcaaccgcaaatacaacttttgcgggtgggcagcggaagaatcaatcaaacccttaaaaactattgtctcttaacccattctaattaattaattaggctaaccctaaaagatgcattcatggtactttttcatctgcatggatctattagtatcgtatatccaatggttaaaagaataaatgagaaggcaaatgaaataaccaaaagatatgcattaactacctagtcaaccttatgtatacggaagaaagataacttaccatgcatttcaatgacatggtacacgaggcctccattgttcaatcccgaaggaaaaccaaaaaaattttggatatgaccgaaacttgagaggacccgttgagtatttattaacttagaatgatttctttttttggtaaggattaacttagaatgatacaaatgaaggtggccgcatatatatagcttatggaaagtattaatcgaaggagctatattcaaattgcatttcattagaaattgcgtaagtattatatattaataaacgtacgacgaatatatctggactcagatattttgattgcaaatatattccctatatcatatatatatataaaaagaagaagaagtaaattacttgccaaacggaaccatgaatccttacacactatccaaaattccaaagcaaagccatctaatccagcacatcatatgttatcttgagttccaatccctttagaaacaaggaactattcatttcattcaattacaattagtttatcaaccttttatttgtaattttatgttagatacaatcatattacgttgcacatatataaaaagaaaattatacgatcatattatcactcttgtaaattgtaactttaaatagttgctaaattcagttggaataatattttatttgaataattaatgcttttattgttattttgcttcgtgtattctcccatcctcttttacaaaaccactagattttatcccgcggtacaccgccgtgacaatttatctttttaaaattagtatatttttttttttgcaaattgtatctatctataatatatttttattttatagtttacaattgttattaagtaacgtcgtgccaaacccatcccgccaaacccgtcccgtaaaaaaccatttatttatattaatgttgatcttatttatgatatgtttataaatcattgtctaaatatttttgtcgatgcgggacgttgaacccacacattttttgctaattggttaatatatgtttatttttaaaattttgaatcataaaatatgacagaaaaaattaagattttttaaactctatatattatataatgatggtaaaaaattgtaatatatcaaactttttataagtttaaatattaataatgttttataaattttaaatatataaataataatatttaaaaaattaatatttttgcttataaggtaatgacataataactctaaaagcaaggatttagaagatttaaatatttaattaaatattttcattaataaataattaatgtcagtgacataacattgtaaataagttcaaatacaaaatttatttatttaaacaaaaaacgtttagtaagaataatatttatttaacaaaaaactttgttttaaaatattgttaacaaatatgtttatgctaattttaagggattgatttgaagttgggtgggattaaatttgattgataatgtgattgacaatttaaatcaaaaatttaaagtaaaattaattattttggaaaaaaaatttaatgctaatgacattaattgtaaataagtccaaatctaggatttatttgctaaaatggctgcaaaaatgtatatataaatggttcatggatagacttattccaattaagagaagattcaatttgttgaggagaatatccaatctaaatggagataaagactgggtttaataataaaaagttagatttagcattcgacaagttatttgatttagcacgccgtcatgtacttacttagcttgttaattccagtttgtcgtttaattcatatatgtatatctagtcataatctttctctttgcagctttgagttttctaaaggattttgaactctattaattcattaccacgaaagaacaaagactaggtaaatgtctgccactactattagataaccacaatgtaaagttaatacgttatacagttaacatagcattgtgaccaaacaaaagatcttgaggatttaatcaaagtcacgtttccttattatctttgttgaagaagtacatcttttgccattattatcttctatacacactcaacaaattaacaacaaaaacaaagattattttataaataattttcgtgttgtggtaaaaagaagaagaatgggcctctttatataaaagtgccgtttggcgaaagttttgggcccttataagttaagaaaacccaagtttttttattaataatgttgttgcttcatttttttaaataaataaatcatattacaccaagaattagttttaacctttaatgtttttaaatcaaaatatttattgtctccatatgctcctcaaacttgttgtatgcactagtctaattcacaatatgtgaccaatatttcaatctgtagtggctaccttaaattagggtcaaaatttttcagtttcgtttggcatgcagcttgatgatagtcttttagtgaaaataaaaatccgagttaattattaataaaactgtaaaaaacgtaattaactttaaatttttttggttgtttattaactcatagtattattacattatcttataagtttaatgttccttcttgaattttatcatatttatatatatttttgaaactattcatgtgaagaatatgaactcccaccaaattttagttaaaattccacaaccctaactcttttttttttggttattgtttggtcaactgtttcttggttttaaacctgaagcctaactttcatctcaaagaaaaactaagcaacatgtttaaattatttatttcacaatttcgaattcccttattagtgtatctaaaagatcattaacttagctaaaccaattacatatgtgtttaaaagattggacccatattgttattagttactcttcgtaaagcaaataccttttagcacatggtatacagatcataatcatgggttatatcattcttacccaattttatttcccacaattccagcaaacaaatcaggttttaaatatatcaaacactcaagcttatgtagtaaaacacaacaagttcaatatttcatatatctgaaattgtaatttcgtatatttatgtggtgtatatgcaatgatttgaaaatttgaatttggaaaatgagtagtgaaagcgaaactaaacgacatggacaacgactaaataaatgaactgtaattgggccaacgaaactaacgttccacacaccgacacgaccataaacgacgttgtcatttgtctaattgcaaaactacataaaataatggttcatgttctttataactttcaaaaaataaatactaatatcaagaaaatctagttcccgatttcttaaaataatgtttgagaatgtgtggtgggtatcacattcgaaaccacctggctctctttatattactcattaaaaatattactatgataaaaaatttactttttgaacttggaatttggtccaagaaaaatataaccgaaagtataattaataacgtcattagcggttatttgtatactaatttggagttttgcatacattacacattacaccaatgtgaacgtcctaatgatcaccgtttaagtttgtacttttttttttgccgttcacaattatgaatttaaagatgtcaactaaaatttaatttcaaagcttataaaaggacgtaagtttattacacaaacaatcacaaactctaattcctaataactattatacacatcgtgaatttgaaacatttttaagcgcaaattctcagcgagataaaaacgacgttgttttaatagttattggctttacaacttcgtcgtacacgccggttaccaaatatcgctaaggctcagaattatctctgttcaaagcttttgttttgttcccaattctgaagttttgaatcaacaaatcttcaataaagttttctcctttcactatctttccatattcttcttcttagtaaaactttgcattaatggcttacccaaatttgtaagctctttgtttcctcccttcttcttattctcttcttcattctccaaatttgtttctaggtttcttcagtttgagcaatgaagaagtctaaactcgataattcttcttcacagattcgattcgggcttgttcagttcttattagttgttctgcttttttacttcctctgcatgagcttcgagatcccattcatcttcagaaccgggtctgggtccgggtctgatgatgtttcatcttcttcttttgctgacgcattaccgagaccaatggttgttggtggtggtagtagggaagctaattgggttgtcggagaagaagaagaagcagacccacatcgacatttcaaggatccgggtcgggtacagcttcggttaccggagcggaaaatgagggaatttaagtccgtctctgagattttcgtcaacgagagcttcttcgacaatggcggattcagcgatgaattctcaatctttcacaaaacagcgaagcatgcgatttcaatgggtcgaaaaatgtgggacggactcgattcgggtttaatcaaacccgataaagctccggttaagacccggattgagaaatgtccggatatggtttcggtttctgagtcggagtttgtgaaccggagtcggatcttggttttgccgtgtgggttaacgttaggatctcacattaccgtcgtggctacgccgcattgggctcacgttgagaaagatggtgataagacggcgatggtgagtcagttcatgatggagttacaaggattaaaggcggtggatggtgaagatccgcctcggatacttcattttaacccgaggattaaaggtgattggagtggaagaccagtgattgagcaaaacacttgttatcgaatgcaatggggctcaggtttacgttgtgatggtcgtgaatctagtgatgatgaagaatatggtattgacttttgttagactagagttgactttaaactattgtttaatttgacctaatcttgatgaaaaaggtaaagactttaatttgtttttgtgatagttgatggagaggtgaaatgtgagaggtggaagagagatgatgatgatggtggtaataatggtgatgattttgatgaatcaaagaagacatggtggttgaataggttgatgggtcggaggaagaagatgataacacatgattgggattatccttttgctgaagggaagctttttgttcttacacttcgagctgggatggaaggttatcatattagtgtgaatggaagacatatcacatcttttccttatagaacggtgagtgactgacaaaaccgcttaatagttcatctctagacttcaatgattgaatggttttatatttcaggggtttgttttggaggatgccactggattagcagtcaaaggaaacattgatgtgcattctgtatatgctgcctcgttaccttctacaaatcctagttttgcaccgcagaagcatctcgagatgcaaaggatatggaaagctccttcgttacctcagaagcctgtagagttgttcattggaattctttctgctggtaatcattttgcagagagaatggcagtgaggaagtcatggatgcagcagaagctggtcagatcatcgaaagttgttgcccggttctttgtggcattggtaagcacaactcttgaaagacaaaattcacctaaatatagccattggtttaatatactaattcatattgcagcatgcaagaaaggaagtcaatgtggatttaaagaaagaagctgagtactttggtgatattgtcatagtaccgtacatggatcattatgaccttgttgtgctcaagacagttgccatctgcgaatatggggtaacttcttcgtccctcttttgttctccttaccttttattacttttctgattactcatccggaaaacttgtaggtgaacacagtggcggcaaagtacgttatgaaatgtgacgatgatacatttgtgcgtgtggatgctgtgatccaggaagcagaaaaggttaagggaagagagagcctttatattggaaacattaattttaaccataagccattgcgtaccgggaaatgggctgtgacattcgaggtatagattttgtggcagacctgaaactctattgagaaagaaacatgtgatgtttagactttatgttgattttttctgacttgtgaaaccaggaatggccagaagagtattatcctccatatgcaaatggtccgggttacatcttgtcatatgatgtagctaagttcattgtcgatgattttgaacaaaagcgattaagagtaagttatccttcacgtagatatgagattttgaggtgatcctttcatgtttccttttatgatatggtcttggttcttcttggtcattgcagttattcaagatggaagatgtgagcatgggaatgtgggtggagaagttcaacgagactagaccagtggcagtggttcacagcctcaagttctgtcagtttggttgcatagaagactacttcaccgctcattatcagtcgcctcgccagatgatttgcatgtgggataagctgcagagactcgggaagccccaatgctgcaacatgagatgacataacattgttttttgacggatttttcgttagaaaggaaaatgaagaagcagatgggtgataatggagctaactgttttagatctctgtatattatagaaacaatatataatgtatctatatatatatatatataatataatgaagggttcttgagaagttgactgagaagtcaatagtttttgcagtgtttacaaatatataatccagaggtactgcaagtaatgagggaagaacataacttctcctgtaccttgagtagtctacgtaaagcccatgagacaagccgcaacggtctggtatctcttcaacatctttaccaaaatgaggatttttgaatccttacaggtacttgtttcatctgcattcttacattggaaattcttttatcaagatgctaaacaagtgtctggctaattctaacttggctagttgagagtataagttccttgattagcctggttctgagggaaataaagtgggaaagctataaatagattcatacagttgctattagtagactgtttgcttaataatttttggaaacttgtgcttatgaacattaccgaagctgttagttagtgactggaataagcatctgacaggacgcacaaaacagagttgcagcacttgcttttcattttgtgattttcctgttcacttggcattggttcccacgtactccctatgctagactctcttcttatgtggtggattcgtttttcacaacagtaaccttatgtcaagacctttcctgattattcgccaaaacaactctctgaaccggacaccaaattaccaatgggataaagctgcttcaggctgagcctccctggcggtgtttataaagccttatgcatgcaagttcaggcctaatcactttatctgaattctgatgaagattaagagtgtgattacatgttggttctagattaagagtagttacaggttggttctggatttcgttctcaccacgacacaaaacctttcaagccttttacattgtgttttcagttggctattagcctcaaaatatctaaaaccggcacattctctcataactagtttttgtaatgcagtcactttacaaaaagtaatagatgccaagtgtaaagagctaaggtccaaaaaaaaaaagagctaaggtgcaagagatttgagggaggtcggtaaaagccattggtgtgttgtcacgttcaatcattttgcatagaatattggaagataaactggatgttggcaaaaaaaaaagtatagcaagttaggaagcagctaatgcaaccaaaactctctcatgcaacaacaaaacattgcaacctgaaggcggcggcggtactacaatttttggatttggtaaacattggttagccacaataagtatttgctgctgcggtccaaatatattcaactcctagtcctaggtaactaaaatataatagtagaaaattccaaacattaaagccatcactatatttgataggtacgtggtcgataaaatagataactcagagtacaccacctttgactcatcagccacctgccaacgagaaacacgactcctaattccactttcctccctcactcactctattatatataaacaaatcacactctgacctaaaacaaacaactctttaactatcatcagatcaataaaaaccagaagaagtcatggctcagaacgatacagtgaagctgataggttcttggtctagcccttattcccttagggcacgtgtggctctacacttgaaatctgtcaagtacgagtacttagacgaacctgatgttcttaaagaaaagagtgaactccttctcaaatctaaccccatccacaagaaagtccctgtcctcctccatggtgacctctccatctctgagtccctcaacgttgttcaatacgtcgacgaggcttggccctccgttccttcaatccttccttctgatgcctatgatcgcgcatctgctcggttttgggctcagtacatcgatgacaaggtaaactagtttagaggctcacttccgtggatctctgtttcatgctctgttttgctttgtcacagtttgatacttcagtttttgaggttcaactaaaagcttggatcttgacactcaaatatagatctgactgattaagatccgatttacggatatgggtattttgattaatctgtgtttgcttgctaaagtttgaaactttttagatggagctaaacaaaaaatactctgttcttgatagatctgtgtagcttgagatccgatttatacactcaacgcagaagtctctagattagtcatctcaagggttttgttttatgtttatgaaacagtgttttgcggcggtggatgcggtggtcggagcaaaagacgacgaagggaaaatggcggcggtgggaaagctgatggagtgtttggcgatacttgaagaaacgtttcagaagagcagcaaaggattagggttctttggaggagagaccatcggctaccttgacattgcttgttcggctcttttaggtccgatctctgtgatcgaggcgttttccggcgtcaagtttctccggcaagagacaacacctgggttgatcaaatgggccgagaggtttagggcccatgaagctgttaagccctacatgccaaccgtcgaagaggtcgttgcattcgcaaagcaaaagttcaatgttcagtgatgcgttttttgcttttaaaagcaaaagcaatgttgttgaatacgaataaaatgatgtttgttgtctttgagaaactttaaatttgtctgtgttttgtgccaaaacttctgattaattggtttttggtctttgtgcgttactattatcaattttattcttattatttgccatagcttatgattaaattgatcatagaagaaacatagaggctttaggttcttgtgctgaaccaagtttggcgtattcagtattttacattcttgtataaaattgaatgcatatgtcataattctggtaatacttgttaaattttgttgttcctgattaacattaccatacctattttgcaatgttttcatgacaaatattgccatactaaaattgctggaggaaacctcacctttcaatcgatttgactaaagtattgattgtaccaaactattcatgcctcaccttaaatttggaaacttaattgtgaaacatgtcaaatatggaatatatattgaataagattacaacaactcagtaaaacaacaaggtccttaatttgaaacagttaagcagccatgaaattatcgcaaatagctctgatttgcatagttatagcttccctcttcgctatgcatgagtgtacgtacagagcttttctaatatagtatacacacacgtatatgtcaaatgtctttttttaatcatcaaagttttgtgtgtctcaaatcaactttgtaggtgagagattggaggctacagaggaagagaaatcgagcaagatctatgtcccaccatgttacgaaaccatttgctcgttctcacttaaaaaggattgttggtgctgcttcgaacctttagttcacaaaaatctttgttggggagtacatgattttccgaacgccaaagagctttgcttcaacgaatattcaaagaagatttaaatcctttttattagagaataataatgtattctctgtttcgtgtagaaagttttttttcctcttgagtgcacaacaagttatgtgtttgaatctgcaaaaatttactggtcacatgttcatgctcttatcaacgagaaacacgacgtctaattccacttgcctccctcattcactctcttctatataaacaaattccactttcttccctctcactcactctgtcatctataaacaaattccacttccctccctctcactcactcactctgttataaatgaaacctaaaaaaaaacttgagagatcagatcaacaaaaccaagagaaaacatggctcagaacgatacagtgaagctgataggttgttcggatgaccctttttccattaggccacgagtggctctacacttgaaatctatcaagtacgagtacttagaagaacctgatgatgatcttggggaaaagagccaactccttctcaaatctaaccctatccacaagaaaacccctgtcctcattcatggtgaccttgcaatctgtgagtccctcaacatcgttcaatacctcgacgaggcttggccttctgatccatccatccttccttctaatgcctatgatcgtgcgtctgctcggttctgggctcagtacatcgacgacaaggtaaaacagtttagagactcacttctacatgctctgttttgcttcttgtcaaagtttgatactttagtctctgttattaataaatctgtttagattagtcaaatcaagagttatgtgtctgaaacagtgcttcgaggcggcgaatgcgctgaccggagcaaacaacgacgaagagagaatagcggcgacgggaaagctgacggagtgtttggcgatactagaagagacgtttcagaagagcagcaaagggttagggtttttcggaggagaaaccatcggctaccttgacattgcatgtgcggctcttttgggtccgatctctgtgatcgagatgttttccgccgacaagtttgtccgggaagagacaacacctgggttgatccaatgggccgtgaggtttagggcccatgaagctgttaggccttacatgccaaccgtcgaagaggtcactgaattagtaaagcaaaggattgaggagggttttaagcgaaacttcaaaagcaatgtttcgacttcggaatatgaatagttgatgtttgaatattttaatgctttctgtattactattttgtgccaaaacatatgcacttggatttttctttcttctatttgatatctttgtgtttttattgattttgaagcctcatttctcttagttttctttatttcacattcatgttttagcatatagtttcatattattatttggttaattgtttatatatactgaaaaaaataaaataatcttaattggtttatccaaaaggcgagaaaagccaaaaagggacacgtcatactactcactcgtaacaagacacgagttttttttaataacaaaatgaattgagtgattgatgacgacgacaagcaaaatgcaaaatcgctgtctccttcatgcttcgatcaatcaaaccatcatcaaacccataagaaagagaccaacagtgttcctgtaggaagcggcaaacttgcagctctgttctcttgaaatggagaaaacagtgagatgtgttcggtggggttatgaggttaatacctcttctgatgcttgcatcgacgcaattaactcctattttcaacaggttcttcttcaattatccctcttttagtcactgaaacatcatgaaattgattggaacattggttacaacagggcttaagattttcgatgcaaaattgaggtttttctctatggaatctagatggggtttcattaagaaaagtatcaatttttttattcttcaatcaaatttatggctagggtttgatcattttatgaatttgatacgtttttgagtcactatgtagcttaattacgatcttgtgggtagtttctgctctgtttctggagtattattcttaaagtttccatctttgtaatttcatatcagtgaatattgttgatcatgttctgtggttgatgaaggttcttagttatgggaggaagaggaaagtgattctagaagcaccactctacgataaagattgtgttttgggcagcattttagctgctcatttcctttcttcatctgatccttctagagctaattcctatgttgaagctgcggcatctaatctcgtcagtttattatatccactgtctttgtatttcagattctactttggttttgaggaaacttcctgagtttagtttgttggcttcaggaacaatctacaccttatgagaaagcggtttacgaggctgttacttacctaatctctgaggatagggatgacgacttggcttttgaaatgcacaccaaggttggttatcactttcattgttagtttatctgaaatgttattctagaatctagttttatatttttgtatctggcacccaaaaaatggttatggttcagaatgtaaagttctgtgcctttttgagtcacttgtttttgaattttaattgtggtttgcagctacttaaaagattcccaaaggacttggcttctttgaaaagagcgcagcttttaagtttctacatgggtcaacctgatcccttcttgggtcttgttcagcaggtacttaagttcttattgatagtgatggtcactgaatgattcacctgtctaagactataaaagttgcttaatattgtaggttctacctgcgaatcaagaagaaagttatattcatggtttacttgcgttcccattgttagaacttggtcgaatggaagaagctgcggcagcttccagaaaaggctatgagataaacaaagaagacgcttgggcacatcactgtgtgagttacataacattgagcatttgcatcctctattctcagtttccatgtaataattatcactcagtagtttttactaatgatgttttctatctatcttacttatttgttgcagttgtgtcatgttcttcaacatgaatgtcggtttaaagaagcagtggagttcatggaagcactcgcaggaacttggccctcttgctcatccttcatgtaaagcattccctcttacctgaaggctctcacagattatcaagttcttctcttattgttaacaatccctgatatattatttttttaacatgtccataattttcaggtatacacacaattggtggcatgttgctctctgttacttagaaggagggtccccaatgagtaaagtagaggagatttatgatcatcacatctggaaagaattggagaaagacgatgctgttcctcctgaagtaatcctctttttgattaacaaatttatgcttttgcgtcatctattcaatattcaactgtctgcaactctttaggtttatctcaatgcattgggcttgttgatacgtttagatgtaagagatgctcttgatggttttgaagaccgtctcaaaaaccttgcagttcgtttaactaatcaggtaagccatacactagttttatatcatcccaaaacggttgcagttatacgagttatcttgttgaataagtttttatttttcggccacttgctttaacatttcaggcaaactggtatttggagtggcaccttgatatattgatagtttgggcactagcaaaggttggagagacttcaagagctcatgaattacttgagggccttaagttccggttagtgtgactttcttttattctgcagtttctaaatgataccgaatttgtcatgaacttgtgttgttcttgcagattatcaaagaagaacaagaagaagcaacaagtgatgcagaaagggattcaggtttgtttattccccctccctctttgatcgtctttctttatcattgtaactagtactcaatatcagtcttgttttcatataagcttggggaagctgtgtatgaatacgcaaggggtaactacgaaaaggctctagaactactgggttcagagttcaacgccattggttacaaggtaaaccgttcttcagcgacttgctcaaaatactctgaatcaaacacatttctggtggatcttttaaactgttttatggttaataatagatcgttggggcatcagacgaacaaatagatgttttcaacgaaatgtggtgccagctgctgctaaagacaggccaatcctccacgggtaaggcttgttgtagagtcttactaatttggatactcgtcttgcttagtatgatgataaacaatcgtggttctgatgtatgcagccaaagaagtaatcagagagaggattaaggccagagatggtattcctttcatgtggcgtttgctggtatacattcaaaagcagaacatcactttgttttagtgtactatatgtgtttttgctatgagaaaatgatgtcgttgtggttgcaggagaaaagttactccatggaaggcaatgcagaggctgagagtagtgcacgagagagagctaagaaacttgaatcttgttatttctaactttgcttcaaaaatccaataatgacatgtgtgtatacatgtttttaaataagtatagaataaaatattttgctactcgtgtcctacttttttgtttaccaaaaggtaaatgaataagggggtgtattgaaagtggaagtttaagagatttgtgtagaatttataaatcctatgttattcaaacatgaattttaaaaagtttcatgaaattcagtgttattgaactaatgatttaaaaatccaccttaaaatccactgttattaaaaacaatttgtggatttgaattttaatgattttggaggatttgagaggatttctttagttaaaaatacagaaatccaaattccatggctaccgccagtggtgtaacaaactgtggaatgctgtcagatttgcgatgatgaagcttggcgatgggtatactcctcctgtgcaaactctacgccctaaaaccatgaccttcagctgccaatggattctttctttactaacaatatcgaagacagtggattccttgaatgcgtttgcattatcggatgctgccaacagtgtatgcttggtggcaataccagttctgtgatgtatttatcgaggcaattaagccttatttttctgctgacactcaaagaaggattcatgcacaagatgctctctgggtgtgtctcgagactggtttgagattgctgcatccatttatgccttatattacagaagagctgtggcagcggttgccttcatcgcaagactctgaacgaaaggcgtctatcatgatatgtgactacccatcttccatagagatgtggacaaacgagaaggtggaaactgaaatggacatggttctagcgaccgtgaaaactcttagggcactgagagctgcagagtcgctaaagagacagagaaatgaaaagttccatgcgtttgctctgtctggaaatgcattaacactggggattgtgaaaccacatgagctggagatcagaactcttgcaaatctctcatcctttgaggttatgttgaggggagaagacaaagcatttgtagtgtgttgggaggaaattgaaatttggattagttacaatgtgctttattttattttatgtaaactatgtccatcgttttgaatatgacggattcgatcatggaaaagcaaacttaggaatttccatgtttcaaaaagtcaatgcatccatacaaaaagttatactacatgaattaagaagtgttgtgtatgctttagcactaactatgttgtaactaaaagctaattatgctttagccgacaaaagaaaagaagaagcttactaattctctccattgtcacgaaaagaatctgtctttcaaacttattttaacattgtggcattagaaatcgaaattcttgacgttttcggtttgtataagagccatgtcgctataatgtaatctttctctccgggttcacgtaaagaatttctctgcaccttttccatctttcaaaactttaatttcgaagaggaaataatcgaagatggtgaagaccggcgatgtttccgatcagcgttcgaggctcgagtgggatgtattcctcagtttccaaagagacgcgcgccacaaatttacagagcgtctctatgaagtgctcgtcaaggaacaggtccgggtttggaacaatgatgatgtggaacgtgggaatcatgagctcggtgcaagtctcgtggaggctatggaggactcggtcgctctagtcgtcgttttatctcctaactatgctaaatctcactggtgccttgaagaattagccatgctctgtgatctaaagtcgtctctaggtcgtctggtgttaccgatcttttacgaggttgaaccgtgtatgttacgtaaacagaacggtccttacgagatggattttgaagaacattcgaaaagatttagcgaagagaagatacagagatggaggagagctttgaatataatcggaaatatccctggatttgtttacaggtacgactccaatatccttcatctctagacttattcctcacgtaacctctgcattaaattattcatttcatgcggttattattttgagtaagacatggtcttcaacactaaagaagattgttgaccttgcttatatactaaagtcaattagccttttacattgaaagaagaagaaaataaactataaggaatttgagactgcgtgtcgttctgatcaataaggacataaaaactgtgtgacgtttcagaattagtgtttgccaccgtactaaaaaagtcaaatgcgagacttttgttttacatgagagaagaaaacagaaagtggctttttaactaaaaaatatctgaaaagccaaaaactagaactttctcaattttaggcatttctcaaaatcgcaagcttcgtcttcgtcgtgtgtagtcaaaagtttgtattccactttctggtgacttcgtcgaccgagatcgcgaaattgagctatcgattggactgcagacatggttgcgtgagttcttctctgaccacccttgagccggagaaattggaagtgattacaagaaatcggagttgagcaaaaaacaacacagacttcacggagagtttctggctttctgctgcaacttgtcgtcttgtcagagttgactaagaaggaggggggagatcggagatggaatctggcgttgtttcgaagccgcataggctcaagtatgacgtattcctcagtttccgtggcgcagacacgcgcgataacttcggagaccatctctataaagcgctcaaggataaagttcgggtcttccgcgacaacgaaggtatggaacgcggagatgagatcagttcaagtcttaaggcaggcatggaggactctgcggcctctgtcatcgtcatatcgcgtaactactctggctctcgctggtgccttgatgaattagctatgctctgcaagatgaaatcatctctagatcgtcgaatcttacccattttttatcatgtcgatccctcgcatgttcgcaaacagagcgatcatatcaagaaggattttgaagaacaccaagtaagatttagcgaggagaaagagaaggtacaagaatggagagaagctttgacattagttgggaatcttgctggatatgtttgcgagtaggactccattatctcatttagaatcatgtagacattagtagaagatgaactgaatttaggatttgactattttttttttttggaatttggcagcaaggactcgaaggatgatgatatgatagagcttgtggtgaaaagggttttagctgaattgagcaatacaccagagaaagtgggagaattcattgttggtctggaatcacctttaaaggatttgacgggcctgatcgacactgaatccagttctggcgtccaagtcttgggactttatggtatgggtggtattgggaagactacccttgcaaaagccttttataacaagattgtcggaaacttcgagcaacgagctttcatctcagacattagagaaagatcatcagccgaaaatgggttagtcactcttcaaaaaactctcatcaaggaacttttccgtttggtacctgaaatagaggatgttagcataggcctggaaaagataaaagcaaatgttcacgagaagaagattattgtggttttagatgatgttgatcacatagaccaggttcatgccctggttggtgaaacaagatggtatggtcaaggaacacttatagtaatcactactagagattctgagattctgagtaagctctcagtgaaccaacagtatgaggtcaagtgcttgactgagccgcaggcattgaagctctttagttatcattcactacgaaaagaagaaccaacaaagaatctgttggcgttatccaagaagattgtccagatatcaggactattgccgcttgcagttgaagtttttggatctcttttgtatgacaagaaggaggaaaaggattggcaaactcaactggataagctgaaaaagactcaaccaggcaatcttcaggatgttctggaactgagtttcaaatctttagacgatgaagaaaagaaagtattcctcgacattgcatgtctctttcttaaaatggagataaaaaaagacgaagttgtcattgtactgaaaggatgtgggttaaacgctgaggctgctctcagtgtccttagacagaaatctcttgttaagatcttggcaaacgatactctttggatgcatgatcagattagagacatgggtaggcagatggtccttaaagaaagccgtgaggatccgggattgcgaagtagactctgggatcgtggtgaaattatgaccgtactgaacaatatgaaggtatgaatatgaagttatatattatttgtatataagacatacatactgatgatctgttttctttttcctgtaatggaatgacagggaacatcatccattcgaggaatcgtacttgactttaaaaaaaagtttgctagggaccctactgcagatgaaattgtctcgaggaatctacgcaacaatccgggtatctactctgtattcaattacctgaagaataagttagtaagatttccagcagaggaaaagccaaaaagttctgaaatcaccattcccgtagaatcttttgcaccaatgacgaagttgagacttcttcagattaataacgtggaactggaaggaaatcttaaacttctcccatctgaactcaagtggatacagtggaaaggttgccccttagaaaatctccctccggattttcttgctaggcaactttctgttcttgatctttcagagagtggaataagacaagtccagactttgcgcaacaaaatggtaagctttcttctttcctgtagcatggggaagcatatagttttaagtcaaattctcactgtaaaaacatttctctgtttctttcaggtggatgagaatttgaaggttgtaattttgcgtggttgccacagcttagaagccattcctgatttatcaaaccatgaagccctagagaagcttgttttcgagcaatgcacccttctggtgaaggttcctaaatcagttggtaatctgagaaaattgattcacctggacttcagaaggtgttcaaagctttctgaatttcttgtggatgtttctggacttaagcttcttgaaaaactattcctctctggctgttcagatctgagtgtgttaccagaaaacattggtgccatgacaagcttgaaagagcttcttcttgatggaactgcgataaagaacttaccagaatctataaatcgcctccaaaatcttgaaatccttagtctaagaggttgcaaaattcaagagctacctttgtgcataggaacattgaaatcgctggagaagctatatcttgatgatactgcgttgaaaaatcttccgagttctattggagatctaaaaaatctccaggacctccatttggtacgctgcacatccctttctaagattcctgacagtatcaatgagctcaaatctttgaagaaactattcatcaacggaagcgcggtggaggaattacctctaaaaccgagttcactgccaagcttgtatgacttctcagcaggagattgcaaatttctgaaacaggttccgagttcaattggtagattaaattctcttctccaacttcagttgagtagcaccccaattgaagctctaccagaagagattggtgccttgcattttatacgcgaacttgagttgagaaactgcaaatttctgaagtttctgcctaagtcaattggagatatggacacactctatagcttaaaccttgaaggctctaacattgaggaactgccggaagaatttggcaagctggaaaagctagttgaactgcgaatgagcaactgtaaaatgctcaagaggcttcctgaatcgtttggagacttgaaatctcttcaccgtctgtacatgaaggaaactttggtctcagagttgccagaaagtttcggaaacctctcaaatttaatggtactggaaatgctgaagaagcctctttttagaatttctgagagtaatgttccaggtacaagcgaagaacctcgttttgtagaagtaccaaactctttctcaaagctcttgaagcttgaggaactagatgcttgcagctggagaatatcgggtaaaatccctgatgatcttgagaagctttcgtgtttgatgaaactgaatctggggaataattattttcatagtcttccgtctagcctcgtaaagttatcaaatctccaagaactttcattacgtgactgccgagagctcaagcgtcttccccctcttccatgtaaactggagcagctaaacctagcaaactgtttctcattggagagtgtatccgacctttcagagttaacgatcttgacggatctcaatctcacaaactgtgcgaaagtggttgatattccaggcctagagcacttgacggctctgaaaagattatacatgaccggatgtaactccaactactcccttgcagtaaagaaaagactttccaaggtgattccaaaaactccacagaatctcatcatggcctatttaaaaaactttcttacaccacttttgatttgttactgcaggcttctttgaagatgatgcggaatctgagcttgcctggaaacagggtcccggactggttctcgcaaggccctgtcacattctcagctcaaccgaacagagagctcagaggtgtaatcattgctgttgttgtggctcttaatgatgaaaccgaagatgacgactatcagctgcctgatgtgatggaggttcaagcccaaattcataaacttgatcatcacaaatgcaccaacacattgcatctctccggagtgcctagaacaaataacgatcagcttcacatctgccgatactcagcttttcacccactggttacgatgttgaaagacgggtacaccatacaggtgatcaaacgaaacccaccaatcaaacaaggcgttgagctaaagatgcatggcattcatctcgtttacgagggggatgatgatttggaaggcagagaaaatactttacccgagactcaacaaaccgtttctcagaaacttgccaattttttcagctctttcgaagaagaagaaggtgaaaccatctcagaaagtgaatctacagttatatgatctgctagtgcagataggttaagaaactgctcacaaataatcttaatcgatacaaaatgtttgttgctcatatacgatttggtgttttggcttttgtgtttttctttgttccttgtctctttagtctttaccttttgataatacaaacaatataaataaataaaaccaaaaagaagaggaaactcttgtttccaatgatctcgggcattctttaataacaatccaacagaactgtgaaggaatcttcttctgtgttttttgttttgacggcttccatctttaagaaagtcaatggatagaaaagaataaaatagaacatgttgcttgtgtgtcctatagcactaacgaaaaagaacactgcatctgcgtatcctttttgtctttcaaaaccttaattagcagtgtgtgccgttctgatttaagatagatatggaactgcctgacgttccggtgtggagaagagtcatgtccgttgtttgggattatataaaactgtttgcgtgtgatgtaacactaaagcctaaagactctaaactataataactatataacttctttactgattgtcgtgaaagagtttctgcattctttgaggcgttgactttcaatattgatatcgaagaagaaagatcggagataatgatgaagaccggtgctgttgtttccaatccacgttcgagggtcaagtgggacgcattcctgagtttccaaagagacacgagccacaatttcacggatcgtctctatgaagcgcttgtcaaggaagagctccgggtttggaacgatgatttggaacgtgtggatcatgatcatgatcatgagctacgtccaagtctcgtggaggctatagaggactcggtggcttttgtcgtcgtcttatcccctaactacgctaactctcacctgcgcctcgaagaattagctaagctctgcgatctaaaatgtttgatggtaccgatcttttataaggttgaaccacgggaagttaaggaacagaacggtcctttcgaaaaggattttgaagagcattccaaaagatttggcgaggagaagatacaacgatggaagggagctatgactacggtcggaaatatctccggattcatttgcgggtatgtatgacttcaatttctcatctctagttttgtttccgcatttctaatctcttttatacaagtaagtttggtagagatactttgacatatgctacatcatcatctaaaacttctaagcatcatctttatgtttcttgaaatcatctctcccattcaccatttaatttactacgaattttcgaaaattttggaattggaaaagactctggttctcttattgtctttcaactactaaagccaagtttttgttcagagatcaaaactatatgagtaactataggacataggcaaaatattcattagaatttctttgatctgttatttgctttgattcgattagaaaatttcggatagatgtgactacacgaagcaaatcaaaatactaaaaatcaatatcggttaaactgtagtgctctgcaatacgtatatagaaatagacaataattacagatataagtattcatatatatatatatatatatatgtatataagttttgtgtatatttattcatcaaattagttatttaaatattaaattttaaacaaatcaagaaaagtatatttgaatataatgttgttattattggtttaaaatttgtttttaacataatttatttttataattaattaaaaacttttaagaagtaactcggatacaccaaaaatctaggatatcattttgtgccaaggtactactaattaatctaagcttagagtaaaaaagatgagtcaagtaatttaacactgcgtgtcgttctgattgactacagaaagaactgtgtgtcgtttcagaaataagggaaaaagagagtcaaatgcgaagttttttttttcttttttaacaaaaccacaaagtgttgaccttttcccacaaaaatcgaaaagcttggtcgtcatcgttgtaatgtcccagattctggaatccgagaatcgaaaagcgtcatgaagtgaggtttgcaggagatccaattggagatggagactggcgttgttccgaataggctaaagtacagcgtctttctgagcttccgaggattcgacacgcgaaccaacttctgtgagcgtctgtatatcgctctcaacgaaaagcaaaatgtccgagtctttcgcgacaacgagggtatggaaaaaggtgataagatcgatccaagtctcttcgaagccattgaggactcggctgcctccgtcatcatcttatccactaactacgctaactcttcttggtgcctagatgaattagctttgctctgcgatcttagatcgtctctgaaacgtcccatgatacctatcttctatggagtcaatcccgaggatgtccgcaaacagagcggtgagttcaggaaagattttgaagagaaagcgaaaagttttgatgaggagacgattcagcgatggaagcgagctatgaatttagtcggaaatatccctggatatgtttgcacgtaggaaaccatgtagacatatactcatactcgataacatggtttttttatttagctgctttttgttgaaattccgttgttgttggcagagcaaagactgttggagatgacaatgaaggcataaacagagagaaagtagatgacatgattgatctggtggtgaaaaaggttgtagctgctgtgaggaatagaccagagatagttgcagactacactgttggtctggaatcacctataaaggatttgatgaaactgttcaacactgaatccagttctggcatccaagtcatgggactttatggtatgggcggtattgggaagactacccttgcaaaagccttttataacaagatcattgttaacttcaaccgtcatcgagttttcatcgaaagcgttaggggaaaatcgtcagaccaagatggtttagtcaatctacaaaaaactctcatcaaggaacttttccgtttggtacctgaaatagaggatgttagcataggcctggaaaagataaaagagaatgttcatgagaagaagattattgtggttttggatgatgttgatcacatagaccaggttaatgcgctggttggtgaaacaagctggtatggtgaaggaagtcttatagtcatcactaccagagattctgagattctgagtaagctctcagtgaaccaacagtatgaggtcaagtgcttgactgaaccgcaggcgttgaagctctttagtttttattcactacgaaaagagaaaccaccaacacagggtttattggagttgtccaagaagattgccgaggtgacgggactgttgccactggctgttaaagtgtttggttctcatttttatgacaaggacgaaaacgaatggcaagttgaactagagaagctgaaaacccaacaagacaaacttcacggtgttctggctctgagtttcaaatctttagacgaagaagaaaagaagatattcctcgacattgcatgtctctttctcaaaatggatataacaaaagaagaagttgtcgacatactgaaaggatgtgggttaaacgccgaggctgctctccgtgttcttatacagaaatctctccttacaatcttgacagacgacactctgtggatgcatgatcagatcagagacatgggtaggcagatggttcataaagaaagcagcgatgatcctgagatgcggagtagactctgggatcgtggtgaaataatgaacgtattggactatatgaaggttatttatatctatatcttcatttatatatcatttgtgtttgacttacattctcacgaccgtgtttttttgtaatgagataacagggaacatcatccattcgaggaatcgtactagactttaataagaagtttgcgagggaccatactgcagatgaaattttctcgagtaatctacgcaacaatccgggtatctactctgtattcaattacctgaagaataagttagtaagatttccagcagaggaaaagccaaaaaggtctgaaatcaccattcccgtagaatcttttgcaccaatgaagaagttgagacttcttcagattaataacgtggaactggaaggagatcttaaacttctcccatctgaactcaagtggatacagtggaaaggtttcccattagaaaatctccctccggatattctttctaggcaacttggtgttcttgatctttcagagagtggagtaagacgagtcaagactttgccccgcaaaagggtaagctttcttatttcctatagcttggggagttatatagtttcactgctaaaataattctttctgcttttcagggggatgagaacttgaaagttgtaaatttgcgtggttgccacggcttagaagccattcctgatttatcaaaccataatgcactagaaaagcttgttcttgagcgatgcaaccttctggtgaaggttcctagatcagttggtaatctgggaaaattgcttcagctggaccttagaaggtgctcaagtctttctgaatttcttggggatgtttctggactgaagtgtcttgaaaaatttttcctctctggctgttcaaatctgagtgtgttaccagaaaacattggttccatgccatgtttgaaagagcttcttcttgatggaactgcgataagtaacttaccgtactctatttttcgcctccaaaagcttgaaaagcttagtctaatgggttgcaggtctattgaagagctaccttcgtgtgtaggatatttgacatcgctcgaagatttatatcttgatgatactgcattgcgaaaccttcctagttctattggagatctaaaaaatctccagaagctgcatctgatgcgctgcacgtccctttctacgattcctgagactataaataagctcatgtcattgaaggaattattcatcaatggaagcgcggtggaggagctacctatagaaaccggctcactcctatgtttgactgacctctctgcaggagattgcaaatttctgaaacaggttccgagttcaattggtggattaaattctcttctccaacttcagttggatagcaccccaattgaagctctaccagaagagattggagacttgcactttattcgacaacttgacttgagaaactgcaaatctctgaaggctctgcctaaaacaatcggaaagatggacacactctatagcttaaaccttgtaggctctaacattgaggaactgccggaagaatttggcaagctggaaaacctagttgaactgcgaatgaacaactgtaaaatgctcaaacggcttcctaaatcgtttggagacttgaaatctcttcaccgtctgtacatgcaggaaactttggtcgcggagttgccagaaagtttcggaaacctctcaaatttaatggtactggaaatgctgaagaagcctctttttagaatttctgagagtaatgttccaggtacaagcgaagaacctcgttttgtagaagtaccaaactctttctcaaagctcttgaagcttgaggaactagatgcttgcagctggagaatatcgggtaaaatccctgatgatcttgagaagctttcgtgtttgatgaaactgaatctggggaataattattttcatagtcttccgtctagcctcgtaaagttatcaaatctccaagaactttcattacgtgactgccgagagctcaagcgtcttccccctcttccatgtaaactggagcagctaaacctagcaaactgtttctcattggagagtgtatccgacctttcagagttaacgatcttgacggatctcaatctcacaaactgtgcgaaagtggttgatattccaggcctagagcacttgacggctctgaaaagattatacatgaccggatgtaactccaactactcccttgcagtaaagaaaagactttccaaggtgattccaaaaactccacagaatctcatcatggcctatttaaaaaactttcttacaccacttttgatttgttactgcaggcttctttgaagatgatgcggaatctgagcttgcctggaaacagggtcccggactggttctcgcaaggccctgtcacattctcagctcaaccgaacagagagctcagaggtgtaatcattgctgttgttgtggctcttaatgatgaaaccgaagatgacgactatcagctgcctgatgtgatggaggttcaagcccaaattcataaacttgatcatcacaaatgcaccaacacattgcatctctccggagtgcctagaacaaataacgatcagcttcacatctgccgatactcagcttttcacccactggttacgatgttgaaagacgggtacaccatacaggtgatcaaacgaaacccaccaatcaaacaaggcgttgagctaaagatgcatggcattcatctcgtttacgagggggatgatgatttggaaggcagagaaaatacattacccgaggctcaacaaaccgtttctcagaaacttgccaattttttcagctcgtttgaagaaggtgaagccagcgcaaaaggtgattccactgttgcatgatctgctaccacagagaagttaagaaactgcacaaaaacattctttccatacaagctgtttgttgatcatatagcgtgtgtgcttctgtaagttttttctttctaggatgtttagttgtttttttacagtttataccgttgcttctataatcaataaaaacccaaaaagaggagactcttgtttcccacaattctgtgcaattttgtagaatgttcacaaaatttgtgaagacttggttaacaaatccaaagacttctatgatcaaggtattttatctgctaaagacctaaagtgtgtttgttctatttctcattctccaacaagttttcatatatttactgtttccattgtagcagatgaagctttacataaaaccgagagtccaagtgtcctgctcgatacaataagtgtatgctgaattgacatttaagtcactcgatacaaaaaatgactttcacaacttgtaacagtagtaacaaagaagaaagtaacaaattgtgaaaggaaatgttgacaagacgatagcaagcattattgagaagtggggtcgaagttcatgtgtctatggccaagcgagacgcagacatctctacatctgcctccaacatatcggtttcttttaactctattgtctttattataagaccaaaccccacatctcatccaaaagatatcacaacacaccaaattacgcattgacctttttgactatcaaagacattacttcaaaagataaaatcaacagacaaataaacattcttcaaatgattcaactccaaggcatagagccgttacgaacctaagaaattaaaccaaatgccaaactataggagagcttgaaataagactgaaatcttctcatttcatcagaagaggttacattccaaagagtacattaatgacccaaacgaatgtacagaattatacggtaggagatacaagacaaacacgagcactgacacggttaaaaactaacaacactgagggaaggaacaaagaatgagatataaagtaaaaaaaaaaaagcttctgatacaaaagtagatttctcataccttcttagcgcttaagctgccaaaaaagactactttctggtaaagatactcaagcttcttgtttgttgaagaccagaggaaattcatcgtaatgctccgaaacaccgtgtttatctgccatgttcttcaaagattcatacacctgaatcatcgttggcctttccttaggcctggacacaacacagctacatgcgattttcaggaactgcaatatctcctcatcgtgtcctttatcacatatgcttctatcaatagcgtctttgcttctaccagtacccaaatactgactcacccagtcaactaaactccctttaaacccttccacaccgttaataacagacaaaggcttttgccctgtaaccaattcaagaagcacaatcccaaacccatacacatctcctttcaaagacgcaaccatggtgctcgaatactcaggcgctacataacctaactcccccaaatccccattattgaacgagctatcgttcgaatcacgagatccaactagctttgccaatccgtaatctgttatccgagcatcaaaatcatcatcaagaagtataacattggagctaataaactgatgcaaatacggcggttggcatccatgatgcaaccaagctaaccctttagcagctcccacaccaatcgcacgccgagtcggccaatccaaaacagcatcacacaatccaccattgtgcaactgagaaaacaacgtaccattaaccatatgcttatacaccaacagtctctcatcttccacaacacaataccctaaaagcggcaccaaattcggatgtctaagctctcctaacttattcatctccgacctaaactgtttctcaccaaacccacaagcactaagcctcttcaccgcaagtgcagacccatcaggtaaatccgctttatacgaaaccccagtcctcgacgaaacatcgatattccctgaactaaaattgttcgtagcagccattaaatcacccaatttaatcttcacaataggtttctgaaacaaagtcacctgaacaagcttatgtgacctcaacaaaccaatccaatcactatcatccttagacttcccagcaccataacctttcttcttcctactaccttctctaataaagaaccaccagaatataactaaaccaacgcacaaagatccaacagctccaagaactccagcaactataataatactcagatttctcccattcaacgctccacatcgcgataaaggcttcccacaaagtccgttattcccgctaaaatcgtctcctccgaaccgagccagctcggacggaatcgtaccggagagatcattccctgctagagaaagacgtcgaaggcgatctaatcgactcaactgagaaggaatcgaaccagaaagcttattatcactcagaatcaaagcgtttaagaacttacactcaacgatctgagtcggaatcgaaccaccaagcttattcccagacagatctaacgtaacgagataaggaagccacgaacagatttgagaaggaatcgaaccagagagatcgtttccagagagatccagagattgtaaactacgacaaagcttaagagactcaggaatctcaccggcgagctgcatcgattgaagctgaagagaaataatccgattctctttctcgttccagcaggaaacaccagtgagcttacaaatcgaagaagctgaagagtttgggaaagaccaggaactgagtctagaagaaggatcgatgagtgagtttttcaaaccttggagacagagaacgtcgtcttcagctgaagaagaagaacagagaaacgagcttatgaagagaagccataagagtgtgatgaagatcttcttcatgattaaggatggatctagttcttcttcttaggttaaaaagcagagagagcttctatggcggaagaagaatggtcattgactgtgtgatactgttgagaaaagatgagaaactttttttttttgttgctcttttgactcttttttttttttagtaacttagtggaaattagtatttatcttttgtttggggaaaaagaatcttcttacaaaacgacaccgttggaaaagcaagtctgagagaagcagaggatatatacaagtcagtctagtctactactacatgttacaattgaaagggaaagctaatttttcaaaaaggataacacttttgggtgaagatttttttttcatttcttgtattgataggtttgcctaaaatcagacatggaattttagaaccatgattctttaactctaacgtatcaatttaatcaaaattaaattcttcctctattgatattgatataatgtgacttaaatgggattctttttgtatgaaaggttggttggctggtaataaactaataataataagtcacaagagttttgaacttgttataaagaaaaagacaaaaatattttatttttttaaaacagaagacattattactagaactgaggaaacaaaaaaagacattacttgaacaaaaatgtgttttggcccatgggctttcacagcattaacttacatttcagctcatgggtttcatgactttaggcccataatcttcattgcctcgagaccaaccgtttgtaatatttaaacatttcatctgagattctaactcgaaacctaagtactactactacaaatttcgttcttgaaatctttcacttccattcatataagaacaagaaagaaaaacaaaaaaaaagggatttagcagtgttaccgaaatttacatgtggtaaactctaagaaacaaaagatattataagccaactttatcccccaccaatcaacaaaaccaaaaaaaaaatgtaagtaacaaaagaaagaaatattgatgtagattttgtatgtatccttgtcaaatgtaaataaaatgtacacctgctgctgaatcagaaaccaactaaaagtcattcttgttgttgcctctgccacggcagataaccagtcacttgatcagcaaaattcgacataaccaaatccttcaatccagtgtcccacacttcacagaaccgtcgtttccaatccggcggctcgattgcctctgtcccgagccctggagctcgatctttagacccttgattctgattctcttgccagtcaacaacataagtagccactcttctgtaaaacttagctttgaaagtgtcccaaacttggtacttgtaatggttcactaccgcaacactctccaccaaactcatatgccccactccttctttcaactgaaaatgatgtacttcattgagcaatgagcttgtgagcaactcagggcggattatcgacttgtgtctctcggggttcgcttgtctacaagtgtaacctacggtcacgccttgtgatggaaccgaggtcagaccggatggaccgtagctatgacagtccgttctgatctctccaaccaaatcccaagaagtgtagttcgatacaagcgacttcaaagcgtttttgctcggtaagccttgagagcgatgcgtagggaagtagtagaactcgtcgacatcgaagaatccaacccaattgcattcttctttcgctctaaccgcacaatgcgaaaaaccggcttcttgagtcttgatccaaggccaaacatgtcgactcacattgtaattctccgaactaagcaactcaatctcctcttgtataccatcatcgctgttgttatcatatataaaccaacgttcgacaccgagccacgagtgatacatgatccattcacgcaagaacggagcttggttccataacattgtacaaacacaaagctcatgcttaactccactcttcttctccttcttctcaatcgaatcagaaccgtagattctcgcaaccgaaggcagagcaggggtagttcttcctctaggatcaatgtgaattacactcactcgaaacatcatctctggatttagcttcaaactctcaggcaaaccacacctcacaacttcttgcgcagcagcaatagcttgagtcacctctttctcctccgaattctcaatctcaaattgacacttatagtaagaaggatctgattccttgtgaggtcttcgagtcaatcctttaacaaacacaaccaccgtgtcgccgtcaatcaccgcctcataaccaaccttttcccaattatgaacacgacggctctgtttcttcatcttcttcttcaccaaatctccacggaattgcaaatcaacagatgaagaatagttcaaaggagcattaggacatcgaacaatcgacctaaactcatcgaattcatcactagaaatcgagggcaacaccaaagtctcttcctttactccacgataaacacaaactaggtttttttcacctttcccaattccgtgcgaaagaatcagcaataaatggtcagggaattgaactctgtcttcaacactcaacggagggaatctaccacggtgaaacgaatccatggatgatgataaaacggagagagtaggaacacgaagagacggtctcagagaatcggaacgaacagagagtgtggagattcggtcggaagataagaagaagagcaagacgaagaaacaacaaaagcataagattagatacctttgagacaagaactgtacttttacttgttgtttgtttcgtactttcctcttcttcccattctcatactccgtcatcttcaagaaaaattgaaacttttttcttcttctggtttgttagaaacagagcaaaagggtggttgcttaataaactgatctagagaaggtttttactcgtgaagaagagatctggtttttgcgccggccgacaaaagtaccttcttcttgttccttttctttaagagagattaaagaaaggaaatatataaaggaatttaatttgtgaaatattgtttgattttgatttgttaagaaaaaggaaataatcgttgtgataaagaaggaaagaaacaaggaagacgcgttttttctttacgagtcgttctcgtaatcttgtaagccaccgaagattagtagcactaatcattgtcttacttttggcttaattaaaagtgtgattaattaaggagattaaagtgatttttatatggcttttatgttttgttttggttttaataattaagacgagaagaggccactagttttgcgacttgtgtcaaaagatgcgacgatgaggtggaccatattctcgtcttttgttttttcatttttaatgttttgggattgaagaaaaaggaggaccgatgatcccgtgacagttgtgttgcgttgcgtggtcttttagtcttacggcaaataataattgtttttcaagattcgccggaggatgaggaggagaaccaaacttgttggtactaagcatgattggattattgtaacttgtgagtagttaaggctgcttatgtgtgtagcaaaacgattcgtcggtatagaataagtatggttgattagtttaatttggttgtataaaagaattatcaaagcgttgaatgatgacatcaaagatgaaatgaatcgaacctagttatatatttagatagaactgtttatatctatatagtattctttaaagaattgttataggaaatgaccatcttgcatagttcaatattggtcaaacaaaatcttgtgaacatgttttgtcactaacaagcatgttcaactagttaatattattttccttttgaatggtttagttatctaacgtaaacagatttgttatattagtaatctttagctcttaaattgatgatatgatcagcatcttacaattagttcgtccgtcgtattacaatgtaggtcttgatgaatgtgacgctgaaggcgatttgttcttcatccatattgcgttgccgacctcaaaggttggttcattcaatcagtgagtttgagagagcacatttgctaagggtatagtagtacaaataataatttttgtttatctttggatttgagatattttttatagcttagtttgtcctttataaccgacttctagtatatatttttttccatttcatttttaagctattattgagattgatacgtgtgtcttgtaaaattattgtgattgttatgtatattgtaagttatacataaatacatactatataataaagatatgcttttaatataataaaattattatgattgttatggagtttgtgaaattattgtgattgttatggattttgttagttatacattaagtatatgatatataaaaaaaatgacaaacgaaagaaaagagaatgcaatgaattatttattgatcccaattagttatgtatgtttgtggttagccaatgagatatgttgcaaattaagtaaacatggttgtctaattgaagttaattaagttgttttttttttttttgaaaaatcgtatactgtttgactttgtatcaaatgagtcgtattttaggctgataaaaaaccttatttagaaggtatttagaaataaaaaccgtgtattatattgatcaattctgtaatatgatatatggtcatattatgaaaagaaattaggccaaaactggaaatgaggaacgtggagattaggtatagggttttataggatagtgcatgccatagtgggaagttgctgtgtacattgcttcaaatcgctggattcatgttcctttgttctcgcccccattttcttttatttttaaaaattctaactaacaatgattctaatgaatatataaataaaatgtgccttccattacaattattcacccatcattttattccctttcatgtttgttattcttgttttctaatgattacaatcaaaccagctacattcttctttccgtttcccatactttatttttgttgtttatctatacttatatcttcgtacgtataggcatacaaaactttaaacttgtccatcgatttactaccactacgtacacttgttattatatcacaatgcgtcaaacaaacgtgtaacaaaatcaaactatatgtatactaatactagctaaccctcggggtataaatgtgatgacatcgtatacatgcatggtgaattccaaaacactttgtctctacgtaaatatttcaaataaaatagtgttgagaactctcaatacattttttgggggggttactacctaacaagtaacaaactaacaaccatttccaaattgttacaatgttgtaaacttttaagacccggagaccggagtaatcagatcgatggacgatggttctgttggatttatgtaaaagctggtcgaggattccaccgtcctggtcgagtttacaaaataccactaattatgcatacaatgaaaaaaatacaatcaacttattatgtagcaaaatcgaccaaattatactttcataattagttgaaaactggaaaaaaaaaaaaaaatgcacaaattgaacttaagctccaaaaccaaaaccttaattcgcggaaatcaagaaagcaaaggagaatgggctattaagaaagaagatgcaacccactaactataaagtataaacgtaaacatttggaaaatgagctttttatttaaaacgttatgaaatcattggccaaggagtttcattttttctgtactacattggcaaaacccaataaatgatactgaaattcaaacgtcacaaaattccacaacgattgggtcacaagttacaacccaagtcaatcttcaaccttgggcccaatggggcggcctaaaagtatcgagcgatagagtttcggatattctgacctcaaaccacgtgcgcaaaccacgatctgctcttttgcatacaaaccaaaagaaatttagctgactcttaagtctgactctgacttatttggttgtacttacgacgaatataccaaaatatagtgaaaactaaactaatcaaaccgagtgtaaaagaaaaagagttgaaccaagtattttattcaacaactaaagaacctatgtcgttagaaaaaaacccacaacacttacagtctgatatggtctacttcacgagcactagatgtaaaacagaatttttgtgtgaataaattttacattcgttcaaagtccacaatctcttgatactccaaaaagaaaagaaaaatgggatgaatattctcttgtacataataataattcaaaatttgcggccaccggatttgccaagtgattaaatgatcccttgaatgttctcttgtattttggtctctatttttttgaaattaggttcgtccattgaaatgcgggccctaaaacctgaaaccaatgcaggacttttgtggtagtcatgttatttacctaccttatcttatcactatttattactacgaaaatcgttttttttttttgtaacagaccgtcataggaatagaactataggagtggtagccaataatttctgagtttctgacacagacatatggagtctaatgtagtcgtatctgtattgtcatcattcttcttatatatcagcaaccaataattcctttcttcccaaacgattttacaatacagatcagagtaacacaaaacagtatatacaaatctttgcatcatgggtttgtcataactctaatgctcacattaccataaataatcagatctattcacatgcattttactcttctgaaactctattatttcactcgctgattaaattactaatacatgtgtgagagatttgaaaattcaaacaagcggtttgaagcaaagcatcaaatctgagggattttttggcttttcattttcagcttcttgtgttagtgtctggtcagcttcaattatcacatcactttcttctcaaaaagtgcactcttttcacttttgcttcaagtagataatctgaaaacacaaagcaaacttttagaaccatgtttttataagctaaaggaaacagagattttttttctttactaaaaagatggttttacctggtggttggtttctgtagtgttgtatgcatacagtcttggaactggtctcttcgtgatctcttttgaaaaactgaacctcctctttgaccgttgttcgtatctgttgattctcgcatcccctggtcgtacgcagccatttcattagctgtgtttctgttccgtggtctctcctcggtttttctccagaacttgggacttaagaactctgtaccaggtagtttggaacaactgtctcctgcgcagccactactattcctaggaactctcccgtttgaaaccgccagatcgcacgatatttcatccaacgccatctctagaccgcttacacgagactccagagactgaattccactctgtgaggttcccatgaatttctacatccaaaatgaaaaaaaaaatcagtgaggattgagctatctacaacattcataaccaaacaatttatctacataaagggacactatgcttattaaagaccaagtgtatacctgtagtaagtctaagagactagactgttggttctcaatcagagcaagctgttcccgtatcaaagacagttcctcactatctttcttgctctcttcaacatcatctttacaattctttacagaatcaccatcgtcactacaaggtgcaacccttgagccagacctcaaaccaccaaagctcgatactttactatcttccctgcttttctcagagatagtatgtttgattatatctggtccccctgagttagccttctcttctgtttcttccgaagatttctttaccggtgtaaaatgtggtcccttgttatccacactagaggcttcttctactaacatggtcatattcccttgatttctttttggaagattttctttttgtctagttgctgcatatgatctattcacaggcaaagatggggacctcttcattataggcgttactttctttggcctagcggattttaaaccaacgtcaatggtggaacttctcgtgacagaggaaaagcatccaatgttaccatcatctgagaaatcaaattgaagcaagtccctagtttaatttgcattctcactgtattgagacaactaagtaatgactactagtacatacctgttgaagatcttgatggagataaagaagcttcatcatcagttgaaacttccttccacagattcaatgctctattcatagtttctctaacacttttcacctacattgtgaatccactaagtctcaaaatctgatttaagattgaacacaaaaacaaaactttaagtctctattttttttaccttatcaaatcttctactctcaagagccgtcgtgcaagtcttcttatactgcgacgccaaatcttccgccgtcgcaactttacccaacgcctcagccgcagacttcctcgccgcccaatcctcactgctcaaaaactcaatcaaaaccggaactaaccaatccaaaaccggtttagttcccgcaccaccggcggtaattatactcccgacggcactcaacaacgcagctttagccttaaaaccatcactcttaagcaatttcccaatcttaggcaacgattttctcaattgctccgattccggatccgtcgccgcatcaacagacgccgctaaacacaacgccgctccgatctgcagattcgaatcaccttcctgaatcaaagtctcaatcaacggcttcgcgacggaagcaaaaggctgcctcgtaacatgagccgacatatcagccgtcgcgacggcgcaagcagagcgaacggaggaatccggatctcggagacggcgaataacagttgaaaccatcttagcaaggtgaggtgttagagaatctccgtggtaacgagaaagaaccgataaaagagcaacgcactgtttcctcaccggagatttaacggaagagtcagtgttgtggatacagttaagaaacggagagaaggaatcgtgagtaaggtttctagcgattgagtcaagctcagcggaagcgagagctaaagtgtcacgatcagcgagcttgttgagacaagcgatgactcgttgctttagatcaggtggtgttgacggtgactgtgaagacggagatgtggaagaagacgacggagataatgaaatcggtggactcgccggaaatcgtccgtgaaccgacatttttttttccgatttgagtttttttttgttggtagtgagaaaacgtgttcacattaaatgtgtggaaactgctttgaatatggcggcagagagatttctccgattatgcgtagagacggtttgggctatttgggtttttaaatgcttacaaagaagagggactttgtgtaaataaattaaataatgttactattttcataatcttgcttttgttaatgtcttttagatattgcaataaataaatacactacttgacgaaataaaaaatgtaatgttctaacattatagtaatatatgtgaaaaatactttgatgattgttcgttagtgtctactttgggaaaaaattaaagggaaaataatgttgaaagtattcatatttttggtcttaaagagaacattattgcaatattttcttcaacaataaaagtagataaactctaactagtttgttcaaatattctctttcatttatttactctatttcttttacaatcgaaataattcgaaatctgtatatttcatttaatttacttttttttgcagattttatttaagttgctgaattaaatgtgtgttttttactacattttttgcgttcattattcgtcccattggaaatttaatttggttagatgaaagttattttttaataacccaaatatttttagctatttcgataatgatagcaaaaatctaaattggatttgaagaaatagtcatagtcattggtgagttttcttagtgtaggtcagaaagattcggtccttttttttggatgtcgtgttaaatctcacagaagaaagttataatatatgattttgaaagttcaaataaaatgttgtatcatcatcaccattaccaaatgatacgacaaaaaaaggaaattgaaacaaaataaaaaaactgacaggcaatggaatatatcccaactggcgaaccttagaacagttccaaatttacagttatatatattaataaagtgattaagacaaaagaaatgaaataatatgttgtgtttttggtaatgatgctgttttaataatctctttgacatttgacttgttcagagtatcaatgatgctaatcagatttaatcttgaatatattagtttctggggccaaaatgatttgacttaagtttacatgatgtaagaaatgacaaccaccatatttaatttcgtattaattaaacagtggatggagatagtacatttgttaattgatgaatatatgatccgattacgtgattatatgatttttgtataatcaagttttagagaaagaaaaaaaccatggtaaataaagagtggcacagaagtaaatatgaagagaaagaggtagagagagacattaagggaaataatgtgaaagcacgtgaagaggaaatggagagagcaggcaaattgggcagacgagcacgtgacttgattaattcctctccccctgctaaaaatttaattcgtatctttttttttacctctacatgcatttgacattcgaaaaaagcttcatgttttatataagaactttttttttactaattttgtaattcgtaatgaagaaaataaatataaaaagtattgcaataatgtgttgtttggtgtatgagttgtagaggacataaaacaacaaacaattctcctacaaacattgatcctgtttcattgactaattatttggtaatatatgttacatatttgcatacttaaatcaaaaatatcttttgaacaggatcaattttgttgaagcctttttataggaacaagaaaaaaaaaatcatttgttgataatccaaaactaacatgcatgaggcgaatattatgcaacaagcaaatgatatttcgaacgtaaatagcttaaagcattaacaaggtatggttacttatgctctacgtttatatgaatctcatcccatgtaccgtctgttgttccaaacgaatagtgattcaatctgcaacaaataaatgaagagaaaaacaaactgaaaatattagccctagctaatttggatacatccttttatctctaaacttaaaatccatccaaattaagagaactttcttcattatgggggattaattttaggagtcatgaaaactcgatgaaaaaaaaaagattagactgagattatgtttgaaagcaaaatatcattatcatgaacaatacagttattgtcaagacggcgacgtttgtagcatgttgggaaataccctccatgtgacttttgttcgtcccgaccattctttgatggtttcattctttctggcattttcccgccctcgtcttgttcttttcgtttatagtttaataattgttactcgaatgaccaaaactgaatacaagatcatactcggtggtatcaaaccgggtcttgcgacaagaagtttgctggtgtaatattaattaaacatcaatcaagatcatgtaaatagttcaacaatgaaggcccagctaattaaggtggcatgggtatatattaaacacttttgtttctattacgacatgtaattaacttcaaatcaattgcctccatcaatgctagaatgtcttttttccttcttcttggattcttatgagatgtcgaccgtttctagcttatttacttagaaataaatcaaacattattatacttcttaagaaaattgagctatacttatcacattgcgtatttggtggatgcatcatacatgcataacaaagttctcttggtgtcggttttgaaagaaatgaaggaaaccatggttttgttgtaatcatacattttcaaacacacaaaattaaaataaccataatcctctgtcctcaaacggaatttatcatgtaagatgagatgcaagaactcaaaaatgggcgtataagggcaaaaggggaaacatttggatcaaggaccaaatggtggatgttgatgttagtaatgttgtttgactaagtggcaaagctaaactacaatattaatacaagttgtggaaagataagagaagggctttcacatggacatacctcaaatggtgacaacaaactcccacatttttttagttatttctcatatttttgcatctatgtttttccttgcaagggaacacttgcacatgttcttctcttcttattgtttattaaaaaataaaataaaaagaatttatcttttgttttggatgagatgaggatgcatctaccaatggaattgtgttgtagcctgtgggcaatgttatcagagttaggttcatgtacaaggaatcgtccatgcaggtgtgtcccattatgaccccaagaccaattctatataacttgaactcacccaataaacttcttcagttaataatcgatcttatctaatgtgatatatcatatcaaaatttaccaaatattggacgacactatagaaccgttttagataatgcagaagtgaacgtagagagaacaagtaaattttgatatattagtattttgaagtaataattatgtaaccataatccatttcttaatatatagagaaatacataaaagttgagggtagctaggcgacacgttcaattgctatgttttaatttggtggctaaaccaataataaggagactggtcacataatacatttgtttaaaaatgacatgttcgattgtgtatataatttatattctcaggattattattaccgtcagatcacatgttcaatcattcttttgtgcaacatttcaattatttgtttttccacaacccacacttaaatctagttatgtacttgggtatacatttgctttgtttatatcttttggtgcaacatcgtagctagtgaaacttagaaggcaacgttctatatatttttgttggttataatagatagtattaaattggtaaaaattgtaatgagtgtggttttgcaaattacgaaggactgggtccaagccttgcttggatttttgttactatcatttgcaaacattagcacaagaaccaatcataagcattttccacatggaagctgctcctcaatcatggctggtttttggatctatatgtacatatattcatatcttttcattacattaaaaatcattgatttaacatctgtgaagtttatgaacacatcatattacgtaaacgcacatgcacaactttatttcgttagtgcagtttttgaagtctatttttgtcatggcattttactttatatacccaatataatacttcgtaccaaaaggatgaatggactttagtttcttgataaggatcaggtaaatttacatagacgacattgctatggttaggttgaagattatacattagaaattctggcactcaactaaacgtaggattaattatgtatatttgtttttccaacttttcctttcaatttgtgtattaccttttcgatttattctaaaccatcaataaaacatctatcgtattaatcattgaatcattaattgatcataatcattactaatcataacaatgggttcaaagaaaaggaaaaaaaaaaaagttggtaatgtaaagagagggacaattaggtaggtctttattgaagacaaataaccaagctcaccaactcaagcttcgaaaaaagtaaaaggaagaggaaaagaggattgagtttgaatgttgattccaaatgttataggtcagagatgtctattaaattattggattatgcattatatgaatgacttgctgaagatttttaggtcagtagcttgctcacatgcttgactcattagcactaattctcaaatgttagctaaactggtcacaaaaagaaatttaaagtcacgaggtttgtataataaataaaatttgaagatgggcttgggtacgtacacaaactgtttcactacgatttgcgtggcctcgttgtgggacgaatataaaattgggcggagtccagaaaacgtcaaacggcaccggatcagtcctagtaatgtgcatgtcctagtaagtgattaatacaagtacgtgcacattaattggtttcacgaaatgtgaaatccatatatgattaatgaacaataaaaggcggaaaaaattaatagtgatgccgctgattaacaaaagcatgactaattataacttatcgacctacagatgtaattttagatttatgacatctatctctttgatataaacttaacaaaaaaatctctttgatataaaactacacagattttttttaaaaaattaattgctacaatgtaacaaaagttaaacttttagggtaaatttgatagatacttattgaactttaaatttaaattgcttttagtaaatacacataaaaatctgtaaattaattttctcttggtttaatttaattatttttagtgcgaaacttttatttccaattacaactgatagacaagtctttaatttattaaaaatattattacactttttttttatctcattgctacaaaaagataaattgaaaatggagtgatttgtttcaatgtttatatatataaagacgcccatacctacatacaacattgcaactcaaagccattcgtattggttaagcttgtactagtagttatagcaaattttctggttcgttactttaaactcttttcataattttgtcaatgtaaggttgatcttaattattttgctcaaacaatgtttgtcaacactaaagccaacgtaaagttgattgttatcatgttctcgtgctctgcatggatgcacgcttttttagttcaagtaattgttaatgaagatacttgatgcaaaattatgattttttttcacaaagattttaagttaatttaaaagaaaagtgctatagtatttgataatataaaaaatcaataactaattttgtttaatgcaaaaaataataacaattcacactctttaattgtttgtaaaatgaagcttcgaataacttcaaaccatggcgggagaaggaagtaaaccgaaggcaacagtagatgatgcatatgcatacattaggactgttaagagtacctttcataatgatcctgataaatatgacgactttatggcgatcatgaaaaattttaaagctcgcaagtatgtatatgtattgtttttgcaaaatacaaaaaatatatatatggttttttattcttagtttaattcatattattagggtaacacttaaaaaaaaaaaaactaatcaattttgatatatattttcattgtagaattgatagaaatacttgcatagaagaggtaaaagaactgcttaaaggacatcgagacttgatatcgggtttcaatgcatttttgccaaagtgtttggagatcgctgattggtacaacatagagggtaggtgatttctcattcatcgtactcttcttagtcgaatctgcctgtgattcgttctatttctttatatatttagaaattggatttagccattataggcttatgaataaggttctaaaatctttgttgttcccaactttttatttatttaattataaaagatctatatcctcttaacagttcactcttctaatttaacaaatcttaaactgctcgtttccaacaaaaagaaaattaagaaactaagatagcaactacaacgaagtatgacatattttgttcaaaggagaggagagtgtatagtttctatttgtataggtttcagttcttttcgattcttatgatatgtacatatgctttcatggaatctttccttctatctattagattttctgtttacagatcgaggtactgtattacaagtaaagcttcacttaaaaatgtaacccaaataatttgttgagcctaaccgaacttaaattagataattagttatgttttgggctagagaccttaattagaagttaaaacccatatggtaaacattttctgaaaatcttttactttcggtttggtgtggtcaaaaataataaaactgaaccagctttatggttttcactttttagattacatatatttagtgtatattttagtttagagcatgaatttgttagtctaccagcgtaaaggaagtaattggcaagatgatgtacaaaaagcgataagagactcatatgagtggattcctttgcagcaagacacacaacgacgacgtccaaatgacagaagcaggcaagggtggcaaaaacctattcacggctttatcaaatgcagttatgattgcagtttctcaaggaatgacttagcaccaaaggctggttggattttatgaagtgacacaggcagttatctacttgcggctcaaggtacatgacaactttgcaactcagtgctagaagcggaactacaggctctcttgatggctatgcaacatacatggagtaaaggatatcgaaagatcatatttgaaggtgataacaggactgtggaaagcttactcaatgggaacacaaggaactttgaacttcataacctcatcatagagatacaacattggcggaaaaagttttctaatgccattatcaaatggtctttccggtcaactaacaaagcagctgatcgattagctaaaggggagttagaaaacaatgttacttttgtctctcattcaacgcgttagaaaactatcaaaataatgaatataaataaagaaaaataggtgcatcaatcttctcgagtggattggactaatattgtagttgtaaaatatttttcttcattaaatatttattatctttcatttaatattatttaccgaaaagcttttaaattttagttttccacagatttacaaaaaaggaaaaaaaatctaatacccataatttacttacgtgatcttcgatagatgaaaatctaaacaaagtatagatatggaatgatacaaatatcaactactatacgaacacatccttcgtcacgcgttctagtttatctcctgcttcgtgctcgtgacgtgttagggagacgattgttcttaaaaagccttcttcttctccgaaatttggtaactatacgcatacgatcttcattttttcttttgtttgagaatgagattaagccctctaattaatctagtgtttccatatattggaagagccaattaatatggcttaattacggacttttcaaggatccaaaatataggagaaaatctaaattgtaatatctttttagatgctttaaaacttgaggaatgagatttgtatttatgcactctaggttctgctttttaaaaagatttctaaagtctttttaaaaacaaaagtagtaatagtttttagatatagtagagagattcaatgactcatctgaaatgttttaatcaagaaaatttctctttctttagatagcaaaggggtttggtgggtaaaaaaaaaaaaaaaaagcaaaggggtttggtcaatttaaaaccatggttgaaagaagagttcaagtggagccaactcttagtgatgcgcattcatatatcactgctgtgaaggaagcatttcatgatgaacctacaaaatatgaagagtttattaaactcatgaatgatattcgtgatcatgggtagaattgtcttctctcccttccctgttatatatgtttgtttgctcttaatttcaactatgacaacaaaaaaacacattgtgaattgttttttgatgttattattctctttgtagtgtcgataaggctagtggcattgcaaagttgactgaactcattaaaggacacccgaggctgcttcgtggtttaagtttcttctttccacaggttaacagagacatccatcatgaggctaagagaaccatcattctcaaggataaggcaaccatccctcccgaggctgcttatcggggtgctaagtctacttataccaaaataaaacaaattgagcctgactgggagaattttatgaacatgcttaaggtataaaatgctaaaatggttcataatttttttactaatgtatgattttagtaatttatatcttcgtatctgcagacaaggtttcggagccttgatactcatgtagttgagtcatttctcaagataatgataatgtatgatgaaggaaaaaaatcggaaaaggaggtgcaagaggaggtaggttctctgtgggctattttgcgttgtcctttcacttttttttttttttttttttggtttgatatggttataatatatcttgcaggtcgttgatcttctctattatcatgaagatttgatcgacaagtttttcagattgtttaacatgagaaaataatcttctagcaccaagatctctaactcttggtgtggaaaatgtatatgaagtttctttaaatagacttttgagttcagttcgaatcttttgacatacacatatgttttattttatatgtttcatttttaccaagaagatcgtcgtgtcaattagattcagtaattaataatcaaagtattacaaatttacaactgaactcgaaatcctaaaacctaaacagtaatcctaaatgatgtgtcaatttgtctttctttcatcacgtaagcaatgaacgtagaaccaagctgtaaccatgtcatttaccaaaacattggtatttttctcttttaactttgacattttgttcagagtaaaaaaaatgggaccaaattataggacatatagttatatttgattcaatttaaaatctgatgtaggcttattggaaaagaatatcaataaactaaaattatttgaaacaaatcttcaaaataataaatataaaaaaatttcgattataattctactttttatttgatgttttaggagtaaaatctaaatctcgacaaatcctaaaaaccaaatcttcacaatatttacatcttaataactacaactttaacagttaaacaaatgatagtgtattttctttatattgaataatgttataaagcaaatttacgagtatttgttgacaaaaaataaagaaagtaaaatttactagatttatatctctgttattttaagatctatgacattaatacttttgactcgttgtctattttttataccaactatataagttaaagtgttttctaaaaaagatattgcaattatatatgccacattgtaacaaaagtgatttaaactctcggaaaagttaaaagtaataaataagctttcacagatgcttgtaaagctttacaatttaaattatttattactaaatttacataaatatatgtataattaaaatttacataaaaatctgtaaattgtaattaatgtgaaatttttatttacaactaacatgtgtttattatatttagtattatgatacaattgcaaaaggtctatttttttttatatatatataaagacctatacagctcaaattaaaatcattcaagttctagtggtgaaccttatacccatagtaaattttctggtttgttactttgaactcatttcacaattcttatttgatcgttttttcttatcaatctaaattttagtagtatcatgttctcatgttttgcaatctgcatagtgcatagttcattgcatgtacttttcaattctagtaattgtgagttacgatcccctaatgcaaaattctgtttccccccaccccccaaaaaaaagtttaagttacttttaaagaaaagaggtcatgtatttgagatgatataaattacatctaaataattaattgctttaattgaaaacaataactaaaaaatctttctctttgtttggaaaataaagcttcaatttgaccaactttaaaccatggtgggaggaggaagtaaacatgttggagaaggaagtaaaccgagggcaactaaagatgacgcgtatgcatatcttagggctgtgagggctaaatttcataatgatagtaaaaaatatgacgattttgttgcggtcatgacaaattttaaagctcgaaggtatgtgtgaatatagtttatacaaaatatgagaaaaaaaatttggttttatttttagttcaatctttattaggttaactctctcttttttttcttttaaaaaaaggtaattaatgatttataatctcattgtagaattgatagggatggttgcataaaagaggtggaacaactgcttaaaggacatagagatttgatttcgggtttcaatgcattcttaccaaagtgtttggagataaaaaattattactttggggcaggagagggtaggtgaatgtcttgggatttattcgttcgtctaaaccaagttcggtttagatatgtactaaagaaattatttgtgatccgttattttttcagccagccattgtgtcttataaataaggttgtatgatctttgtgattttcaactttttaaatatcaatctccattcaacccgaaattattaaaaataaaataaaatttccattcaactctttactcttataattcaacataatattagaatttcagatactatgagagaattcaacgaatttatcgtatactaggtcttattgtattatcaattttaaattacttaaagttagttttcagtaataagtaaattaaatgataaaattctaattgataaaatgcttttaataaaatgaatgataaatttatccaaaaaaaaaagagaaggaaatgctaagtgatcagatatgatattccttaatcgttactataaatacactcagtgaatagaatttcgaaacattctcagtgcgtttgtttcttgagatcttgaagtcgtttacactgcgaagaggaaacttcttgctcgttcggtaactaaacgatcatcatcatcttcttcttcttcgtccgtttattttctctttcgttcatgtgaaatcatctgacgattaggttaacgatcgagtttctcaattttgaatgtgattatttcttgtttcttgatcagcacgtcttgttgttttctttctatcgagattgattcaagatgttcttaaagatcttgttcgatgaaatctacatgagtttgtcttctattagatgaacattacatgaatcatccatatctgcaaagattttgagtttcttatacctagacgaactaagttctccatcttgttgttgtggttctgtttttttgaaggattctaaagttaatttcacaccgtggttggaagaagctt

SEQ ID NO: 61 - DNA, 99689 bp, Arabidopsis thaliana
gaattccactctgtgaggttcccatgaatttctacatccaaaatgaaaaaaaaaatcagtgaggattgagctatctacaacattcataaccaaacaatttatctacataaagggacactatgcttattaaagaccaagtgtatacctgtagtaagtctaagagactagactgttggttctcaatcagagcaagctgttcccgtatcaaagacagttcctcactatctttcttgctctcttcaacatcatctttacaattctttacagaatcaccatcgtcactacaaggtgcaacccttgagccagacctcaaaccaccaaagctcgatactttactatcttccctgcttttctcagagatagtatgtttgattatatctggtccccctgagttagccttctcttctgtttcttccgaagatttctttaccggtgtaaaatgtggtcccttgttatccacactagaggcttcttctactaacatggtcatattcccttgatttctttttggaagattttctttttgtctagttgctgcatatgatctattcacaggcaaagatggggacctcttcattataggcgttactttctttggcctagcggattttaaaccaacgtcaatggtggaacttctcgtgacagaggaaaagcatccaatgttaccatcatctgagaaatcaaattgaagcaagtccctagtttaatttgcattctcactgtattgagacaactaagtaatgactactagtacatacctgttgaagatcttgatggagataaagaagcttcatcatcagttgaaacttccttccacagattcaatgctctattcatagtttctctaacacttttcacctacattgtgaatccactaagtctcaaaatctgatttaagattgaacacaaaaacaaaactttaagtctctattttttttaccttatcaaatcttctactctcaagagccgtcgtgcaagtcttcttatactgcgacgccaaatcttccgccgtcgcaactttacccaacgcctcagccgcagacttcctcgccgcccaatcctcactgctcaaaaactcaatcaaaaccggaactaaccaatccaaaaccggtttagttcccgcaccaccggcggtaattatactcccgacggcactcaacaacgcagctttagccttaaaaccatcactcttaagcaatttcccaatcttaggcaacgattttctcaattgctccgattccggatccgtcgccgcatcaacagacgccgctaaacacaacgccgctccgatctgcagattcgaatcaccttcctgaatcaaagtctcaatcaacggcttcgcgacggaagcaaaaggctgcctcgtaacatgagccgacatatcagccgtcgcgacggcgcaagcagagcgaacggaggaatccggatctcggagacggcgaataacagttgaaaccatcttagcaaggtgaggtgttagagaatctccgtggtaacgagaaagaaccgataaaagagcaacgcactgtttcctcaccggagatttaacggaagagtcagtgttgtggatacagttaagaaacggagagaaggaatcgtgagtaaggtttctagcgattgagtcaagctcagcggaagcgagagctaaagtgtcacgatcagcgagcttgttgagacaagcgatgactcgttgctttagatcaggtggtgttgacggtgactgtgaagacggagatgtggaagaagacgacggagataatgaaatcggtggactcgccggaaatcgtccgtgaaccgacatttttttttccgatttgagtttttttttgttggtagtgagaaaacgtgttcacattaaatgtgtggaaactgctttgaatatggcggcagagagatttctccgattatgcgtagagacggtttgggctatttgggtttttaaatgcttacaaagaagagggactttgtgtaaataaattaaataatgttactattttcataatcttgcttttgttaatgtcttttagatattgcaataaataaatacactacttgacgaaataaaaaatgtaatgttctaacattatagtaatatatgtgaaaaatactttgatgattgttcgttagtgtctactttgggaaaaaattaaagggaaaataatgttgaaagtattcatatttttggtcttaaagagaacattattgcaatattttcttcaacaataaaagtagataaactctaactagtttgttcaaatattctctttcatttatttactctatttcttttacaatcgaaataattcgaaatctgtatatttcatttaatttacttttttttgcagattttatttaagttgctgaattaaatgtgtgttttttactacattttttgcgttcattattcgtcccattggaaatttaatttggttagatgaaagttattttttaataacccaaatatttttagctatttcgataatgatagcaaaaatctaaattggatttgaagaaatagtcatagtcattggtgagttttcttagtgtaggtcagaaagattcggtccttttttttggatgtcgtgttaaatctcacagaagaaagttataatatatgattttgaaagttcaaataaaatgttgtatcatcatcaccattaccaaatgatacgacaaaaaaaggaaattgaaacaaaataaaaaaactgacaggcaatggaatatatcccaactggcgaaccttagaacagttccaaatttacagttatatatattaataaagtgattaagacaaaagaaatgaaataatatgttgtgtttttggtaatgatgctgttttaataatctctttgacatttgacttgttcagagtatcaatgatgctaatcagatttaatcttgaatatattagtttctggggccaaaatgatttgacttaagtttacatgatgtaagaaatgacaaccaccatatttaatttcgtattaattaaacagtggatggagatagtacatttgttaattgatgaatatatgatccgattacgtgattatatgatttttgtataatcaagttttagagaaagaaaaaaaccatggtaaataaagagtggcacagaagtaaatatgaagagaaagaggtagagagagacattaagggaaataatgtgaaagcacgtgaagaggaaatggagagagcaggcaaattgggcagacgagcacgtgacttgattaattcctctccccctgctaaaaatttaattcgtatctttttttttacctctacatgcatttgacattcgaaaaaagcttcatgttttatataagaactttttttttactaattttgtaattcgtaatgaagaaaataaatataaaaagtattgcaataatgtgttgtttggtgtatgagttgtagaggacataaaacaacaaacaattctcctacaaacattgatcctgtttcattgactaattatttggtaatatatgttacatatttgcatacttaaatcaaaaatatcttttgaacaggatcaattttgttgaagcctttttataggaacaagaaaaaaaaaatcatttgttgataatccaaaactaacatgcatgaggcgaatattatgcaacaagcaaatgatatttcgaacgtaaatagcttaaagcattaacaaggtatggttacttatgctctacgtttatatgaatctcatcccatgtaccgtctgttgttccaaacgaatagtgattcaatctgcaacaaataaatgaagagaaaaacaaactgaaaatattagccctagctaatttggatacatccttttatctctaaacttaaaatccatccaaattaagagaactttcttcattatgggggattaattttaggagtcatgaaaactcgatgaaaaaaaaaagattagactgagattatgtttgaaagcaaaatatcattatcatgaacaatacagttattgtcaagacggcgacgtttgtagcatgttgggaaataccctccatgtgacttttgttcgtcccgaccattctttgatggtttcattctttctggcattttcccgccctcgtcttgttcttttcgtttatagtttaataattgttactcgaatgaccaaaactgaatacaagatcatactcggtggtatcaaaccgggtcttgcgacaagaagtttgctggtgtaatattaattaaacatcaatcaagatcatgtaaatagttcaacaatgaaggcccagctaattaaggtggcatgggtatatattaaacacttttgtttctattacgacatgtaattaacttcaaatcaattgcctccatcaatgctagaatgtcttttttccttcttcttggattcttatgagatgtcgaccgtttctagcttatttacttagaaataaatcaaacattattatacttcttaagaaaattgagctatacttatcacattgcgtatttggtggatgcatcatacatgcataacaaagttctcttggtgtcggttttgaaagaaatgaaggaaaccatggttttgttgtaatcatacattttcaaacacacaaaattaaaataaccataatcctctgtcctcaaacggaatttatcatgtaagatgagatgcaagaactcaaaaatgggcgtataagggcaaaaggggaaacatttggatcaaggaccaaatggtggatgttgatgttagtaatgttgtttgactaagtggcaaagctaaactacaaatattaatacaagttgtggaaagataagagaagggctttcacatggacatacctcaaatggtgacaacaaactcccacatttttttagttatttctcatatttttgcatctatgtttttccttgcaagggaacacttgcacatgttcttctcttcttattgtttattaaaaaataaaataaaaagaatttatcttttgttttggatgagatgaggatgcatctaccaatggaattgtgttgtagcctgtgggcaatgttatcagagttaggttcatgtacaaggaatcgtccatgcaggtgtgtcccattatgaccccaagaccaattctatataacttgaactcacccaataaacttcttcagttaataatcgatcttatctaatgtgatatatcatatcaaaatttaccaaatattggacgacactatagaaccgttttagataatgcagaagtgaacgtagagagaacaagtaaattttgatatattagtattttgaagtaataattatgtaaccataatccatttcttaatatatagagaaatacataaaagttgagggtagctaggcgacacgttcaattgctatgttttaatttggtggctaaaccaataataaggagactggtcacataatacatttgtttaaaaatgacatgttcgattgtgtatataatttatattctcaggattattattaccgtcagatcacatgttcaatcattcttttgtgcaacatttcaattatttgtttttccacaacccacacttaaatctagttatgtacttgggtatacatttgctttgtttatatcttttggtgcaacatcgtagctagtgaaacttagaaggcaacgttctatatatttttgttggttataatagatagtattaaattggtaaaaattgtaatgagtgtggttttgcaaattacgaaggactgggtccaagccttgcttggatttttgttactatcatttgcaaacattagcacaagaaccaatcataagcattttccacatggaagctgctcctcaatcatggctggtttttggatctatatgtacatatattcatatcttttcattacattaaaaatcattgatttaacatctgtgaagtttatgaacacatcatattacgtaaacgcacatgcacaactttatttcgttagtgcagtttttgaagtctatttttgtcatggcattttactttatatacccaatataatacttcgtaccaaaaggatgaatggactttagtttcttgataaggatcaggtaaatttacatagacgacattgctatggttaggttgaagattatacattagaaattctggcactcaactaaacgtaggattaattatgtatatttgtttttccaacttttcctttcaatttgtgtattaccttttcgatttattctaaaccatcaataaaacatctatcgtattaatcattgaatcattaattgatcataatcattactaatcataacaatgggttcaaagaaaaggaaaaaaaaaaaagttggtaatgtaaagagagggacaattaggtaggtctttattgaagacaaataaccaagctcaccaactcaagcttcgaaaaaagtaaaaggaagaggaaaagaggattgagtttgaatgttgattccaaatgttataggtcagagatgtctattaaattattggattatgcattatatgaatgacttgctgaagatttttaggtcagtagcttgctcacatgcttgactcattagcactaattctcaaatgttagctaaactggtcacaaaaagaaatttaaagtcacgaggtttgtataataaataaaatttgaagatgggcttgggtacgtacacaaactgtttcactacgatttgcgtggcctcgttgtgggacgaatataaaattgggcggagtccagaaaacgtcaaacggcaccggatcagtcctagtaatgtgcatgtcctagtaagtgattaatacaagtacgtgcacattaattggtttcacgaaatgtgaaatccatatatgattaatgaacaataaaaggcggaaaaaattaatagtgatgccgctgattaacaaaagcatgactaattataacttatcgacctacagatgtaattttagatttatgacatctatctctttgatataaacttaacaaaaaaatctctttgatataaaactacacagattttttttaaaaaattaattgctacaatgtaacaaaagttaaacttttagggtaaatttgatagatacttattgaactttaaatttaaattgcttttagtaaatacacataaaaatctgtaaattaattttctcttggtttaatttaattatttttagtgcgaaacttttatttccaattacaactgatagacaagtctttaatttattaaaaatattattacactttttttttatctcattgctacaaaaagataaattgaaaatggagtgatttgtttcaatgtttatatatataaagacgcccatacctacatacaacattgcaactcaaagccattcgtattggttaagcttgtactagtagttatagcaaattttctggttcgttactttaaactcttttcataattttgtcaatgtaaggttgatcttaattattttgctcaaacaatgtttgtcaacactaaagccaacgtaaagttgattgttatcatgttctcgtgctctgcatggatgcacgcttttttagttcaagtaattgttaatgaagatacttgatgcaaaattatgattttttttcacaaagattttaagttaatttaaaagaaaagtgctatagtatttgataatataaaaaatcaataactaattttgtttaatgcaaaaaataataacaattcacactctttaattgtttgtaaaatgaagcttcgaataacttcaaaccatggcgggagaaggaagtaaaccgaaggcaacagtagatgatgcatatgcatacattaggactgttaagagtacctttcataatgatcctgataaatatgacgactttatggcgatcatgaaaaattttaaagctcgcaagtatgtatatgtattgtttttgcaaaatacaaaaaatatatatatggttttttattcttagtttaattcatattattagggtaacacttaaaaaaaaaaaaactaatcaattttgatatatattttcattgtagaattgatagaaatacttgcatagaagaggtaaaagaactgcttaaaggacatcgagacttgatatcgggtttcaatgcatttttgccaaagtgtttggagatcgctgattggtacaacatagagggtaggtgatttctcattcatcgtactcttcttagtcgaatctgcctgtgattcgttctatttctttatatatttagaaattggatttagccattataggcttatgaataaggttctaaaatctttgttgttcccaactttttatttatttaattataaaagatctatatcctcttaacagttcactcttctaatttaacaaatcttaaactgctcgtttccaacaaaaagaaaattaagaaactaagatagcaactacaacgaagtatgacatattttgttcaaaggagaggagagtgtatagtttctatttgtataggtttcagttcttttcgattcttatgatatgtacatatgctttcatggaatctttccttctatctattagattttctgtttacagatcgaggtactgtattacaagtaaagcttcacttaaaaatgtaacccaaataatttgttgagcctaaccgaacttaaattagataattagttatgttttgggctagagaccttaattagaagttaaaacccatatggtaaacattttctgaaaatcttttactttcggtttggtgtggtcaaaaataataaaactgaaccagctttatggttttcactttttagattacatatatttagtgtatattttagtttagagcatgaatttgttagtctaccagcgtaaaggaagtaattggcaagatgatgtacaaaaagcgataagagactcatatgagtggattcctttgcagcaagacacacaacgacgacgtccaaatgacagaagcaggcaagggtggcaaaaacctattcacggctttatcaaatgcagttatgattgcagtttctcaaggaatgacttagcaccaaaggctggttggattttatgaagtgacacaggcagttatctacttgcggctcaaggtacatgacaactttgcaactcagtgctagaagcggaactacaggctctcttgatggctatgcaacatacatggagtaaaggatatcgaaagatcatatttgaaggtgataacaggactgtggaaagcttactcaatgggaacacaaggaactttgaacttcataacctcatcatagagatacaacattggcggaaaaagttttctaatgccattatcaaatggtctttccggtcaactaacaaagcagctgatcgattagctaaaggggagttagaaaacaatgttacttttgtctctcattcaacgcgttagaaaactatcaaaataatgaatataaataaagaaaaataggtgcatcaatcttctcgagtggattggactaatattgtagttgtaaaatatttttcttcattaaatatttattatctttcatttaatattatttaccgaaaagcttttaaattttagttttccacagatttacaaaaaaggaaaaaaaatctaatacccataatttacttacgtgatcttcgatagatgaaaatctaaacaaagtatagatatggaatgatacaaatatcaactactatacgaacacatccttcgtcacgcgttctagtttatctcctgcttcgtgctcgtgacgtgttagggagacgattgttcttaaaaagccttcttcttctccgaaatttggtaactatacgcatacgatcttcattttttcttttgtttgagaatgagattaagccctctaattaatctagtgtttccatatattggaagagccaattaatatggcttaattacggacttttcaaggatccaaaatataggagaaaatctaaattgtaatatctttttagatgctttaaaacttgaggaatgagatttgtatttatgcactctaggttctgctttttaaaaagatttctaaagtctttttaaaaacaaaagtagtaatagtttttagatatagtagagagattcaatgactcatctgaaatgttttaatcaagaaaatttctctttctttagatagcaaaggggtttggtgggtaaaaaaaaaaaaaaaaagcaaaggggtttggtcaatttaaaaccatggttgaaagaagagttcaagtggagccaactcttagtgatgcgcattcatatatcactgctgtgaaggaagcatttcatgatgaacctacaaaatatgaagagtttattaaactcatgaatgatattcgtgatcatgggtagaattgtcttctctcccttccctgttatatatgtttgtttgctcttaatttcaactatgacaacaaaaaaacacattgtgaattgttttttgatgttattattctctttgtagtgtcgataaggctagtggcattgcaaagttgactgaactcattaaaggacacccgaggctgcttcgtggtttaagtttcttctttccacaggttaacagagacatccatcatgaggctaagagaaccatcattctcaaggataaggcaaccatccctcccgaggctgcttatcggggtgctaagtctacttataccaaaataaaacaaattgagcctgactgggagaattttatgaacatgcttaaggtataaaatgctaaaatggttcataatttttttactaatgtatgattttagtaatttatatcttcgtatctgcagacaaggtttcggagccttgatactcatgtagttgagtcatttctcaagataatgataatgtatgatgaaggaaaaaaatcggaaaaggaggtgcaagaggaggtaggttctctgtgggctattttgcgttgtcctttcacttttttttttttttttttttggtttgatatggttataatatatcttgcaggtcgttgatcttctctattatcatgaagatttgatcgacaagtttttcagattgtttaacatgagaaaataatcttctagcaccaagatctctaactcttggtgtggaaaatgtatatgaagtttctttaaatagacttttgagttcagttcgaatcttttgacatacacatatgttttattttatatgtttcatttttaccaagaagatcgtcgtgtcaattagattcagtaattaataatcaaagtattacaaatttacaactgaactcgaaatcctaaaacctaaacagtaatcctaaatgatgtgtcaatttgtctttctttcatcacgtaagcaatgaacgtagaaccaagctgtaaccatgtcatttaccaaaacattggtatttttctcttttaactttgacattttgttcagagtaaaaaaaatgggaccaaattataggacatatagttatatttgattcaatttaaaatctgatgtaggcttattggaaaagaatatcaataaactaaaattatttgaaacaaatcttcaaaataataaatataaaaaaatttcgattataattctactttttatttgatgttttaggagtaaaatctaaatctcgacaaatcctaaaaaccaaatcttcacaatatttacatcttaataactacaactttaacagttaaacaaatgatagtgtattttctttatattgaataatgttataaagcaaatttacgagtatttgttgacaaaaaataaagaaagtaaaatttactagatttatatctctgttattttaagatctatgacattaatacttttgactcgttgtctattttttataccaactatataagttaaagtgttttctaaaaaagatattgcaattatatatgccacattgtaacaaaagtgatttaaactctcggaaaagttaaaagtaataaataagctttcacagatgcttgtaaagctttacaatttaaattatttattactaaatttacataaatatatgtataattaaaatttacataaaaatctgtaaattgtaattaatgtgaaatttttatttacaactaacatgtgtttattatatttagtattatgatacaattgcaaaaggtctatttttttttatatatatataaagacctatacagctcaaattaaaatcattcaagttctagtggtgaaccttatacccatagtaaattttctggtttgttactttgaactcatttcacaattcttatttgatcgttttttcttatcaatctaaattttagtagtatcatgttctcatgttttgcaatctgcatagtgcatagttcattgcatgtacttttcaattctagtaattgtgagttacgatcccctaatgcaaaattctgtttccccccaccccccaaaaaaaagtttaagttacttttaaagaaaagaggtcatgtatttgagatgatataaattacatctaaataattaattgctttaattgaaaacaataactaaaaaatctttctctttgtttggaaaataaagcttcaatttgaccaactttaaaccatggtgggaggaggaagtaaacatgttggagaaggaagtaaaccgagggcaactaaagatgacgcgtatgcatatcttagggctgtgagggctaaatttcataatgatagtaaaaaatatgacgattttgttgcggtcatgacaaattttaaagctcgaaggtatgtgtgaatatagtttatacaaaatatgagaaaaaaaatttggttttatttttagttcaatctttattaggttaactctctcttttttttcttttaaaaaaaggtaattaatgatttataatctcattgtagaattgatagggatggttgcataaaagaggtggaacaactgcttaaaggacatagagatttgatttcgggtttcaatgcattcttaccaaagtgtttggagataaaaaattattactttggggcaggagagggtaggtgaatgtcttgggatttattcgttcgtctaaaccaagttcggtttagatatgtactaaagaaattatttgtgatccgttattttttcagccagccattgtgtcttataaataaggttgtatgatctttgtgattttcaactttttaaatatcaatctccattcaacccgaaattattaaaaataaaataaaatttccattcaactctttactcttataattcaacataatattagaatttcagatactatgagagaattcaacgaatttatcgtatactaggtcttattgtattatcaattttaaattacttaaagttagttttcagtaataagtaaattaaatgataaaattctaattgataaaatgcttttaataaaatgaatgataaatttatccaaaaaaaaaagagaaggaaatgctaagtgatcagatatgatattccttaatcgttactataaatacactcagtgaatagaatttcgaaacattctcagtgcgtttgtttcttgagatcttgaagtcgtttacactgcgaagaggaaacttcttgctcgttcggtaactaaacgatcatcatcatcttcttcttcttcgtccgtttattttctctttcgttcatgtgaaatcatctgacgattaggttaacgatcgagtttctcaattttgaatgtgattatttcttgtttcttgatcagcacgtcttgttgttttctttctatcgagattgattcaagatgttcttaaagatcttgttcgatgaaatctacatgagtttgtcttctattagatgaacattacatgaatcatccatatctgcaaagattttgagtttcttatacctagacgaactaagttctccatcttgttgttgtggttctgtttttttgaaggattctaaagttaatttcacaccgtggttggaagaagcttatcaccggaggtaactatgaataaagcttttgcatacatcattgctgtgagggacagatttcgtgatgaacctgcaaaatatcgacagtttctaagcctcttgcgtgatcgtcgagctcgtaggtatgtttaaaagtatatagagcacgcacatgtgactatgtgagaattgattctgatgttattattttctttgtagaatcgataaagctactttctttgtagggctggtggagctcattaaagatcacttggatctgcttcttggttttaatgccttacttccagctaggtttcagatacccatcacaccagctggatttcaaaacgtggttggaagaagcgtaccaccggagacaactatcgaggatgcgacttcatacctcaactctgtgaagagagcatttcatgatgaacctgcaaaatatgaggaacttcttaagctcttgaatgatattgaagctcgtaggtatgagttgttttcttcatgttatgttcgatttactcagtctaaccaacaaacacgcatgtgaattgattctaatgttactaagtctctttgtagagtcgatgctgctagtttcattgcaagtgtggaagaactcatgaaagatcaccagactctgcttaatggtttcagtgtcttcctttcagctgaaatgaagtttatcaggaagcttaaggtatagactgctaaatttggtatactaagcctgaagaaaaccattttgatgtttccaatttgttaacttgcggcttaagtaacaaaatggtttcgtgtgcaggcaaagtttcagggcgatggtagtcatgtagctgactctgttcttcagatattgagaatgtacagtgagggaaacaagtccaaaagtgaggcgttccaggaggtatggttcttggttgagtcactttgtgttttgctttcttagttctctggtttgatttgctttgttatcgtttgcaggtcgttccacttgttcaggatcatgaagatttagtcatggagcttataaaaattattttcagtgatccatagagtctagagataggcaaggacggtaccggaagactgtttataccttcagagacaaaaatatgagtagagcttctaatgagaagagagtgtttttagttttctttgtaaacatttgagtttagctttgattaacatgacattcacaaatatgctatgcttctatgctcaatgaattggtgtataagatactaaaagatagtgtatagtttcttttgtagagctttctttaatatcaaaatgtttttttcacttaatattttctggttatctttggggtcatcttttaatagaaactgagaggagaaacactcaaaatcagagttcaacgttgaaacaataacagagaggaacagagcaaaccaaacaagaattacttgagtaaatacagagcaaaccaaagaaattttagtaaatctaatgacaacaaatatgttttctaaattattgtataaattacgaattgataaaatattttattatcatattgaagaaagcttttaaaatttcagattcacaaattttacaaattacagttttacaacaacaaaaagaaatgaagtcaatatgataatcccctactataaatatagactcgtgaataaaactcaaatcagtctctgaggttttggtgagagaaaaaaagaactcaaaacagagtgcgtttgtttctgggaatcttgaagcctctcccacttgcgaagacgaagcttgctcgttaggtagttttcttcttcttcttcttcgtttcaattcctttttcgttcatgtgaaatgtgaaatcatgtgacgtgacgattaggttaacgatcgaatgtcttgatctcgtatatgattcttttctagtttcttgatcggcacgtcttgttgttttctttctatcgagactgattctagatgttcttaaggatcttgttggatgaaatttacatgaatctgtattctagaagatgaactttgcatgaatcacgacgaactgatttagttgttgctgtagattaagtttctcgagatagattcgagatacacgaagggtttcaatgaataatctgatctgtttcgatgaacaataatctttatctttgacttatggattaggctaatttgacaccatggttggaaaaagcaaatcaccagagttcaatttcgaagatgggatggcatacttcgatgctgtgaaggtcgcattgcaggatactgaacctgaaaaatatcaagagtttgtaagaatctttattgattatactgctaataggtatgttttggtttgctcttcaacagtttagagaacaaagacacatgtgagaattgattctgatgttatttttctctttatagattcggtttcgaaactttgagtgcaagcttgcaggaactcctgagagatcacgcgaatctgtgtcatggttcaaatgtcttacttccttttaggttgcagacagccatccctcccgaggctagcgcagagtttcacatcaataaggtggttggaagaagcgtaccaccggcggtggcggtgcctaccatggatgatgcgacttcttacctcaatgctgtgaaggaagcatttcatgatgaacctgcaaaatatatggaaattactaagctcttgactgatcttaaagctcgtaggtatgaattgttttctccatgttatgtttgattttctcaatttacacaacaaacacacatgtgaattgattctgatattactaagtctctttgtagaatcaatgccgctagtgtcattgcaaggatggaggaactcttgaaagatcacttgaatctgcttcttggtttctgtgtcttcctttcacctacaaggaggtttatcacgaagcttaaggtaatagagtgcttaaatgcttatagttactggatgtttcttatatgttaacttgtgatttaagtaacaaaattgtggatgtgcaggcaaggtttctgggcgatggtagtcaagtagttgactcagttctccagatattgagaatgcacagtgagggaaacaagtccaaagatgaggcgtctcaggaggtatggttctttgtgggacactttgtgttgtgtgttgcactttcttagttctttggtttgatttgcttgttaccttttgcaggtccgtgcacttattcagggtcatgaagatttactcatggagctttcagaaattttcagtgatccatagagtctagagatagctaaggacagtactggaagactatataccttaagagacgaaaacatttgagtttaggtttgattaacatgacattcacaaatatgctatgcttctatgttcaatgaattgctgtgtaagagactaaaagaaagtgtatttgtagagctttctttgatatcaaatgtttttttcacttaatattttctggttatctttggggtcatcttttaatagaaactgagaggagaaacactcaaaaacagagttcaacgtagaaacaaaaacagagaggaacagagccaaaaactacagagcaaaccaaataagaatcaagtaattctaataacaaatatattttctaatttaagtaaaccttatatgaattacgaaattgatatactccctagtataaatatagactcgtgaacaaaaactctatgcagtcttgaggtttttactttgcttctagaaatcttgaactccttactctgcgaagacgaagacgaagcttcttcttgttcatcattgctgctttgctctgcttatatcggtagccatacttggttcctctttcgatttatcatttgtttcgttcagttgatatgtcaattcaccagacgattagggttacgatcgagttttctggttctctgctttcaaatcgttcctcaatctagggttcttgaggaagtagatcgatatttattgcacttggctctgtttcttgaaaaactttaaagaaatagctttgagatagtagatggattcaaatgatgtgatctgacctgtttggattataacaatggttttaggtcacaccatggatggaagaagcgtaccattagagttaactaaggatgatgaatactcataactcggttctatggaggaagtatatcatgatgaacctgaaaaatttaatcatattctccacctcatacgtgattattttaatcataggtatgtcttgatttcccccggttatgtctggtttgttcttaaacaaatacagatgtgaaattgattctcatgtttcttattctcttgtgtagagacgatagagctagaatcactgcatgtatgggggaactcatgagagatcacttgaacctgcttgttcgtttctttgacttctttccagctgaggctagcgaagggttagcccaacttcaaaccattgctgcaacaagcgtatcaccggattctactattgatgatgcggtttcatacatcaacactgtcaaggaagcatttcatgatgaacctgcaaagtattacgagtttttccagctcttttatgatatcaggtataggtatgtattgttgtgtccctcttcaattctgtttgcccttaatttcaagtctcaatctatacaacattgtgaagtgattctgtttgttatatactattctctttgtagattaattgatgttgctggtggcattacaagggtggaggaactcttgaaagctcacaagaatctgcttgtccgtttgaatgccttccttccacctgaggctcagagaatcctccatctcaagattgagcaacgggctgcatctgatattaacaaaagaaaacgtgtagcgagttttatcggcaagcttaaggtatagagtgctaaaatactaaaactaatccttaccatttaccattttgatgttccatctatgctaacagatccgtcgatgtacaggaaaggttccagggggatgatcgtcatgtatatgagtcgtttctcgagatattgacaatgtaccaagaaggaaacaagtccgtgaatgacttgtaccaggaggtagggttcttggttgggacactttggttggattacactttctcttagttctttggtttgatttgctttgttgtctttgcgggtcgttgcacttcttgagggtcatgaagatttagtcatggggtttgcagacgttttcaagagacccactgatccatcagggtcaaaatctgctagagatagctaagtacattagaagactgtctctgctttagtataggatgctttgaatataatgcatgtttggggtataagagacaaaaagagtagttctttctaatgagaagtgagtgtatagttttcatatgagattagtttgattcttactccatagagaacatgatgtcatgatatgcaaatatgcttttatatttgaggtgtagattgattggatataagcgactaaaagagagtgtatagtttcttctgacatgtacatgtatgatattttcctcgttaccaagaagacatgagattttggggtcatcttagttcaacgtagaaacaaaaacatagagaaacagagccttagcacaaacctataaatgaccaaaaagtacaaagcaaaccaaacaaaaatatagtagtaccaattaccaaatatgtttatcaatatagtaaatcgggtaattcaagtgaattgctggtctcacacatggcacgaggcttcttgcttgcaagtgaagctacagtcaaattctgctagcgtacttgatcaaaagatatatgtagcaggatgctgtaaggatggcgattcgaattcctattaaaacttgatggaggtgttcgacacaaaaacacagacttgcgatcctaagccaatcccttgcagcgagacatttggcggctttgactacaaaactctatgtcttgacggaaagttccacgtaggaccagtacctgttgataaaacaaggattagattggctgattatggtggaaagagggcagttttgtggcctaataatattcactcgcttaggaagatgatttggtgtgcagaggttacgcttgaaaagcgcaaaagtggtgaaatatgggggaaagttgagtggtttgtgtagagtatataagtaaaggatagtttaataaatcattaatccctaattcattctaatgtagtcactatatatattgtaattatatcatctaatgaattattcagccttcaatactatatggtatcagagctttaaacgatccctaaacctaaatctagccgctactctgtttttcatcatttttcattatttttctttctcttcaatggcttctgagactgtcattacatctgattcaaccagtcttctcaacgtcaatatgactaatgttaccaaactcacgtcctctaactttctcatgtggaggcgtcaagttcaagctctactcaacggctacgatctcaccggctacattgacggctccattgtcgtcccacctgcaaccatcactgcaaatggtgcagttacggtcaatcctgccttcaagcactggcaaaggcaagatcaactcatttacagtgctctactaggcgctatttcaatctcggttcaaccgatcctctcccgaacaacaacatctgctgaaatttggactaagctgatggacacatatgctaaacccagctggtctcacatccaacaattacgacaacagatcaagcaatggaagaaggacaccaaatccatcgatgaattcttccaaggcttggtgatgcgatttgatcaactagctctccttggcaagccgatggagagtgaggaacagatggaagtcattgtggaagggctctccgatgactacaaacaggtcattgaccaaattcaaggtcgtgaggtacctccctctctcactgaaattcacgagaagttacttaatcatgaagtgaaacttcaagctgcggcatcgtctcttccgatctctgcaaatgctgcaagttatcgtcctccagccaacaacaagcataacaactccaacaactatcgcggacaaaaccgtaacaacaacaatcgtggtgctaattcataccaacagccaagaaacgatcagccctcttctcgtggttatcaaggaaaatgccaaatctgtggagtttttggccatagcgctagacgttgttcacagcttcagatgtctggcgcttactccaccccatctccaagtcaataccctaatgctactgttccatggcagccccgtgcaaatatggcagccatgtcgtacaatccttggcttcttgatagcggagcaacacaccatcttaccacagatttgaacaaccttgctcttcatcaaccttacaatggtggagaagaagtcacaattgctgatggctctactcttccgatcactcacactggttcatcaactctctctactcaatctcgttcccttgctttaaacaatattctatatgttcccaacctgcacaaaaatctgatttcagtttacaaattgtgcaatgctaataaggtttctgtggaattctttcctgcccactttcaggtgaaggatctcagcacgggggcccggttactccaaggcagaactaaagacgagttatacgagtggccagttccttcaaacacacccatctctttattcgcttcacctacaccaaaaacaacacttccttcatggcattcaaggcttggtcacccgtctccgcctgttttaaaatcccttgtttctcagttttctttaccagtttcaaattcctctcaaaaacattttccttgttctcattgtctcattaataaaagccataagcttccgttttattcaaacacaattatctcctacacacctcttgaatacgtttactctgatgtctggacttctccagttacatctgtcgacaactttaaatattatttaatccttgttgatcattatacccgatatacatggctgtacccattgaaacaaaaatcacaagtacgggagacttttgtggcgttcaaagctctagtggagaatcgttttcaaaccaaaatccgaacattatattctgacaacggtggagaattcattgcgctacgacaattcctgctaacacacggcatttcacacttgacctctcttcctcacacgccggaacacaatggaattgcagaacgaaaacatcgtcacatcctcgaaaccgggttaactcttctcactcaagcctctattccaacttcatattggacatatgcgtttggaactgcggtttacctcataaatcgcttgcccagttctgtgctcaataatgaatcgccgtattcgaagctcttcaagacttcaccaaattacctcaaattaagagtttttggatgttcgtgcttcccatggctccgcccatataccaatcacaaattggaaagaaggtcacagccgtgtgtatttctcgggtattccttaacccaaagtgcatatttatgccttgatagaagctctggtcgtgtctacacttcaagacatgtccagtttgttgaggatcaatttcctttttccatctccgatacccattcagtttctaattcaagcccagaagaagcttccccttcatgtcaccaacccccatctcgcattccgattcagtcatcatctccgccactcgtacaagctccgtcgtcgctgccgcccctaagctcagattctcaccgccggccaaatgctgaaacttcatcgtcttcgtcctcgacgaataatgatgttgtggtatcgaaagataacacacaagtggataacaggaataatttcataggcccaacaagcagttcttcagcccaaagccaaaataattctaatccaagctcatccatccaaacccaaaatgagcccaatccgagcccgtcaccaacacctcaaaattctagcccagaatcttcaccatcgtcttctacctccgccacgtccacagtcccaaatccaccaccaccacctccgacaaacaaccacccaatgcgaacccgagctaaaaatcatataaccaagcccaaaacgaaactctccctcctagcaaaaacagttcaaacccgacctcaaataccaaacacggtgaaccaggctttacgagatgaaaaatggaggaacgctatgggagaagaaatcaatgcccaaatacggaataatacatttgaattggttccaccaaaaccaaatcaaaatgttatttccacaaagtggatttttacactaaaatatcttcctaatggtactcttgacaggtataaagcaagattggtggctcgaggttttcggcagcaatatggactccattactctgaaactttcagtcctgtggttaaatctctcacaattcgcctagttctacaattggcagtgtctcgctcatggacaattaaacaactagacgtaaacaacgcttttcttcaaggtacattgacggatgaggtgtacgtcacacaaccacctggttttatcgaccccgatcgaccacaccacgtttgtcgccttaagaaggcgctttatggcctgaaacaggctccacgcgcttggtaccaagagttgagaaattttgtttgctcgttgggattcaccaattctctcgctgatacatcagtgtttgtttacatcaacgacatccaaatcgtctactgcttggtctatgttgatgacattattgtcacgggaagtagtgatgcgttggtaatggctttcatcaccgctctttctcggcgattctcgttgaaggacccgacggatttggtatattttcttggtatagaggcaacaagaacctcacaaggtcttcatttgatgcagcataaatatgtttatgacttgttgtctaggatgaagatgttagatgccaaaccggtgtccacaccaatggcgacacatcctaaactttcactctactctggcattgctctagacgaacccggagaatacaggacagtgatcggcagcttgcaatacttggcgtttacacgaccggatattgcgtatgctgtgaatcgattatcacaatttatgcatcgtcccacagacattcattggcaggctgcaaaacgcgtccttcgatatcttgcgggaactgctactcatggtatattacttcgctcaaactctcctctctcgcttcatgcattctccgatgctgattgggctggggacaatgacgattttgtttccaccaatgcatatattgtgtatcttggctctacacccatagcttggagctcgaagaaacaaaagggagtcgcacgttcttccaccgaggccgagtacagggctgttgcaaacacaacttcagaaattagatgggtatgctctcttcttactgagttaggcatcacattaccaaagatgcctgtgatatattgtgacaatgttggtgccacatatctctctgcaaatccggttttccattcaagaatgaagcatctagcattggactatcattttattcgcgacaatgtgagtgccggtgcactacgagtctctcacatatcaacacatgaccaacttgccgatgctctaaccaagccattgcctcgtcaacactttcttcagttttcaagcaagattggagtgagcaaactccctccatcttgagggggcatgtagagtatataagtaaaggatagtttagtaaatcattaatccctaattcattctaatgtagtccctatatatattgtaattatatcatctaatgaattattcagccttcaatactatagtttgatcatgtgcttactttcccttcatttgcgatacttcaaggttcttgctgccactgtttctttgaatgcgtcacatgtttgaacatgtgtgttctttttggatcgaagcttagctctttagatggaactgaataagtaaaagaggtcactggataagctctgttactagaataataggagggcttctgcttcacatttgtaatcctctctctttctctgaattgatgttgcaattgcttgtcatcagtatctgtatttccatagataactgaactcattaaagggcaaccgaagctgcttcgtggtttatgtttcttctttgtgggctattttgctttgcactttcacttgtttcttagttttggtttgatttttcatactgggccctgagcaaaacaattttagttatatgacttgtgaaacttaaatgggttttaatcgaatggtaacttcatctaatttgtttgaataattcatcatggaccttaatgataatatcttgagtctactaatcatttcacaaatcctttcattttccaacagcaagtagcctgatttttgaacctcagcgatagacagcttaaagtgcggtcattctcgcaaaaagctatcagtctttatttgattcacgaacattatacacgaaagtcaaaattaaataaccaaaaaaattaaacaaaaagcaaacaagaaaacgacttctctggtatgattggaacaaatttaatagagagagaggttagataagaatgtggtagaagataagacccaactacgcgtcataactgggtcccatctttgtctctttcccttcttcactcgccaaccccatcgcgtgtccccacgctccttccctttactttttctcgttatccaaaacacgacgattcttcattttagatttttttcattaataaaaaaaaaaaagtcttttattgcagaaatttcgatcgtttttgttgtgtgtacagagagattatcgtgttttgttggcaatcgccattaaaccttcttccctctaacccaatcaaatttgcggctctttcttttatcttctcgcctcggttttagcaaaccctttagttatcttcttcctcaagcaatttttcttttggattagattggtgttttcttttggtttgtgtggtgatgatgagaaggcaacgagatgaacaacaatctagggttttctacgatctatcatctcttgttttgaatcttctccgttctcctcctatgccgatttctttacctgatcatttccccgatccgcccgctagaattcgtcctcccttttcttcgcatcgtttttcgtcttcttcgccttctttggctcatatttctccgtctggattcgcgtcgttgctgcttggtatatctgtggctcttatgctatgtggatctgtgactttcttcatcgggtttctcttgatgccttgggttcttgctctgattttggttttctatgtcgctggcatcgtttctgccatttctatggtcgggaggtcgattctctgttacgtcttgacgccaccttctccttccggaaaggagatttctggtaattttgttgaattttagggttaagtttgtcaaattggtttcaatgattcaagctttctactttcgtctcggatctgtttagattttaaccaaagtttccttattgatcatctagaaatgattccactgggttttggttctgtccttattttgatagaaatggaggttcgaattagggttttattgaaaagcacaccgatgtttgttctgtctttgactgaaacgatattgttcttttgtttcctcgtggatcatattattcatgttcacattacttttgttgtctgaaattaaacctatgtttgtattagtttcatgttcttgcaataatgtttgtgtttgacatgtctattcgcagaatggaagcttctgtgaaatgattaaacaacagaggtgaagaatctatacatcatccggaagcagagcagagcgaagcagaacaaaaaaaagaagaagaaggattgattatataaacacatatatccgatagagtttttctatgttctttatctgtattttgttgggggggtttgggaaaatcatgtggatatcagggagttttatatttctttacatttcgaaaaaagaatttttctatttaactactgttagaaatagagaagccttgttatttgtgctttcatgtatgtcgtttttatgtaacatgatcatttcttaaagcatacaaaaagattttaggatttctgttgcacttctttcgatttccttgcattttcgaaacactctgtgttgatatctcttcctttaaatcttcttacaatatttgctcattcttgatctcttttatggttttaaataattgtctcttcaagttcacacggaatctagtgtgaatcgaggtttagtcgtgcagagttgtgtgtgttattacatgttttattattgtttaagtatatttatttagtggaggactatacgctatttgcacatctcaatgtcaaattgctcaaaaatggtagaggtgccgtgccgtcaatagatgtcacgtgtcctgacttgccttctcaatacaaacaaaaatactctctacctaaaaaaacacaataaacaacaaacgcatctttggagcggcggtgagattagagaagaagggtttgtgaaatggagtccagtgaggatgtggagaatctgagtagagctattgagaagcttcttcatgagaagaggaagagagaagcttctggtgacgccttcattgaagacgctgatgatcagcttttcctctctagccttatctctcaggtactttaccatcgctctgttttctcctttgttgatttatctgatgttgcagccaatcaactttctgggtatatgattgaatcatgagtatttgagtgagtctgtgtaattgtttcgctgtgatgtgtctgcttcgattttgatgagatccaacaaatacaagcttatcttcatgattgtgtttagttgctgtttcatgtccacaacattatttgtattgggatgtgtccatttcaggcttgtgctaatttttttgccaataacttagttggaatcaccaaaccccaaggggaaagaagatgtcataaccggagaagaagaagaaaaagaagaagaatctgcagattcttcaccatccaaaggaaaaagcgagggccagagacaattggaagaaagtatagaagaaatagctaaagacatcaagaaggtgaagaagcagaacaaaataacccatgtacttctctcggctacgatcatcctgacattggtttggcagctctctgagtactccatgattttcatgttgaaagatagaataagccacccagtcagatccatcggaggtatgcttaatggaatgttcaaaggtaagttacgtccaatcaagaaccaacttgcggggacttccaactccaatgaccaaaacaaccatgggaatggatcacacactggacctcaacttcaagtgcccgagctgttgcgagaattcggtttcgacgatgaagaatgatagcttccctttgtgactcaataataccagttgttatttaggaacaggggtcaccctcattgtttctttgcttttagtataagtagtttacttttatatgatcaaaatgcgaaagaatagttgctttctcaaacttttccacatgaaaaagggttccaaaagagaaccgtatttcaaaaaatcttttgttttacccttactgaatcatggttcagtgcccgaaaacaaaaggagtcatctcaaacaaagtaacaaatagctccattgattaaaataaaaacagacagcaaaccacctgaaacaaagcttaatgttccaaatctaaaaccaactcaaacagtttttgaatagtcccaaactttccaccactctcttttcagcttccaataatggttccatgtacctctggcatcaaattcctcaggcatagttcaacctgaatatgtcattgaacacgtagtagtttccctgattcgatatcaaatggaacatctggacacaaaacacaagtatgtcaggaatcaggcaaaatccaaacaacaagcagtcatcagatttatgttacaatcatatagtgatccagtgcgtgattcacaacacaagagatgcatacgtagctcattacaagtaggtcaagttgacagaaattcatcccactttgctctatacatacattccacaagtttgatgttcatacaaatatgataacaaaacacaattagtaccttgatatgaagaactaaaatgacaaaaacatctcttatcgaacaaatctagtaaagagcgttcaacactaaaaagagaaaacaatgtcttacggcagatgatacaaacactgcaagcatctcaaactatttagagttgagacaatttaatcaagaaggtggcatatctacaactacaacaagatcacatatgagcatagttgaaaaaaactagcagaatcatggcaaagcagtttcccaatactacattcacgaagtgcaaggagatagaagctccacaagacaaaatctaaatgacacaagattacatctactgatctacgcaatcatttgggggaaacctcttttatctccaaccttatcacagatctatcactaaatgcatcagggagggtctaaaatttcgagacaattccagatcattgaagcttttagtgacctaatacacacatcaatctacagagcagtaaggataaaaaccctatcgtacatgatcaacagcgaggaatacaaaggaaacactaaaaatcgaagtgatctaaacccaagggaaagagataaggcaaaaaaaaacctggctgaacttgagagcgtgttgttcaccagcgagctgaagattgccggagacaaagacgagcataccaccggcgggaccagaaggctgacaatcgacggtggtgatgttgtgcttacactgctggaaagggaggccggtgagcttagcgacgatgttctgagagccctggatcttctggccttcgaaggtcaacatggatccttcttggtatagagaaaccaaccctggacgatttgcatcgaaggtggagtagtagtgctcaacgaaagcctttgcaacagcgtctggatccatctctttcttcgtcttcctttttgatccttagctcttgcgtcgtgctttttcaacaggcgagagaggatcgagagggttagataatttactgaaaaattatacgaatggaccaagactagagatactgaaatgagtgtttgacgatactttaaatgggccttatatttttcaagttgggcccgttaatatatgggacaatcaacagtatagctcaattggtaaattgactaacttcatttgattcctacaccatttaaagatttttaatcaaattctgatataactaagataatattttaaagcatttaactaacatggaaaattatgaaatgaaatattaattttggatagaaaatttaaaacatttatctttgtgaaataaaaagaaagtctcttataatataacttgtaaagtaatcctttaaattctaaaagatctaaaacaaaatgagttaaatcctatgtctatgtgttgaatctggaagatcgaggtggaagaaaaaggatcatgattcatgggtgagagaacaaccgttgattggtgtgtttcaactttcaagcaatcccattttaaaaaaataaatttatgtaagcaattgcaaacaaaatgaaatgattatgctttaagatatcgacacgtgtaaaacagatgacgtaccaagaaaataaatgattctgtattttgttttagccatttgttttttctttaaaggaaagtgtatgttgaaattgaaaaaacaaaccgagttatatatatagagttatttgactaaagaaggaagctttggttaaactaacttgtataattcttttgtgtagtttagttttgataaaatggccaaacaattttggtcactttaccaactactgcaaaaaaaccattttcataataataaattgtaacacgccttttatttttattattggagggtgagaactgagaccatatatgcctttgttcccttcttgtgggtccctttagcctttttttttcttttgcctgcgccgtttagtgttttttcttttatatataaatagaggtaagttattttaccaatcatttggtgttattaatagtagtattaatgaggttctaaacttgtttataaaaatcagatcttactaaacaaactcaaagaatctcaactatgaacatttttcttctagaatcgagttttaacatcatcatcagcaggatataattttttgtgtttgaattttatctgtattttttttaggagtacataagcagcttaagattaaaatatatattaatggaagtatgaatgaaaaaagaaaagaaagataatcagataatagagagagagagagagagaaggaagcagacatttgtcttccaccatattcttctcatcttttccgatgatagattcttcttcttcttcttcttctactactacttctgctcctctttcttaagtttctccatttgataattcactcaagtctccagctcctcttcttcttctcgttgctttattcgctctctttcactcatcatcatcacactcaaagatttctgttgtattggagcaagctctagcgaattttcgtactccccttgtagaattttagtttcctgttttagatttcgaggaatctcgctttggaaactttaagctcctgttcaaagtttctacctttgtttattttgtttttgttttcttctctcttatctttcgtcatctttgattaagtaaccactttgatctctcaatttcagcctttgggttgtctaatctgacacgttcctctgtcttagctttccttttctcttctcgtttgtgggaagcctacaaggattaattattaaatacccaaccccaaaaaattcttcctttttgattctctgattcgtccctttttgtacatggtttctgtttggttgttagagcttcttgctgagttgaattgagctggttgcaatcactctgtttcttgggggttgatcgtgtattcaagtggtggatgagtctgttccatgtgctagggtttggtgtcaagattgggcatctcttctggatgctatgctgctggtttgtttcttggttcgttgataatgggatcgaggacaagtctggtcttttagttggctctgtcggtgatcttgagaagactaagatgactacgttgaagaagaagaacaagatgtggttctggaataagatctctagcagcggactcaagatcccgagtttctcttatcagtttcttggctctgttaaattcaacaaggcgtggtggaggaagcttgtggtggtttgggttgtcttctgggtcttggtctctatttggacgttttggtactttagctcgcaagctatggagaagaggaaagagacgctagctagtatgtgtgatgagagagctcgtatgctgcaggatcagttcaacgttagcatgaatcatgttcaagccatgtctatcttgatctcaaccttccaccatggcaagattccttctgctatcgatcaggtattctcgattccgcatcttcttgtcttctaatctgtttggattgatgcctgagatctagtcttgcttgtagtacataagttgttcctacggtgtagtatatgaacggtccttggatgatggtagcttttttcattcaacttgctctcgaatttcagttaggatttacaattttgctgattgttgcttacagtctttgtatttagctaacacttggtagcttgattcctatcttcttgagtattagtgaacagtaactaacattaagaagctttgtgtagagaacattctcagagtacactgatagaacttcctttgagaggcctcttactagcggggtagcttatgctatgagggtgctccattcagagagggaagagttcgagaggcaacaaggttggactattaggaagatgtattctcttgaacaaaacccagttcacaaggatgactatgacctggaagctttggaaccatcccctgtccaagaagagtacgctccagtcatctttgctcaggacactgtttctcacgttgtttctctcgatatgctgtctgggaaagtaagcttctttactggttctaattttactgtttttatgtaatttactatcatggtctacactcactaccgggcgaatcctgccgacatggctagttcatatttcaatctcggcttaccgattaagttgttttgatcattttatttaaagtttagagcactgttttaactgatacttattctcactcaattcctcttgataggaagatcgtgaaaacgttttgcgggccaggagttcaggtaaaggggttttgacagctcctttcccattgataaagacaaatagacttggggtgatcctgacatttgcagtgtacaagagagatctcccctccaatgcaacgccaaaagagagaattgaggctactaacgggtgtgtagcataggcgtctaaataaataataacgcataagttttacaacattatttttgctcattcatctcttttgatgcccctgaaggtatctcgggggagtgtttgacattgagtccctggtagaaaacttgcttcaacagctggctagcaagcaaacgattcttgtcaatgtgtacgatatcaccaatcactctcaaccgattagcatgtatggtacaaatgtgtcggctgatgggttggaacgtgttagtccactaatctttggcgatccattgagaaagcatgagatgcgttgcaggtacttgcagttggcacatacatatgtctgtaatttcttcttgtttgcaagaatccaggtgctaacattttgttgtgagcttcttcctctttgtagatttaagcagaaaccaccatggccagtgctatcaatggtgacatcattcggtatccttgtgattgcgttacttgttgcacatataatccacgcaaccgttagtcgaatacacaaagttgaagaagattgtgataaaatgaagcagctcaagaaaaaggctgaagcagcagatgttgcaaagtcacaggtaaatacatcatcctcagttgataaatttccacagcatattaaactttctatgacagagagaagagttgtaatctaacttttttttatgcagttccttgccactgtttcacatgaaatcagaactccaatgaatggtgttctaggtgagtatcgaaatggccactatgttgcctccttctctcacctatgcccatgaatattttctgaagaacaaacttaaccaaatattctcatgttgactttgatctggggtgtaggaatgttgcatatgcttatggacacagagttagatgttacgcaacaggattatgttaggaccgcacaggcaagtggaaaagctttagtctcgctaataaatgaggttttggaccaagcaaagattgaatctggaaagcttgaacttgaggaggtgcggtttgatttgagaggaatattagatgatgtcctgtcactcttctctagcaagtcccaacaaaagggggtggaggtaacttactatatgatctgcaaagcaagggttgtaactgatagcaagtctttcttactgattttttgagtgttgctgatgaacgcagttggcagtatacatatctgatcgtgttccagatatgttaattggtgatcctgggaggtttcgacaaatactcacaaatcttatgggtaattccattaaggtaaacttttttattatgtttttttctgaccattccttgcatccgagttgatcaacggagctgatcatttatatatattctggcagttcactgagaaaggacacatctttgtaactgttcatttggtggatgagctatttgaatctatcgatggagagacagcatcatctccggaaagtacactgagtgggcttccagttgcagaccggcagaggagctgggaaaactttaaagctttcagctccaacgggcatcggagctttgaaccatctccccctgatataaacctaatcgtctcagttgaggatactggcgtagggatccctgtagaagcgcagtcccgtatttttacgcctttcatgcaagtcggaccatccatatccaggacgcatggaggcacaggaattggacttagcataagcaaatgtctagttggactgatgaagggagaaattggattctcgagtactcccaaggttgggtccacattcacatttactgctgtattttccaatgggatgcaaccagctgaaagaaagaatgacaacaaccagcccatattctcggaattccggggcatgaaagctgtggttgtggaccataggcctgcaagggcaaaagtctcgtggtaccattttcagcgtcttggaattcgagtcgaagtagttccacgtgttgaacaggctctacattatctgaagattggtactaccactgtgaatatgatactcatagagcaagaaatatggaatagggaagcagatgatttcattaaaaagctacagaaagaccctcttttcctttctcctaagttgattttgttagcaaactcagtagaatcgtcaatatcagaggctttatgcaccggtatagatcctccaatagtgatagtgaaaccattgagggcgagtatgctagcagcaactttgcagaggggattgggtattggaatcagagaaccacctcaacacaagggacctcctgctttgattctcaggaatcttctccttggtagaaaaattttaatcgtggatgataacaacgtaaacctcagagtggcagcgggagctctgaaaaagtacggagctgatgtggtctgcgctgagagtgggataaaggcaatctcattgcttaagccacctcacgagtttgatgcttgcttcatggacattcagatgccagaaatggatgggtatgcctgattggtatactagtttttttgaaaagttcgaaatatgtaataagaaaattgaaatgtttttctgccctgtctttctgcagatttgaagctacaaggagaatacgagatatggaagaggagatgaacaagagaataaagaatggggaggctttgatagtagagaacggtaacaaaacaagctggcatcttccggtattagcaatgacggcagatgtgatccaagcaacgcatgaggaatgtctgaagtgtggaatggatgggtatgtatcaaaaccatttgaagcagagcagctgtacagggaagtttctcgctttttcaattcgccttcagatacagaatcataagaggagatggggctggaagaagaacagcgaaggaaacacaaaaactcgtgtctcctatgcatcttgaagtagtagtaagccgcctatattcctcctctctatatatttactcacctaaaaacatgtcttctcaactgacagtaacgccttatgtgaacttgtttataggaaaaacagattgacgattgcaaaaagagtgtatatagaaaggccggtgtgaccaggccaagaacttaggaccagtactttctcctgtaaattttttttctacatttttctctggtctgattgagacaacaaaacttgtggtatgtagatgagagtagcagctggaatatattcagagttgctttggacagggaagagagcatcatagtatgtgtgtaaaagtgtgtgtgcatgatttaggatatttcttcttgtattagagaacagtgctgcagtttctttgttatcatcatggtccaagatagggaagtggacattactacttatacatacactggctttgtgatataaagttgaagatagcttttactttctcttccccttctttacgtacaatgcatattggaaccaaaaccaaatgatcggaccgaatcaagaaacagaaccgaatgtcttcaaatagttgtgttttgtgtccaactaaattcacgtagaagaactatagaaacgtggaccccaaaacgtgagtgtggttgtttgacttttaaacacgtccgtgagattttcagattgacctttaggtcacatttttgtccaccacatcaacatgagagggcttttctcaagcatttcaataatcggaatccaatcactgaccgccacgtggacatcatacgtctcaataaccaatcatagaatggttgtgacgacgttcacggtgagttgcagtacccgatcccttttaaggtccgtgacagaataattttgaaaccagcaagacaaatttagtcaaaccaaaaaaaaaaaaaaaacgaaagcgcaaagactaaggagaaaagaaattcttcgcttcttctccggtgtaatcatggtatagcccgcgatctcgattgtttcttattatcggtattcatgttatattagctagaattgtgttttgtacctccgatctgattcacagattcagtatgtgaaattcattattttgaggatttgatcgtcttatcaatgatttaatctatgtttgaatattgttgaatcacgggcaatttcgcatcacgccaaaagaattgtatctaacagatgcgaaaaagtttgaatctgttttcgaaatgtagttattcaaattagctgagtttttgtcttgatagtatgtattgtttcttgatttaaaatgcatggccaaatcttaccctggctttgcccagattaaatactttggtgagtgtaaacgaaagagattctgattttagtaatatggttgatctggagagaaccattaccaatgtgtattactgaatagggttgattttaaaaattgttgcagacaacctcaaaaagactagcagacaggaagattgagaaattcgacaagaacatattgaaaagaggatttgttcctgagaccaccaccaagaagggtaaggattaccctgttggtcccatcctcctcggcttctttgtctttgttgtcattggatcatgtgagtaacctcttcttctttgtgctccttgattttaagtccaaatttagacattggtttccagaatttcttctttgtcccccttttattgaaaattctttgtggaatctgaatgatttgattatactatgtgtatgtttattaaacttccttgtatatgcttttgttacagctctcttccagatcatcaggaccgcaactagtggaggaatggcttaaacccaatcacattcaagctggaagattgcaattctcaaattgatgaatcatcactttcttctcttctgacttgtctctttttttcccttatactgtagaatgtgactactttctgttgactacatgttattgaaagaatttttgagtctttttctaatatccactctttactattgtcttgataccaaatacaagcaccgttaaactatttaacgttgaattggtgaaactatttccctcggccaaattgttcggtgaacgaaagatctgatctgtgaagagtttagttgaatagattcggctgatggattggtagggagagacaccatgcggttggtggaaggtacccgtgatagagtcttgacgtgaacaacttagtccaagagttaggagacacaataatgataagtagccgtcaatatatcttttgatccgaatttgaacttattatatgctttacttggcaaatgatatgaaaaacttgttcattgttgaagaatctatcaactattgtattcaatcacttacctttttatcttttaccaatcatacttataactgaaccacaacaatctctctttagtcttattcttgaccaataacttgtattttaccgctttatagcagttgggccatatatatgtaagaatagtttgagaaaaagaaacaaagagagagaggttatgatgagttaaatcatgattaatctttaatatataggtaattgcaatgttaaatggaagtgacatgattgaacaaagcatatttgatgggatgagaaaaatgaacccccacgctttacgactactttacattctctgtggaatgattttgaaaaatataattattacaccaaaagaaaaagagaacaaggcaaaattatgcacatgcaatttattacattcgattcacattgattcagtgactttctttctttcttacaacaaataaaataaacttttggaatcaagttgttcgtagtcttcttctaacgatgatgacacaaaaataagattcaagttgtcttattcttacctagagttatttggttccaaaataaatgaagtcgtgatataatagtaatttggtttcatacttactcactcactcaattgtgtaaaaagccgaaatgcagtaaaaacagtgatacacaattgtatcaaaagataaaatgatggacgttaaatccgtaatttaaatatgttaaaagtaaaaaaaaaagttagatcttctttgtataattacaaaatatatatcataagcaaaggtggaagaaaccatgatttagtataattgccgcaacctcaatgatcctctttataaattaaaaagaaaaacccataattaccaatttattaccaaagcacgcgtctttctttattacaaaattgttttgttttattcttgttagaaacatttttatttttattacaataaaatggaactatagtgtatgttgtttagaataattgtattaaaaaaagtataacgtacaaaagaataaagtgaatgaggaaaaaaaagagaggggcaaaagtggaaaagagagagatagagaaggatggaataattggtaagaaataatcatatggggccaactgaccatggaaaaagatgaagcaaaaaaaaaaagagagagagaaaaagacaattcagagataatacaaaggaatggttttgttttaagagagaaagagaaagagagaactcgacgaagaatgatggtgggaggttaaattccccaaacccccagagctcttcattttcttcatatcgacgatatgctaaatggctgctgctaccattactgatctcttctcttaagctctctttgtttggggcatggaagaagagcttgccatgcttagacagctcatcggtcagcttcaagagctcttgcacaacggctctcctcctcctccttcttcttcttcatctctgtcgtcttcttctccgtcatttttggttctccaccatcctcagtatcagaacgggtgaatatctttctctctctttttctctgtggctagatctatgtgggatgggtttcgatcctatttttgcaatttggggcaacctcgtaatgtgttttggtttaggggcttttttgattgctccattttgtttagggcttatggttcaatttcgattgttccttagaatcatgcaaatccccttatgttgagttcttctattgattcagttgcttttcaattagctcaaggaggaaaattgatctatgaattgactcgatttggtcacaaagagtgcatttattttttgccattgtgctaaaaataatctctttactaaaatccattccattccactgctgccaccaagcctccaaattttttgtcattttgtatcgagtcttgttgtgcttttagtagtccatcattgggtcaataccaaactacctgctcaatgccttccttacctttatatgttgttgtctctccagcttcacttctaaaagcatctaattgtatgtatttatttgcccctttttgaataagtagtgttcccaatacttggactaaacaagggttgttctgttagctggtttactgctgccttttttctctggtatacttacttgtggttggtttaagggcaagtctttgtttccaatggaatgatttcattttttagaaaagaggatcctgtgttgttttcctgagataaattttctctgttatggcagatggtgtttgccctgtattgaggatacttctgctgatgattgttgtgatattgtaatggctggtggaaagaggcctgggatcttcaagatgttagaaactgtcaagcctcccgtcaaacgaactcgaaaagaacggactcaagggaaatcatgtacggaagtagatgagataagtgggaacatggatcaagaaatatggcaggaattccctcaagatctctttgaagacgttgtttccagactaccaatggctacttttttccagttccgtgcagtttgccgtaaatggaatgctcttattgattcagatagcttctccagatgcttcactgagcttcctcagaccatcccatggttctacaccataacccacgagaatgtcaactcaggacaagtgtacgacccttctttgaagaaatggcaccatccgattatcccagcactacccaagaagagtattgttttgccaatggcttctgcaggaggtctagtgtgcttcctcgacattggtcataggaacttctacgtgagcaacccgcttaccaagtctttcagggagttgcctgctaggtcgttcaaggtctggtctcgtgttgcggtaggaatgactctgaatggaaactccaccagtcatgggtataaggtcttgtgggttggatgtgaaggagagtacgaagtctatgattccctgagtaatgtgtggaccaaacgagggaccatcccgtccaacataaagctcccggtgttgctcaactttaagtcacagccagtggctatccacagcacactttacttcatgttaacagatcccgaagggatattgtcctatgacatggtctctgggaaatggaaacagttcattatacctggcccaccagacctgagcgatcacacgctggctgcgtgcggagagcggttgatgctggtgggtctactgactaaaaacgctgccacttgcgtttgcatatgggagctgcagaagatgacactgttgtggaaggaggttgacagaatgccaaacatatggtgcttggagttttacggaaagcacattaggatgaattgtctgggcaacaaaggttgtctgatattattgtccttgaggtccagacagatgaaccgtctgataacctacaatgctgtgactagggaatggaccaaggtccctggctgcaccgttcctcgtgggaggaaaagactttggatcgcttgcggaacagcgtttcatccctcccctacagctagggcttgatcatcttttctcctggtacaatttccttggccagctttgaggttgtattcgaacggttcacacacggttggtttctttttgttgttttatttcggttttgattttcgagactgtaatatacaaaacgttctgtattgtaataaataactttgggttgtgtggaacctcttaaacctgtgagcaaagtttcataaaaagtacacaagtccagaaggaactatttaacactttttgtatttgacggaccaagtgaacagaagcataacaacaacagcatctaacttgaagaacatacttaagcgttggatacttggattataaaaaactcaaataatcttcattacatgatatagtaaacagaaagttgacacattctacagtataaggagagaaaaagaaaggagacagaagaagattctacattttgaaaactgcttcttctagcttgactgtgttttggtttatgccatgcctccgctagttgcagtcctaatgatctgaaagagagctgtaacaaatcatgtagaaggttaacaaatatagtaacatacgcatacacaaagtataatcaaatgattcagattccagactatgctcgttactggagttatatatcatgggacaaagaagaaattgtagaactaacatcaatgtccaaatcaagaagcgtgaagcctaactttaagaagctatttggtgccctcaacatagagtagtaagttctgagcaagtaaagctaggcattggaataagaagaagaggttactcacatgatccaatgacaacaaagacaaagaagccaagaaggatgggaccaacgggataatccttgcccttcttggtggtggtctcaggaacaaatcctctctttaaaatgtttttgtcgaatttctcaatcttcctgtctgctagtctttttgaggttgtctgcaacaatttttaaaatcaaccccattcagtaataagaagcatcattatacatctgcctctgcgcattagtaatggttatttccagatcatgcagcatattactaaaatcagaatctctcttcattcaacaaagcatccaatttgggtaccaattcatgtatttgtgcaaattagcagagaaattgggctaagatcaggtaaaattcggccatgcatcggaatcataagaacaatagacacaatgcagataagaactcagctaatctgttcaaatttcgaaaacagatccatcttttccaactaatcaatagattaaaattttcaatttggcataacgtaaagctaatccgactcaaaattcaaaatcattgataataccacacatattgactcagatcggagctgcaaagcatatcttaagccaatcaaacatgaattcagatcctcattatgcaatcgacaaaacaaaaccatattaagtgttataggcaaagatcgagatcgcattcataccatgattacgccggagaagaaacaccaggaaagctaattagaaattgaaatgacgatcgcgagcagaaaatcaatttcacctctctcttttttttttggttttttttcttaagtttttgtctccttgatttcaatatatctctcttttttacatctgtgtttcaccacctaaaaagagattcagtcttgctattctcacaacgtacatcgtcacagaccatctatgattgggtattgagacgtgtgatatctacgtggccgtctataattgggtcgttatttgagattttaagagcttgagaaggctcgagaattgagactcgtcggacaaaaaaacagacgtgtcatgtcaactactgaaaatctagcggacgtgtttgaaagtcaaagcacgaacctctttggggtcagtatttccaaaacaaccattttagatttctaattttctactagtagtagtaacctataaacttatagagagcttggttttacggactgtttttcctagaccgttcatgaacattgtgttctttggtggatagattttgattggatatgaatacatgatccgtgtttttagtgagagtttaaggattcgattattcgaagcaggctcatagagtgtggcatctcaaacgatgcacggtcttccacaaaaacgcacatatatggtcttgaagactcataatattcggattgataatagtttttcttgaatatgattgttttggtggatatgaagaggaatctcagaacattggattttcttggtgatgatatgataatggtatagttggaaatacatatttacttcgttttgtaaaatgacaaagcaaaatgtgtaaaaatctcgtccaactgtaaaaaccccatgactatattttagtatcactttctcttgacatcatcacagcaaacaagactcacgtaattccacaaaagctaaaatttgtgtctatcaaagagccatgtgtactaaaagtacaaatgaatggaatgtactatgtgttatgtactatgtactaacggtatatcgaccaaactcataatttcatgtttagtaatgcttttaatttaatttaaaatatatagttcccctaaactaatcttagtcagttcatcgtacgtctaataaattttcatttaattgtgatgttctcggggatggacactctaaaatattagtattagtgtacttgtgaaagtaaaagagaggtttatagatattaaaacttgcacgaattgtactaggtatgaatggtaggtactaggttctctaacaaatgaaaagagttgcagcctttttgaattaatgttttgaacatacaaattcgatttttcagcggctttttacatgtttaattagcgaccgataagaatatgaagaaagatccaacaatataaatttgacctttcttacttataatgttgttacttgcattttttgtttgttttacatctaattttagagagcctaaaattagttacaacttacaaatatttcatcattttgttgtccatatgattgtacctacatattaggcctgaaataaataaccaatttcgatatagaatcgaatctgtgttggtaaaaatataattcgtttcatatactagtattagttaaaaattagacaccaaaataaatacgaaagcccaaaaaacaaaaaaaggcaaaacagttgaagaaaaatagtgggaaagactcctctgagctactctcattcgattttcctcaggcgattttggtgtatggtcgtccctttcactgtatttcttagtcaatagcatcttctccgatcatcgacgtccggagatttcttcggccctctcatacttgaggttttgtactctttactccctcaaatttttccaaaacttgcgcttcttagatttgggcgtcttcgttatttattgtaaaattcagctttatgcctcttagactagttatagatcgacgaatcagtaaaattaccttcaaggtgaatggtctctaggtatagagaatttgtcaaaatgacgaatttgattgaaacattggtaactttttttaatctcttcgttagttagttgaacttattggtttggggggaccatttgctttcatcgaaaaccctagcttgcgagggagggaccttgattgggatcgtaacctaacttactgtcactttttttatcgttcaatctttattgctgcagataggtccactaatggctgagcttgctgccgttttctttgacatatagttaattcaatgtgtaaagttgtaagctttttagtctttggttttgaggaagttagttaggaaccttctccaagtacaaaggaggaatgggtagggaagggtttgcaattacaatgtgtacatcgtgtttcttgacaagttactgatagatactttggggaaatttttgatttgaggagtgtaggaccaattcaataaatgccacttagtttttgtgtgatggagatgagaagatgaaaagtaatacccttcctctcttgccctttttgctggtctgggtgaaacatagaaaagtttctcttgctcaagttaatgataaaagggtgagagcaataaacgctgataagccttgtctggtccttggaattttgaattttctttttctatcttacttatagtattggtagttgagggtgtcgtcgataaggtatctatttgcctagccagagttatatataggattgattgtctagtcttttcttatatgatttttgttctcatttactaatcaaagttctgcaaacttgtagttgttgtaggatttgttgctctggctctggtggtaggtctatgaaatcaacccatatcgtgaatggactgcaacatggtatcttcgtcccagtgggattgggagcatttgatcatgtccaatccgtcaaggactgaagatgacagcaaacagctacctactgagtgggaaattgaaaaaggtgaaggaattgaatctatagttccacatttctcaggccttgagagagtcagtagtggctctgccaccagcttctggcacactgctgtatcgaaaagctcacagtcgacctctatcaactcatcatctcccgaagccaaacgatgcaagcttgcatcagaaagttcccctggagattcttgcagcaacatagactttgtccaggtgaaggctcccacagctctcgaggtatccgttgcctcagctgaatcagatctttgtttaaaactaggaaagcggacatactctgaagaatactggggtagaaacaataatgaaatttcagcggtttctatgaagttgttaactccatctgttgtcgctgggaaatccaaattgtgtggtcagagcatgccagtcccgcgttgccaaattgatggctgtgaactggatctctcatctgctaagggttatcatcgtaagcacaaagtctgcgaaaagcattcaaagtgcccaaaagttagcgtgagtggcctggaacgtcggttctgccaacagtgtagcaggtaaaaccggtggttatgttctggcctcaataattcttaagttgcattctctttagattttactgtagagtgcccattcagtttgattgtgtcaaatcaacttttacatgctcctatttatattatacggtagagagttgatcatgattctaatattcaggttccatgctgtctctgaatttgatgagaagaaacgaagctgccgaaaacgtctttctcatcataatgcgaggcgtcgtaagccacaaggagtattttcaatgaatcccgagagggtgtatggtatgaacctatactgcaacttgatgtaatcaatatttcctcaggactttccatcagtctctaccacacgcactcacacatacacacacaattcattcatggaaatctaatgtaacgtgtttactcctgcagatcgaagacagcatacaaatatgttgtggaatggggtgtcccttaacgcgagatctgaagaaatgtatgaatggggtaataacacttatgatacaaagcctagacaaacggaaaaaagctttactctgagcttccagagaggtaatggctctgaggaccagctggttgctagtagcagccgtatgttctctacatctcaaacctcaggtgggttcccagcaggaaagtccaagtttcaacttcatggcgaaggttggtatatgcacttcttcactagtcctttaatatgtggagggagtaaatatctgttgatttgatctctagtccttaaacaattggttaaatcttttggcagatgtgggagaatactcaggagtcctccatgaatctcaagatatccaccgtgctctctctcttctgtcaacctcttcggatcccctggcccaaccacatgtgcagccattttctctactctgttcatatgatgttgtaccaaaatagatgagtaagtaatgtgtaatttgtaaacctgttactcagttggtggatacttttccaaacctatgataaaaacctcgtcctagatcccgttaaatgccaaactttcggctactataactatgttatcgttatcattatcattgtttaacaccctagtaacaaagtcattgtcaacaaaactctataaacagtaaatatatctatatacctcggataggctcttcaatgtatctctctgtattgatagcaaatcaaggagaagctgtaagagtaggtaaatcttttcaactaagaaagagttccactctttttatgaacgttagcaacagatgaaaatcaacagagttttaaggatttctaagggtcattatcaaaatcaggcgctttgtaattttagcataaaaatctatacaaaatcagtgttgtatcaacttggtatcagagtagttactgtctgatgggttaggctgcagtagaagataagagacatcacagaaaagaaaaaaacaatgagaagtgggaagagaatagaagccaaattgaaaagagacaccaattaatgattgtgaaaggcttttgaaggaaagagacacccattccatgattgttgaaagatcaaagagtaaaaagaaatagaaagttgaaagatgacaagttttggaggttttaagtacaaacctatagaggggaccaaattacatatcaatttcatatggagagagactccaaacgacaaagcctgatgagtatgaaggggtgtaaattaatagaaagaaccatgtgtctatgggattgatgttgaagtcaaatagaaaaagaagacaaggattgaaattaatgtatcttgtcaccatgtggtctgtgagaaattgttgtcgcttgctatagcagttatgaggaacttcttgacaaaatggaggagacaaaaggctaggaaccaatacaagaacatgcacagtacaaaaatcaagcagagatcatttcttagtcagattttatttctcagacttgaactcctccaatattgtgggaagcaccttaaggagtgaagtaggaaagagcatgctataaaagtgcctaccaagtgtttcataagaggaggtgtccttgcaagattttcttagttggtgaaacttccacaaaagtgctcatcgagtgtatgttggttctccattcattttaacggttttgtgtattcctccttctgactttccaagttttgggaattcaacttattattcaactgcactaaccaaaccctggagctcaatagtgacactcttccttcttgaggaagtagaatgaatctttttcccccaaacaccagaagagaatgttcatgtttgctgaaatggttgcctctaataccacaaatcaaacttttttcagattttgtgccttttaaaaagcagaagttgtctttcataattctcactttcactatgcaaagaagttaaaaataatatcaaaaacttacaacatcaataatctctgaaatggttttaaaatagtcgtagacatgtttgacagagtaacaaagttgtcataccaacagaatccagaaggaaattgacaatatgtttggaaatgtataagaaaagctgagctaaccgagtgactggtttagcttgagcaatggatgttgcacatttttattttatttgaaaacaaactgtcaaactccatcggatgatgcaacccgactttttatggagtgacttcgcattttttaactctttcagatgaaatgactagggaaagtgccaaatattggcggtggttcggccacgggagtgtgtttgatcccttgtgaatccgaagtagttgacagaagagagagagcactgtagaaatcatgagattcatggaggcctcctgagcattctcccacacctgccaaaacatattactcagtttcaaaaccagagatctaaaaaaggccaatccatcagcaaatatgcacaacaaatacaagatgtggtaaagaagtgaagatatcaacctttgtctggaagttgaatgttggatttccctgctgagaacccaccagatgtttgaaacgcagagaaagagagggtgctaccagtaaacagttggtcctcagagccattacctctctggaagctcagagtaaagccgctttccatctgtgtaggctttgtctcataagtggtaccccatgtatacttttcttcagatctcgtgttaagggacaacccattccacaacatacttgtatgctgtcttcgatctgtaaaagcaaaaaattcgttgttggtgtgtgtgatagagaaagagagaattgacagatggaaagatcctgaagagacattgctaatatcaacttgtgtagtgtaggttcttaccgaacaccctctctgaattcagtggaaatactccttgtggcttgcgacgccttgcattatgatgagaaagacgtttgcggcagcttcgtttcttttcatcaaattctgagacagcatggaacctgaacattagaaaagaaatcaattctctaccataacattagggcatgttaaagttattgctggacgactaaacagaactagcattttgcagtaaagagaatgcagtcagaacaataatcatggtttacctgctacactgttggcagaaacgacgttccaggccactcacaacaacttttgggcactttgaatgcgtttcgcagactctatgcttgcgatgataatccttagaagatgagagatccagctcacagccatcaatttggcaacgcggaacttgcatgctctgaccacacgatttggttttcttccgagcaacaacagatggagtcaacaaattcatagaaaccgctgaaaggtcattattgttcctaccccaaaattcttcagagtatgtccgctttcctagtttcaaacaaagatctgattcagctgaggcaataggtacctcgagagctgtggatggtttcacctggagaaaatctatgttgctggaagaatctccaggggaactttgtgatgcaagattgcatcgtttgtcctcgggagatgatgagttgatagaggtcgactgcgagctttttgatacggcagtgtgccagaaactagtagcagagccactactgactttctcaaagcctaagaaatctggaactatagattcaattccttcacctttttcaaattcccactcagtagattgctgttttttttcattttcagtcttcgactgattggacatgatcaaattctcccagtcccacgggaacgaagataccatgttgcagtccattcaagatgtgggttgatttcatagacctatcaccaaaagccagagtaacaaaaactgaaacaaccataagtttgcagaactagtgattgtaaatgaaagccaaacatcaaaaataagagaaaacttgtcaagcctataaataacgctggcaacccaaacagatacctaatagacaataccattaactaccaaaagcataagaaagaagaaaaaccttatgaattccaagcaccacacactgctgatcaacgtttttatttaactcacccgtttatcaataacctcagcaagagaaaccttgctatgtttcacccagaccaacaaaaagggcaagagaaagggtattacttttcttagctccctcttgtgctctccatcacacaaaaactaagtggcatttattccaactggtcccacactcctcaaatcagattgcccagaaaatcaacaacttgttaaagaacacgacttcaacaagtcaattaaaaccctatagccatcataattgcaaacccttccctacccattccttctttgtacttgcagaaagttcttagctaaggtttaaatgaaataaagggttaatctaaagcttactattgagtctacagatacacacatattgaattaagtatatgtcaaagaaaacggcaccaagctaagccaatgaaagggatctatctccagcaataaagattgaactaacaaaatgagacagcaagttaggtttcgatcccaatcacggtcccctcagccagggtttcccatgaaaaagcaaaatggtccctcgaccattcaattcatctaactaaccccaagggattaagatacaagttatccatgcttcaacaaatccaattcgcctaataaactaaataccacaaacgtcttattttcttagagacaataccaaaaaatggagacagaccaaaaaaaaaacacgattcgccattgtaacaaatttcaatgtctacttaacagaagaaataatttcatagattcgccatgatatatttctacttaacagaagaattaagctaaattaaaagcccaaatctcaggagaaaaagtattcctagaaatttggtgagtaaagtaagagaagagagatatgcacaaagaataaaaaaagtaagagaagagagaaacctcaagtagaaaacagagaggagagaccgccgaagaaagctccggaggttagtcggcgatcggagaagaaagactactactaagagcgagagtgagaaggaggagacaccataatcgcctcaggggaatcggatgagctgctttcgattaatttcatccttccaattttttttcatttttgttccattattccctttcctttttcttactgttttctttttgctttttaaataatttttctcttcgattcttgctttcatgattgggtaacttttttgttacagcgcatgtaaatttcgtgttcttttggcgtaaattttgaagtagattacatgacatcaaataattttgaagtagtttactgcagataaaagttttctaatagtagacaaatattcatttattaattagtatttttcttcttcttcttcttgtagatagaaaaatgatttgatagaaaatgttttgtaacatatctagagcaaatgagattatttttttacctagaaaatctacaagaacggaaaaaaaaatctaagaattatttcatttaagtaaaacggtaacgagttcgtgaaagatgatgagtaacaaaaacttaccaaaactgaatagttaaaggaatgagattgattattgaattttgaggtatgtatgtacgtacttgcaaccaaataagatgatcttatgactaattatgaaactattgaaagaaaatgtcatatgtagttgatttagtactagaagatgcgaaaatcagacgacggtgccggtgagatggaaaccggagaatggaaaagatgaggaggtgttgtcgaaagtggtcatggttccatcaactccgatgtggctcaagtgcttcacgtccgttggaaatcctatctccatctccgcttctctctctttcgtctcctcttcgtaacctggtcatcatatagtattagtatcatcactacataaatgatgaatctattactactgtgaccatgtttcttcgtatgtataaactgaccaattgtcaatgtggaagatgaacaacaatgtacaggtttaaggaaatattgaaaatttctatagttgtgtaaaaaaattctaaaatatttgttattcactggaacatattattgttataggaaattctaaattaacgccaattcacaagtaagaatggttttacagtttttaaaagtgcatgtaagttactgaatgagaaatgaagacatgctataaagacaaattaagttatcaaaaaggctattcagctaattgtccctatagtaaattggaggaacattgagaatccaaaaaagattaataaacacaactttacttactattacgaaatgttgtgatcacaatacgaaaaaaagagagtagaataagggacatacgtatgaaaaagtgcgagaaactcttgaagctgcgaataattctgtagataccatctgagatattagcaccgttgttgttgttctccatctttgtgtaatcctttctaaatgagccctttgcatcactttctactcttccttataaaaaccaaaaaggataaaacgatcattcagaaataaaagacagtacaaaaaggcacatacacgaataaaaaagtgagagaaactcttgaagcctcgaataattttgtagagataccatctaacatattagcaccgtttctgtccatctttgtgtattctttttcaaatgatccattctcatgactttcttctcttccttagaaaaccagatcagagaaaaagactattcagaaagaaaaagagagaagaagcaaggatatagaacaaaagaaatgtgagcaagaaggtactcttgatgagttggtttggtttcttttgttgatgagtagtggccacagcgacgcaagattgcgttgaacaccctaacgaaaaaggcaatatcaataatcgctccatccgatctttcatctctttccctcgaaatgtatgtatttatgtatggatgctacaaatatgttatgcgtgtgtgagtgaatgaaatgatggaaaagtagggattttggtagggtttatattgcaatgtcgtgtatgttttataactttgtaagcaagttagtatcattatctccttgaagaattttgtaattcctaacccaataaaggaatagacagagggagaaagagattatgagtgtcattattgagtatacttggggttgcttttagttggccaacagtgccacttaacctaattgcaagattaaaagattcaagataaatccccacaccttccacttttttctccttacccaataatctccatctttgtattttaatcaataccataattagactaagtagctctgtgagccaccctcccacgacacagagagacatcgttccatctacagtactcagtttaaaacaacttttcatcttttgtgaaatacacacttaggattatccgcaaaattcaagaaccttgctgcaaaagcagcaaaacgataacaaaccgcgctagatcaaaccgacacaaaaattagtgttataacctcgttatgctcctaaccagattataataaattgatagtatgatacttatatgtttctatatctaaccaagattagattatagtccaagagttcatcactcattaagctattctttttcttgaccctggcccctcacttgtaaaagaagttacaactctctgggtattaatcttagaaccaactccaactctacttcagagaaatacgaagggattttcccatcccacctaaaacaaatattaagctttatctaactatcatctgcgtataagtcattttttgatatatccactaattccttcagatgcataagacactgtctaaggagtgtctaacagaagttagtgtagataagtataaataataattaatggtggccttacactgcataatttacatagtcgcaatggagaagatagaaaagagaagacccgtgattctacacacttcaaacctacaagaagtatttcattctttcgtctctcctcattgcattatacacagcttgaacctgtcaaaccaaacaacacaaattctcatcacattaattttcaactcctaactttctcacatcctctctgtaaataaggtttgattctctatgcttcttgtgcctataaacccatatggattttcatatgtgtatgtgtgtgggagagagagggaaggagggaaaagggaaaaacctgctcactagagacgacttggatagggccaatattcaccgacacatattttcctttgcttgataaagtctgctttacacagtcctaaaatggaggaaaaacatatttgcaacattagtaggatactcgtgttctcggtataagaatattgcttgaaagacactacatagaaatatactcttatttgattatttgataaaataaatagttcacatccaaacataacaatatgacagaataaacatttagcagctatactgcagaagacaaagtatagaccaaagcaagagaacaaaagtaaagaaagccaagtagtgcacttgtatacatgttctgtttgtaattatcaagccagtagccaaaatattgtatagaagacactagcaaatatcgtatcaaaaaaagatagtataagccggtaaatcatctagatacttttaagaggacgaaatattacctctggaatttgtcggtcaataacagattcaacagcaacaaccatagcatgcacaaagtcattgccaccagtcccaattgcagtaaaccctctttctgttgggtatgtattgacctggcaagtaaaacaccagctttgagtcagccaatatccatctccttcttaaatttcacatactgaatgcattccaaatcgacaaggggcttcataaataccaacacatagtatttgaacgcaaagtgaacagcaactctactagaaattgaccaaacaagaataaaatatcggaatgggataccttttggtcaagttcgagccaatctttagcagaatcatcagccacagtgcctccaataatcatgttagtagttttcccaaccctcccatcagtctttgacacttctgcatcccaccagcaaaatgaatgaaacaagggaaacaaaagtaccaataaactagcactcgtgaattaacatcatctgtctctttcaccattccagcttaattagtaactctaaaataatctaaattcctagtgaatcactacaagtgtaggaagagttaaattgacacaacggaacagtttttaacttccgactaatggccgggaaatactagtacgtcaatcgaatctaaaaactccgtctcctattcaccaaggatccaagcatccgataatcaaatccatttcggccaaacgaacaaaaccacaaaaatttgagatactaggaagaaattaacgaaggcgcgcacctgagattgccttgagaacagcttcttgaggcggaccttgatcggattgatcgttatggctgcaattaagccgagtagcccgctcgggaacagatgcaaaaccattgaaacatagactctttggcgccgggaacaaaccatggactggaactgatgctggagaaggagggagaaagaagcatctacgtgcgccggaagtccgtcgtgattccgatacgaaaacggaacgcaaaatcgttttgcaagccattttttgaagcttctctttggagatgagtcgaacgaaaaaaagacacaacgctgcgtttggttatttataaaatttctggcgttggcgagggataaggtaaagacagttatgcccataggtttttgtcttctgttaccattcgctttggggttattagagtctttcactaggcccatttgtgcaagcattttaattaaagttagcaagtgaatctaatctaatcattttaatcaaagttagcaagtgaatcgcacacgaaatcatcttaaagcgtgtttagttaagagtatgtattaaagtacgtaacaaaaagtacatagcatatagttgagaatacagaattgttgcaacgggaaattttctcctaccttctttagagtttcacttctcataggttattcttacaggaagtttcagcatctttctgtaaataagaaactcatagacatcgtgcaacacagataagaagaaaccaaaaaccgatatgaagagacaaaacatcctaataataaagtaaacaaataaatttgttggtactatagtcacaaacggttactcttcaacttggtaccaggaaatgtaactaggtgtttcagtgtgcaggcattatttcttacggaatgctcatcactactatggctttaggctttatctggcaggaggtggagggccaagggattttgccatgccaacccaagcaacaatcccacaagcgagaattatccaaccgcatacatcataagtgaattcagtgttcctcttcttcttcttactactctgctgcaaaagcaaggcaatttctcagagcaaccacgaaaacttataacccacatatgatatgagattctttcactctctgcttatgttcttctgaacatgctgctactagataataagaagatgacacttttcaaaacattggacagcatacttaaacacatgataacttacgctaacattagatgaagccattcctcctccacctcctcctcctcctccacctagtatttgctgtcccattccttgattcataaactgcatatgcagttccggggcctattcacatagacagacaaaaacatgagctcaaatgtaaaagaaatacagaagaagaagatggaataaaatgttctctccttgttattataacagcagcaattgtctccatgattaatgttataatttgcgtacacaaagattgactctgaaaatggaatgttgaaataatacctttagtgaggaatccaaggacttgcgatatgtgtcattacctggatcctgaaataatataatagtaagaagttggtctcacagcactcacaacaacataaaagtttcaaattcaaaagcataaaatctgaaaatgcacctcattttctgctctctggaaatattcagtggctttatcaaagtgctcttttgcttcttcaggatcgtgaacataaaacgcgtgggcggtgtacgcgttggcaatacaccaaagagcctgatgcttccctggatttattgtcaaggcctcttccaacttggaaatagcatctacatgatcaataatatttcgttacatttcagagcaaagatgaatttgaggcgtttattttaagacattaaagaagagatcataccatttaacatgagcttagcttcaggaataggctggaactgtgaaagttcaagtaaagctccaccccatttcagcagattctacagaaaataaaaatgttcgcaaaggtattcttaatatgaccacatatcaaaagaaactcaggaaaaaatgtaatttcagagaaacatataatcaatctcataacataaattataatatttccatcgaattcaagacctaaactacacatagtgacaatacattcacgaaatccatctccacaaaacatccttaatattcgttacatatcaggtccgatcatattaatcgaaatgaagcaatttcacaaattctgaggagaggggaggacaagtagaagaaagaaacctcggaatcaagaggatcgttcttgtactgagcctcagaatttttgcgagcatgttcgaacatgataagcctttcaaagtcggcggtagagaactccatcttcagattcaggtgaaagaaaatctagggttcggtgtttttgttactgagaaaagtctaaagagttgtctcgatgtgaaacaagttccgagggttttagcctacaagtcgggtgttaccagcacataattgggctttttaagcctacttatcaagataagtggcccagaaggcccatatgaacaaatagtactttaatacactagttcaactaatgtattcgccgattagggtttcttctgtttcactatatattaagtgtctccaactactgagatctctatcctctccgtcctctgttcttctcattggccgccatggtaaatgcgttacactagactcgtcgttacaacgttttcacttctaacttatgctcctatacttatgttcttcgtcttcttattgtttttcttcaggtgaagtactctcaagagcccgataatatcaccaaatgtaagaacactttcatagtctctgttattttttgcttcaagctacactgttattggcttacctcaagctatgcaatgagtattcattgaaatggtttcgattggttttgcgtttgcagcttgcaaggcgagaggagccgatctcagggtccacttcaaggtaaatttcttgtactgattccggatctcaaaaatgaattagattaagtgattttcctatggggattaagcttgtagtttgaataaaacctgattaacaaaaagcagggttctgttttatataacagacctcacgtaaatgtcaggaaaatcgaattggtcattgtgaatgggtgagccaatgttacttctaatagcatatggttcagtacatgatggtacattttagcttagctctgaatcctttttcaattttcagtattgttgattaggtcatgattgtagtatctgggtttgtatagatgtagtcgttcaataatttgcaatacaccaaatcatttacattaggtttgaggtgctaaatgttactgtgccattaggtaaataatcacactgaacagtattgttgtcattctagtttcattgttgatgatttggatgtgtctaattgtgtttttgaattgaatttgtatgaaacagaacactagagaaacagcgcacgccataaggaagctaccattgaacaaggccaaaaggtacttggaagatgtcatagctcacaagcaagctatccccttcacccgtttctgtcgtggtgttggtcgtaccgctcaggcaaagaacaggcattcgaacggacaaggtcgctggcctgctaaatctgctcaattcgttcttgatcttctcaagaatgctgagagcaatgctgaggttggttttacgactctttttgttttgttgccatggtgattttagttagttactaaaactttttgtaaaccatttggttatcaggtcaaaggtttggatgtcgatgcccttttcatttctcacatccaagtgaaccaagcagcaaaacagaggagaaggacatatcgtgctcatggaagaatcaatcgtatgtcttcttttctattcgactgtttttacaacgtttgtttcttcattcacattgtgctgactctcgatttaattctatcttatgcagcttacatgtcaaacccatgccacattgagttgattttgtcagagaaagaagagcctgtgaagaaagaggtaatttaatgatcccaacgcctctctgaatatcttcaaatacttatatttcatcttcatcactgatctcacataatttttgttgggttcttgcacagccggagacacagttggcagcaaagtcaaagaaaggagcctcatcttaagctataacatagacagtctatttgtgctcacttgtgttacccttaatactttttgttagcttctctctataagaccaatactcaatttttaagtatgatgattatcggtttttggattgctgaaagaatctctctttatccttggtattgatagatgaataactcatagtaaaatcttgaaatatgttttagagatggattagttaagacttgttaaatcgtcgcccagtttgttcataacgctcattaatataatgaccaatacatcgactacacagtctgataaaacggatggattagttttgaactcgagaaagttcgaaatgttatgttacgtaagagcaagtaacactttcattcgtttgtaaaacccaaaacagacccaatcataaatcatcataaacggcccaaaagacggaaggaatcatcgtcactaagtgggcaaacaaaaatggtgaaactgcaaaacacctgcaatttcaattttcaaggaatccgaaatggagagtggtctgatatcagtggatcgatggagaaatggaagtcaagcctacttcttgactcatatacactccgatcacactcgtggcctctccggcggatggtcccaaggtcctctctactgttcccgcaccaccgcctctctatttccctcccgtttcccaggtttcgacctctccttgcttcgcgtcgtccctctcttttcctggacatctctctccctccgctctccttcctccggctccacagtccgcctccatctcatggccatcgatgctcaccactgtcctggtatgataaaagtctaatctatttctatataaggcttcgctttctcagtggtgaaatttgaatttgctggtataatgtggtaggatccataatgtttttgttccggggagatttcggatgttttctctacactggagacttccggtgggattctgatgcatcagacgaagctagaaccactctcgttgctgctattgacgagtttccagtcgacattctctatctggataacacttactgcaatccaatttacagttttccttcccgtctagtcgctgttcaattggttcgacctaaaccctaatccaaaagccttaaaccctgaatcatgtttctctttgttatattcctcatctcctttacttgcaggttgctgatataattgcttctcatccttcacatgatatcatcatagcagttgactctttgggaaaagaagacctccttgttcatgtttcccgcattctcaatatcaaggtttcttatagtaatcctctgcttccttcatcatactccaaatggattaagagttgagtttcttttctttgtatgtcctttagatttgggtttggccagaacgtcttcgtaccatgcatctccttggtttccaagacattttcactactgatacatctcttacaagagtgcgggctgtccctcgttatagttttagtattcagactctcgaggggctgaatacgatgtgcccaactatcggtatcatgccttcaggtctcccatgggtgaaaagacctttcaaaggagatgacaagctctctggttcttttcttactgcaagtatgaagaatgaaaccgtttctgcgaagaaagaattagaagcagctgcagtgcataagttccatgactatatgtactcggtgcactactctgatcattcatgttatgaggagattggagagtttataaaacttgtgaaaccaaagagcatgaaaggaattgtggtgtcatcatcatcgtatgttgaccctctttactactttgggcgtatctgtggagccaaccaaccgccacaagtgctgcttatgaggcctgacatcgcagaggaatttcgagctgttaggattaagtcatattctgcaagtgacaagactagaatgttggcaaaagaaaaaaggtggaagcgagatagtcattcaagtttgaagagaaacaagaagagagcacgtatccaagtaaagtgcgcaaagattttagaggttgattagctctacttgcctctgggtggtgtctcacgttgatgtggcggcttctttttcctcaaggttacaatggtgtctatgtgaatggtctaatacacaatccttttctatgggaggagtaagtaaaatttaagataatatatgaattattcagttgaatagaaagtcactatcttttaaaaagtaagcagttgtttgtttatgcttagttaacaaagtcttgatttttaaattcgaaaacacttggtcaatgtttttgtcttttgtatgttatccaaatgattactcaaaccattttttatagcaatttttgcacattattaaatgatacaatgagtgattaagggaatgagtaagtaacatcgtgacgatggtggtggagtcgtcgtcgtctccgatcatacctggcttgacggatgacgtggcagagctctgtgtctcgaaaatcccgaggtctagctttcagatcacttctcaggtgtgccggcgatggaggtcattcctcaggagccagcattttgcagctgttcgaaagttgaccggaacggtggaggagttcctgtgtgttctaatggaaagcgagtgtggaagagacgtgtactgggaagtttttgacgcctccgggaacaagttaggccagatccctcctgtccctgggcccttgaagcgcggtttcggcgttgcagtgcttgatggcgggaagattgtgttcttcggaggatatacggaggtggaaggctctggcatcaatagcaccactgtctctgcctctgctgatgtttacgagtttgatcctgctaataacaggtctcaatctcaatctctctttcattaattctcatacaatctggtcaaatgtggcattccatgatgattttttttttttttttgaattttgaggaatcaatgaatgaatgagtgagtgaagattctttttaatttttaagtttctgcatgattgttagacaaagcaattcaagaatgaaattcttattcagtttgggattctataactaagaaaagacctaagcttctctgaaaccataattggtattagaactgtccagtttggttgtattctgatactatgtcgaaatatatttgcagctggagaaaacttgcgggaatgaacataccacgttacaactttgcatttgctgaagtgaacggtcttttgtatgtgattagaggctattccacagatacttatagcctttccaacgcggaagtatacaacccgaaaactaaccaatggagtcttatgcattgtccaaatcgccctgtttggcgcggctttgcattcgcattcagttccaaactctacgctgtaggtaggagacaatggaatcatattagattccaaggtacattgggttaaactaagtttgatgatatatttttaggcaatggttcgaggttcatcgacatatatgacccgaaaacgcagacatgggaagagttaaactcggagcaatcagtgtcggtgtattcctacacagttgtgaggaacaaagtgtatttcatggacaggaacatgccgggacgtctgggagtatttgatccagaggagaattcgtggagttcagtgtttgtgcctccgagagaagggggtttctgggtgagactaggagtatggaacaataaggttctactgttttcacgggtttgtggacatgagaccttaatgtacgaccttgataaagagaaaggttccaaatggagagtgtgtgatcagattaaaccatctgcttctcaattggccagcgttctcatcaacttctgatcttctcttttaacttcattcatctgacgttttggagctgtgagttttgtgtttagccaaaatgtcaccaatttctcaactttgtgaatgattcttgtatttgctgtgtattgctaatctcctgtacatatgtttttgcgatgattttgtatcgctttgcttttgagagatacattttttactatttacattgccattcttaatctaagctctctgttttctgaccgttaaccaaccgtaacagctgtaagccatttctttgtgcttctaaatatggagttatacttatggctttatcacactggtcagatggagtggatgcttaaaataggggtaggcaaggtacaagtaattagacaacattgtaccaaagtgcaaaccaaacaatttatcacctaaaaaacattattatttcatttcgtgtgctcttatgtgatgtaagaaatctgtccgaaaaggacctatacgcctaagtatgagaatctaatctttacatgtaaagattttgtacaaacgaacaaaagctaaaaatcatcagcgcggtggatctcgcccataagaattcgattgctagtgactttgaaaccgagaagagctggatcgatttgcctccctttcttccctttcttcttaccaccgccacctttgcttccttcggttgcatcagttgactctgccgccaccttcttcatgctattactcttcttcaacatctcactaaacgatgccgcctctgacgttgaccctttgtttcctgctgctcctgattcccgtctcacacctcctgttaataaattcgtttacagtctgagtcccattttccatcaataatgcccgaaaaagacaacattccttgagatagatataccttcaattccactataggaacttgctgctgccctgctagctgtgtcagacatacgctcgagtaatccttcatgcgacgaagaagaatgagatgagggaggcctttttaacaaaactgaattctgcccatgtgatggaactaccaacctacaaacaatcgctttaatatttaatccacaggaatgtatgggaggagttcagggtgctttacttatctaatatactggtgctaattgctatttgctaaacatcaaaaatacaaaattacctatccttccttctatcttctccaaccaagttgtcactgtatcggtctgcagcaagagaatatcaggataagccttcataataacaaagtaaaaatcaaccttccaaaccatgaaattagagaaataacaaaaaatcttagaagatgcaattactctgaaagataacataccagagatattgaaagaggactgttgaccaggcgtaccaacaggaagctcctcttgaatcagggagtctaatactgcttgcttgcccattctgtcttgggcatcatatgacatcatccttcccattccctcatttttaggcggcacattgttccaagtattgatgtcattcgcgtctttgttcataccaaacatattactgaaggcttgagtttcattctgagttgaccgcccagcatcgataattccagaaagtaaggaactattatggtgcaatgatcccatattgttcccatatcccggtactctgttgacctgttcatcagaaaatgaacgatccccaaaagcagatgaaacgttttgattaccaccatggtctgaaaggccgccaagcgtttgaatccctggggtaaggcctgaaggaaccatcctgtcataaggatacccacggttcatgtttggtgactcagcagattgatggccaggtctctggtggagcaactccataaaaagctgctttgacttgtcgtctgtagatccacctaccatccatgagttgggatcttcacccagtctcctaatttccgacctcattttatcatgctcagtatccatattagatctacgaaattgagattcggcccagtcaccagctagctgtgtatcggctccagaccagcgtccttccgttggttccaaatgtgaaaaatgtgattcacctaatggtatacggggattctgatgactgaaacccggagtagaatttcccaatctgccagaagattgcatgtgggcagtagcatcccgcaactccagaccctgggagagaccaagaccatttactgcatccagattcagccccgatgctgatctctcaaatggaagaccgtgctccaataattctagtctaagttgttgctgatatgaacggttccgctcaagttgactaaactgatcctcgaagtgtggcctctgctgctgttgatgaaagtctaatggtctaaaccctgcagaagagtgtgaacggtggatcccaggatgagttcttaaaagctgatcactatggtcagatggccacagagggtcaatatgtctctgttcctccaatagtgtattgtgcctcactccatttgccaattgcataagctgctcttgctgcagcagctggtactccaaagaccggattggttcagattgcagttgtccatgttgagattgcatttgtccatattgagattgcttttgtccatactgagattgcatttgtgttgaaaatagctgttcaagtagctccctttggtgaccttcatgtgtaaaccgcccaaaatttcctgcggcgtgttgctcaatgtatggtgcgaaattttgtgacggatggccagaacttttctgcagctcattcagcatctgctgctctaacaacatctgatcaacactgttggatcgagggaagtcatgtgactgcccaaaccttgtatcaggagtctgtccttgtaaaatctgttgaaaatgtaattgtcgagcatgggactgttgctgctcctgtaagagcttctgatgtaactgatgctcttgttccaactgatgctgttgcaactgaatcttctgctgctgttgcaattgaatcttctgctgctgttgcatctgaatcttctgttgttgctgcaactggagagttattaaatgctccagatcttgatcacctatatgtaaatgtgacagcatatcccgattttggaaatgctgttggtgatgttgatttgatggaagctgatccccatggttaaagaagttggattcatgttcaaattgtgacatccggttaccagacaaagcatcgagggatatgttggggtcaatttgagaatttcttcgggaattaatgggacggttttctattgaacaactaggctctcccattgcaccagaagatctgtttggtaacgggttaactggtgtactaccgccctctagctcagaccacaacacaccaaatgggtgcagcttattctcattctgatttcgagtagcagccgtagttacttcaacagggatatcagagtggccagaaaattccattaaagcatcatgcatacttgtagaggattttacagacgatgcataaccagaaactctagctcttcctgggaatacaatttctgatttggagaaaaaaaaattttgattagttatgatgaacacaaaataaattaatatgataatgaaagcagatgaaaccccaagaaagacatatgttctcccacacaaatgcacacagatgacaaaaggttaacagcataacaaaccttcatcctgagcagagaagtccaagaaactttggtcctcggcatgtggtggtcttccataaacttcggactcagactttctctgaaaattatcctgacctgaagggttgttatacacagaaaatgaacgagatatgccagtcaaagaggatgaatcattagattctgctacatgtgcaactgatccaccagcctctgaatttgcttttaaactagtctcttctagctcactcttttggtcactgatatgggcatgtacgctttctgcctttatatatgacatgaccctgcctagatcttgaaaaggagtcccttctggagcacttgccaagcgaacctgtaggtctgtcccaaaaaacccttgttcaaaccatgaaataatgtcagaaccaatgaacggtccctgaattactccttgaggatcaatatacaagaataagaactcctcaggtggcatagccccttctgagtgatccacttcagtatctggttgctgcagcttgcccgtataagcttgctcgaaagacccaacaacggattcgctcccatccaacacagaggacttagtaaaaactgatctaaccgcttcaggacttccatgagaaagctgataaccagctccaccagatccataactttcagaagccactgaattcaatcttgggacgctagaagcagcccccagacctccattatgactaccaagtaatcctacaacaacagttgttcaacttttagacagaatacataggacatgaaaaatgcaagcaaactgataagaatggacgttttatctaaaaaatacatgatacttaagaccaagacccggttacggtttacacccatcatgcacgtaccggaatcattatttttcatggaaccattgtcaccattcataaaccctagcaaagcaccatccacttttgtctcacctgactcaggaatgcggcatttcactgcagtacatacaaaagactaaagtcagagaagcattcgtcatctcatgctaggtggaaagataagaggccaagtaactagagacaagataacatacacagactgtttccacctaaggactcttccccagatgaagtgtaaacttcgctactaatgatccttcccttccatatgccgttaaggtttgcctaatagataaaatttagatactcaggaaaactcagttacaattaaggaacagaaaaattaatgcacacctatggaaaagggaaatgaaaacaagttctcagtggggaccatacctcttcttcggcatcaggtgcaataaaagcaagaggttcaatcagagccacttgcgttatggaggcaacttcatccatttcagtcaaaatcctacctagggaagaatcaggcttctgttttctatacatgtcaagcaacttaccccttggataacgaaacacaggggataaagcactaccagcaccaattaaggaagttgaagaacccctcccaatagtagatgcccttcctcggcccacagtgaaccctaaatttgggccctcggctcgtcctctatcaagtccaaacccaggtgcagcgcgataagaagaaggcccaccagactgggattccatcctatgacgtggcctccatttgtcacgagtgtcagagtcccgttcagaggttgcacggacattgctaaccacagattgactttcactctgaggctcttccttgtccttgttaatatctaccttctcacaacgagcttctttctctttgtcatcaggaccccaccgagatgaccatttgttgtcgcgccggggttcatgtacagcagcacgagaattaacatcattccacctatcagaagcagcagcatttttaatgtcaccagtttctctgcttgagacactgtcaatacgacgctctgtttttcgtcgatcaactttcctagcaccgagtaaaccagtttctctttcctcttcacgccatctgcgactagtttcattctcatgcacaattttcttccagtcctttttgtcttcaggtgcatccaagcgccatgcatccttcggatttgggtcacttggatttcccatgggaacaggagtaggagatcgaacatcctacaacatagcaagaacatcagatgaagaactaagagtaaacaatttacagataaataaaggacttgacactttctacatgtgaagaacaggcatagcatcatctgatacaatgaggtgaatagaagaagacaagaaacgtatatcatctttctagattaagtattaccatcttgtactcgcttgatttcgtgtaaagccactgcggagacaagggaatgctgttatctgaggccaattctgcaaaaacaaggtagtcaataggtgaaggaaatcagagaaatcaaacagatacaaagtcagaaaaccactaatagccaaattagaggcacgaacaaagtcattggttcatctttccagatcccaaagtctagaatcggtaacaaaagaattcaaacatggagttgctaatgcgtctaaagcgggcataacaaggaccatagaggataaaattgatatcgtagccctaatcagcacatactaggtcaaattttgataaatctgtttgatattcatagctgccgcatcctatcgaattcagatccagaatccaaacgattacatttgtttctccgcattcaaatcggtcgagagagaaagaaattcaaaaagagaaacaagaggaggattgagagaagtacctttgagctgatcagaagatttggaaaagatgagatcgtcaggcagatcgaacttcccttcggccatggcaggattgaaacaaccgacttcgagattacgttgaagacggagacggaggagcgaggagcgagcgcagtagaagaagaagaagaagaagaaaagtagagatgagaaaggggttttggagagacttggcggagaaactttttgcaggttttcgataattgcctttggaagagagaaagctatttcgcgtcgagatcgagagtgagtgaaggagcaagaggaaggaaaggctaaggagggctttgcttgtttaacaacaccgatccgactttgcccagttttttgttttttctttcatttttttttttgtcaaccccaggttttcttttatttaatttatcattgtttatttattaatgctatactttctattcaaacatctaatgtattcattttaattttccagtattattttccttttactgttttgttccaatttaaatattttatcaaaagtttcattaaaggtctaatgagtataatagtggtatttttttcactttgatagtatacattgagaaggaatatattaaaagtggtaactgaataaaaaaattatttactgatggtttaaaaatacttgaaacttttcaacaagattattttcacctgttgtttcaacatgtaattacggaggaaaaaaatcacggagaaaacaaaaactttttttcgatcaaccggagaaacaaaaacaaaagagtgcttcaagtgattttcaaaaatgttccacaaacatatccacttgtagccactaaacggccaacataactaaggcacgacaaggataaacgggtgtagccaaaagaactatattgagcaggcgacgaacaaatttcttgatgacaagaataataaaaaaaaaaacaccaatactcaaataccatattttgctttggtgtggaggtgcctcttcttttgcaaaactaataaccaaacacaaggttcaaatattatttttgtaaaatcaggtaacgacagagacttgatctacgagtccttacaaactaggactagcttctcttcggccttacgcatttttcaccgcattgctagagctttttgtgttgctagctcccggcggatttggtgcatctgattcaccacacgcccttagaacagcctcattctgcaagagactctcataactattaaaacaatacttgcgtcgaagaatatataggagggttgggtcttataatatttataaattcctaggtggtatgagctcaaaatcaccacatacatcttggtagatcgacaagctttaccaaaaaatgtataacacactgtgatgcacaagatagcccaaaatagctcgaaaataacacaagcatattgagagatggacaacctttgcatgataccaaacaccaaaccgggaaaaatgaattccaagtgttcctactctgttcctagttccacagaaagatacatagaagcctaaaggccatataccaagaacaaactacacagttggccttgtcctaactcattacatctactcagacctaaggagagcacatcacaatagactgaacaacattttgcaatcgaaactgatgatcttgaaatgaatccatcaatactttcaacacgaaaaatccatcaatacattcaatcctaatctatccttggcgggtaattgtagggaagtgaacgcagataagaggatctagactacgaaaagagaaatgttctctcaaaaacccataaaccctaaaaatggaataggagagtacctgccaaacacgacggaggcgggttttggcattggctttacgagtaggggttagcttgatccgcttccaaagaagaccaccggaatcgtgcttcttcactaattccatcactcgagttccccaaaacgcacccattcctcctcccatggccgcctctctcgttctctctcaagagcaaagatcttagattagttcgagtttttccttcaatcagcccatttagtagactttaggcccatttcatctacgagctttttttgaataaataattttcttttttaataaggattctaatttgattcacaacaaaattaattaccacatgttttcataacttttcaggttattggacattgaaacttacatgattggagttagccaagacaaaaggagtgtacagtattatatgatcaatcgaagagaaaatgtacaacaaacttggtacatgtacctcgagtaaatgtactaatgttatctacaaaaaaaatccactcggaggacttggacttctaatgtttttgaagtgctatagaaaggcaacaacgtatgctctaggtgaaacccaagatatacaaaaagattcctctctttctgactttaccaaggtttcaggtcagcaaccggaccagcagtccagttcagtgccttctcacctgtcttcaagtatatgcttttgtcgtggggtaacttccgagctagcccgttaagtatctgatggaatgcatcccctggttgtgcaggttgagggaaaagcatggctcgtttcatcgaaggatttgcgaggagtctctgttttctgaggatcacttctgttggtattgaggttaggatcgtgtctagttcagggacgtctttttccgcaacaaagactcctatttcttcccaggggatggcgtctgcgaaaggcagtactatgtcgtctgctatgataactggaatgcacccaaacacaactgcttcaactaacctagggctccatggagcccatcctagaggacatagacagaagatggctctctgcatgtcttcgtagtatgttgtcgggtgatctgttgagatgtcaaacaaagggttgttcttgaagttctcccacaccgctgctcttgcacctctatacaaagagagaagttccagtcagcagattctaaaacaatttgatcttagctaaccttatatataacctaacttcctaatgaggaatgcttaattgttatcttaataggtagatcttgatgtatatgtgcttcttttattgtatgatactatagagtttgcagttccattttggttgaaaaatctatgtaagactagagaaaactcatcacttgagagttttacaagtctacaaaatatgtaccttgcataatatccaccttcggggtcgttgttaacatcataaaataaaccgcggaagtagacaaagatagagcgtggaatatctggaggaataaaatgggcctgcatcttctgtggaggtgcaaaaggaggaatagtgatcgagccttcgtccaaacagacatggttcctttgaccaaatgtctgaaccaaagtggcacgctggagtagtggaagtatccctctttcaatggctttttcctcctgtttaatgtcaatcaaatcttcaattcccacacaaatcattggaatattccacaatcttatacaataaactcataaacagattctcagtttccatgtaactaagtactaatgtgatgatacaacagctaattttaagctaatgatcatctatcattgtaagatcacagggtattcttgatgaacagcaaccaccaaagtattcaatgcatataaaaaatagagtttgttcctgaatgcagagataatctacctgataatggaagcaagctccaaagtcatggggcacaacaaagaagtgatcagctccttcagtccgattccaataaggccaatttgatgagattagttgtatcgaacttctcatcatacgcggcgatttaaacggtaatggcaagccggtaggagtgaggtcgcaagtaggataaattggcgtgtaaaaccaatcagcttcatcaggattacgcgttcgaacaggactagataaaaggaacctgtgcataaaaatctcagcagcaaacatgtgtgtaagacatcgaggatccttttgcagtaatttcttgttgtacttgcttggaagctcatatacataaaccttaagctttcccactggatcatcctccaaaacatcaccagcacttcctgcatttcaaaaacacacctttttgagctctcttacacagctgttacatagttcctcaatcaatagcattgacttcttaagcaaatcaaattatatgtctataaaccaaatgctggagaaacgacagatttcaaacttatttgagcgaccctcaaggattaatcaattcaactctacattccaatctgctggagcaagaagaacaagtacctgaaattcgctctgtccgaacattttgtttagcggaagaagcagagaagaagaggaacagaagaatggcggagaggcaagagtggattttcatatctaccggagatgtgtttgaaggtttggatcgcagaaaggaagaaggaagaggaagaatataagggaagagtatcgttgggaggtcatgggcgcagtggttgacgagtttacttcggtattaggttttagggtttattttattcagaaggaagacgtgaatggtgaaaatgaaatagagtgtcgatggaaaacgaaattggagaaatagcttcaagtcacagataagtaagaaattgcttgtgatgtactttttttttccttgaattcaacgaccaaagacggaaactggtgcacatcacaaggcgcgtgctattatgggctgagttaatgtccattgggccttgctaacgtccaacgttgactagttataacttccgtagtaggtcatgatcgttttagagtggccactatcaacaactagttaacgacaacaattttttatatatatgttttatagttgttggtaatacgacaattataggtgacataattcattgattagcgattaatatatttgagatcactgtaaaagaagtactatgattcagtttttgatcgttttatgtcattagcaacgatgaaatgaacattgttatatatctctaaatgtaaccataacattgtggataataatctgttggagtgtgaacactctgaaagattctaaatcatccaattttatgtgaagaaatatgtagaaaaaacaaacaatggatgagttataggtttggttaagacttgaaaagtcattgatcacggcttttgtccattattccgtgtttaaagtaatttacattctcttttaagatctctcagtccaaagacaatgcaaacaataataatttctccacttgtttctcatcgtctctgtcttgctcgtgctgttccttgcaaccgtcttctcaacaaccaccaccgtgctcctccttcgatccgcctctcaaaccaccgttcaaccacctcactccgcctcttctcctccgccggtagaccccaccaccttctatttcccttttaaactttttgtttccttttgaaaaagatattttgcttgcgtggggcaattccgtcaaagcgttaccattcgggataaattggtcattttttcatcactgtgtctctctattgagtctttagggtctctctgtgtttgcaaatctgacgccgagtattttgctaaagcagcagccagtcgggacagtgaaatggcgactgaagatgtgcaagatcccagaatcgctaagattgcctcttccattagagtcatccccgacttccctaaaccaggtctccattttttccatttataccgattaatatcgtctctagtcttgatctgcgttgggatcttaaggttttaatttggatacttggcaggaatcatgtttcaggacataacgacgcttcttctcgacactgaggcctttaaggatactattgctttgtttgttgatagatacaaagataaaggcatatctgttgttgcaggtaacaactcgtatggttctgtttggtactccaatcgattaacagcttgtggatttagtttcttttggcctttttagatactgagtgctttagcttaaactgaaaagttgaaatgaattggtggatgatttttggttctgcctaaattgatgttgtggtaaatgcaggtgttgaagctagaggtttcatttttggccctcctattgcgttggctattggtgccaaatttgttcccatgaggaagcccaagaagctacctggtacatttttatttcttcctctagttgcttgtgattttgacattaagttacatgaaaggtctcaattaggaagttgttagtttaaatggcttcttgctccaagtctacactttatcattatctcgaacattagcaaggtgacttttatcttgcagtgtctttgatcaatatgatgctactcatttgctagatcatttttctttgtggtaacttgcagtaacttaagtggttgttattttttctgttacatatcaatggacttagttgtgtatcttgaccagttacaagaaatgtattaagccatttggaaacttatgagcagtgtcaaataattgtcgcattccttgtttatccatggacgttaatttctaaactgcctctgcatttggttcctttaacagggaaggttatttcggaggagtattcgttggagtatggaacagatacgattgagatgcacgtaggtgcagtagagcctggtgagcgtgctattattattgatgacctcattgccacgggtgggactctcgctgctgcaatccgactacttggtaagtccaagatttgataatgcagcatatgcagttcagttaaacttgactatttctcactcccacaattggttggttttgcagaacgagtaggagtgaagattgttgaatgtgcttgcgtaattgagttaccagagcttaaggtttagcttatttatctctgttttactatctgcttccaatctcttacactgatttgcttataaagagatatgtgggctgcaatggttttgtagggaaaggagaaactaggagagacgtcgctatttgttcttgtaaagtcggctgcttaacaagaaactggaagagaaggttattggatcgagtgttgatgctatttttcatgtatggtgagacattttgcgtgggatttgatccttgttgtttcaacttatcataattggttcagactagaaaatggcatttgaatgtcaggattcgattgcagtttcctattgttccacttaaaatccccgattaataaggtgttatgggttttatttatagaatcaagttgtaatagtagactccaacaggggctaaagtcttggtaacgcaattcttcttttaagtttcgcagcaccttgctcgttacttctcttctcaactcgtaaggacacaaatcacaatgctcgtccatgtcccatgctgatgagtataatttgacaataagcttaggaaggtaacaaatctataaacttaggtaagatcctcgtttgcgtagtaaaaacgaataattacatatttgatttaatctctttttctctctcgtttttgggcaaacattacttctctctttcctcaaaattattacttcatgttgttacgtttccatacagatgtatacaataattattacagtagggtattttgggaatgtttgaaacatgctatagttgaaaacagatataaatgtgggacctaagacaaaaattcaaattatcttaaattaaaaaataaaaataaacaaaaagaaaatcacagcgtggttgctgctggcttgttgcttacattgacatgaacaagacacacagtgcaaaatgacaaagagcccttcatcgatttcgaatcttctctctgagtaaatcaatttcacaaattcgaggtttttggtttttagcttactacactactccaagaagaaaatctcaagttaaagtcatttcctatcaaatctcttttcatggcggctgctattctcgtttctcctgttcgctaaattgcgtcattttcatgtaagcttctttcattttgcttaccaaagctcgttttcactatgctttagcaacaacattattgtagaggttaaaggcagcaaaatctataggttaaggatttcttgtggttaatttctgaaattcatgtttctgtgtgttttcttagtgaagcttattataaaagcggcgtagatctgtgattctactcattgcatttccgcgtttgtgaggagaaagaggagaagatgttgtgtgcttgttcaggcgaacaattccggttcgaggatcagcccggttcgccggaatccctagctacaagagatttctcagctagtggactttcttctcgaaacggaggaggcgattgggattccaaattggaagatattcaagtcgatgaagctgaatcgactttaaaggaagctctctcactcaactatgaggttggttttagttactctgatgcatcaattttttggttttaactggaatcatcctgatgctgagttttgtttttgcttccttatgtgtgttaggaagctagggctttgttggggagacttgaatatcagagaggtaattttgatgcagcacttcaagtgtttaaagggattgacattaaggtcttaactccaaggataatcaaagccattgttgagaaaactcttccttgcaaaccacgctctaaagctgttattgtgcctcccaccacaatgtcaatgcattcagtcagtttacttcttgaagcaatcttacttaaagctagatcacttgaagaacttggctcttacaaaggtatgtatgcatgaatttgaatattacctgtgttgctctccagatttttgcattggaatcgacttacattaccctgctgtctattgttttaccagaggctgcagaagaatgcaaaataatcctggacgtggttgaaaatgcactgccaagcggcatgcctgacggaatcagcggattcgctaaactgcaggatatctttcagaaggccctggaattgcttcctttactatggaaaaaagcggggaatcatcatgaaactattgcttcatatcgccgtgctttatccagaccatggaatttggatccccagaggttagctgttacgcagaaatccttagctttggttttactttacgggagtgttgaggcatgtccaaaagacaacatcgaggaagcaattgtgttgctaatgttacttgtaaagaagatggtggttggggacatacagtgggatccagaactcatggatcatctcacttacgccctttccatgactggacagtttgaagtgttagcgaactatctagagcagactcttccgggtgtttacacccgcggggagagatggtaccttctctccctttgttacagtgctgctgggatcgataaagcggccattaatctattaaagatggccctaggcccatctgaatcaagacaaataccacacattccgttgttattgtttggagcaaagctgtgctctaaagatccaaaacactcaagggacggcataaattttgctcataggctgctcgacttgggaaacagtcagagtgaacatcttttgagccaagcacacaagttccttggtgtatgctatggaaacgctgcaagaagttctaaattagactctgaacgggtttttcttcagaaaaaatctctgttctctttaaatgaagcagcaaagaggggtaaggctgatccggaactagacgttatatttaacctaagcgttgagaatgcagttcaaagaaatgttcaggcggctttggatggtgcggttgagtattctagtatggtgggaggagtttcaactaaaggatggaaacatttagctattgtcctttcagcggagaaacggctcaaggatgctgaatcaatactggacttcaccatggaagaggctggtgacattgaaaagatagagcttctgaggttaaaagctgtgcttcagatggctcaagaacaacctaaaaaggcaatgaagacatgcagcagcttactgggactaattcgagcgcaagagaaatctgaacaatccgaggtacctagtttggatgtcacaatatgaaagaaacatattctgtgaataatcttattctttgtttccagagtctgctacagaaatttgaaacggaagcttggcaagacctggcctctgtctatggaaagctaggttcatggtcagatgcagaaacatgtctcgagaaggcaagatccatgtgctattattctcccagaggctggaatgaaacaggtatggagaaaaggcttcagtcttaagccaactcatcaagttttccacattcataattttccgtgtttataacaagcttcatacatttgcttctatggctaatacaggtttgtgtctagaagctaaatcacttcatgaagaggctttaatatccttcttcctttcgctctcgatcgaaccagatcacgtacctagcattgtttctatagcagaggtcatgatgaaatctggagatgaatcacttccaaccgctaaaagttttctgatgaatgccttaaggttagacccgagaaatcatgatgcatggatgaagctagggcacgttgcaaagaagcaaggcttgtcacagcaagctgcagagttttaccaagctgcatatgaactagaactatccgctccggtacagagtttcatttgacgaataatatgagttgaatagtgcacaattctttttcttttaagcctttttttctttaatatatgatttcggtactactaaacttgcttaagataataacactcgagtattatatattccacattaccattttttatagcgacaaacagattcagatacgggttaaatttcctccagctcttgaaatatgtgtgtagtttaagcacttaacatttgagttctctaagagattctccttctacgatcgcttccagcccaagttgtgaagacaacaacgttaagtagacatttaccaacgaaatttataagttctgtatttcaagagattattaaaccattctactataagaaagaacttgttcttcttaactcatactgtatttcaacagcgtaattatatatatgactaacgacatttacatatttgctatagaggatatatataattacgctaaacactactagaaagggtaacacacatactccaaaacctaatctaaacgttgcagcttgactggcaagtctatctgcggtcagtggttgtgtgaaacctccacgtaaagacataatccttggaatcgcaagcaagtttcgtaacatcgcaaaaggcatgcatgtactcctccttaccgtctcttccccaatctatccttacccagcaagaaaacccattgttctcagtcatcactggaattttggattcacaaaaattgatcatcacttctccacagatcctcttccctctcaccattgaatccagccatgagcactctggctgccccatcatttccttgtaagcggagttcacgagtctgaccctgctgtttgaatcggtgatcactgagggcaagtcatcggattcaacatcctcttcgacctctcttggtgatttcttgctggtttgagacgttggagatgggttggttagtgggtttatgtaggctacgttgatctttgagcaaaccggccttatgggctgcggtgatatgactctgcttgtggttgcggttgtggttgtggtgatgggtccttgtagttgcgtcaagaagtctctctcctgtatcacttccgcggtcttgttcagatcaatgacaccttttcctttgatctctggctccatgcatttggaggaaggaggagagcattggagaagaggcaaagtcaccaaagtagaagagacaccattctcaaaaccgtagccaacttgaggtaggttaggtaacctatgatgagtgaaagcctgaaacgacagtgttttaataggtccaagaacacgttgtgtagaaatagtagaagtactagaagaaccgcatgacgactttggtctcttcatagcaagagaagagggacccatcccgcctcggcctcgcttgcgggttcttgtaggtcgcgcttgaagctgaggccagaggttacgaaggtaaggagattggctgattttgtgagacatagaggaagaaggatcatcgtcgttcactcgaggcgtcccgggctttggtgcaatgggtctgtatttagacaagatctcagctgttttaagagttgtggtttgagaatggtgtgagtgggggttgagtatctttatcatgacgtcaagaatgataaaaaaaaaaaactcaaagaagaagaagaagatatggatggtgagagatcaaagagagtgatgaggtagggaaggttataagaagtgtgaagggccaataagagagaggcgaatattaaggaagaaggacatttggggggagaaggatgggtacgtgttagtgagggttggggatagggacacgtgtgagaaaatgagttaatgtgccgtttttacaagaagagatgtggttcggttcaccaatcacagaggatgtcaccgcaacgcgtgttgttgctgggcgtcatgcgtgcctacacctatccactctcttctttttcttcagtttttgttttgaaaccacatgcaatgtacttaaaacaaatattcgaggtttgtttgaaatatagtaaaaagcttcaaattatttattaatgttttagtgttaggcgttattggcgtcaaaactttgcttgttcgagatagttagaagaggtgtgggtaagtgattggtaggttagggagtaacacgaggcagttgcagcgtctgtctgcttcatgcaacggtgggagagaagaagagacacgtggtgtttttttagttgacgtctggggtcttcttttctcgtacgtgtcttgattttgtcatccttttttcttaaaatcctgacttcgccgtttaacatcctctatttggtcgacacacacacagtacagttactattctctctctctcgcctccagatttacgctttcgagggtttgccaactcttttttacttttctctcattctgatttcagggaaaaagaagtattctaatcattataaaaaaaaagtaatgctccacgttaaagattttacattatatagaacacgagattttgttaaaactattttgttccatattcacaaaatttaaagactgtcatacttttttttggtaaaggattttaagacttgtcatatacaagtataaaactaatggatgagaaagagagttatttgggttctacggtcgaaatcgtgcaaaaatgaccatatcgaagttaaacacaatggattgactcataaaaatgaagagaacacaaacggcaaaaacaaaaagaagttcttaatatagtataaatctaggtatgagctatacaaagctcaatatccactattgtattgaaaacaaagaaaagaaacaaaactcatttaaggctcttacaaaattttaggcatacatatggaaggaaacatacttcctcacaacttggccgattcatcctctgacactcttcaacatttctattcttagttccttactaagcagggcctcaagaaacaaaatggagcttctttagcttcttcccttgcttatgtcccgaatatatgtctgtgaactggttgtgtatccaaattcttgataacctccatccatggtttctctataaccaagattgcactttttgatagatgtcgtaaatatagaactgggtgctttgaggttaccatttcaaacttctttctcttattactcttactctctttttgatactcctctaacctacgtttttgagcaccattccccaatttcatactaatgcttgcaagtttaccttctagcttttcggacagattgcatggtgtatccgtgtcttcgtcttgttccgccggcttcccaaattcaatcaaacacttagctctgctatgcaaccaaagatacaagtattattatcacaagggttttttcatttagtgaaaattttgaaaaccaataaagtacctggagctgtaaatgatgacagatgatgaacatggtgatggagagaatgagagtcctacgacctcaccaggaaaattttggtagctctttggcagacaaaaagtctgcagcaatgaccacttgctcaactctctagcctccacatccaatgcaaagacctggtttgaagaggtggagatcacaatcacattgttgtccctcggatgaaaaccagcggctgcaacagatgcaccatcaagccttgatatgaaccaatgctgcctgtaatcagaattagagcctgaatgagaaaaatatacaagcaggtgcttaaatatatgcaagccaaacttgtattttctcagcacatattatttactgggaacaagtctaaacaaataattctacgatgagaggggtcacaaaatgttcacctctgcgtttccaggttgaacacatatatgtccccaaagcaattgatagcagctaaccaatcatcatttgagctagtatacagttttgtaattggaggctcatgaggaggagattcaccttcctgtccctcctggcgtggtgtaaaagaatgtaataactccatgctaccaacgtcaacaatctgccaacagataaagttcagatgtttgacaaggtcaagcaagtaaacaaaaatttagtcattagcaaaaaattggcacatacatatatcctcctatcatgtccagctattatcagccgagagcagtcacagctgaaaaccatggaatgggcaaacggaagattaggaagtcgctttctattagcactccatggattctttccaattttatttttcttcaactcaaacagacttgggcgaacttgatcagaataagcaaaaagtgatcctgtgttagaaattgcactgcatatgatcttccgagcatctttacttttaacacgaaccaatggcttagtggagacacgcccactagaatcattgcttatgtgaatacgaagaatatctaaagaacaagaatcctgaaccaagagaagagaagtctgattgaacactgtattatgtaccatctgcatgggcactctctgaggcgcaggacatatatcatgtggagggaacttagtaaactcttgaaccgagtatgcataaagcttggcatcatcaccagctgaaatgagcatcggaacccccaaatgtgcccatttatggtaactgaaaccagccggctccttcctgcgctgtttaggacttgttacttttgcattcctatctggaatggaacctgcaaaaggtgggagcataagaataatttaaaaaaaaaaaaagactaggtagcttctagatacaaaacattgatcccatatgcattcggatacacatcatggcccaagccaaaatcagtgctacggtttctcgtgataagttctaagtagtttgatagaattaggttactggttttacatcggatttatatttgtagtcgaatgagggcttcttatgattttattatattgaaccctctgggtattctctgtgtttgtgatcctttaactctaaacacattcaatcttgaatcttaattatcaaccatacaggaaaatctgaatatagctcaagaagccactgaccttcccaacttattggcactgcaacagttagagccctgatatcatgtgtatgagcccttacacaaccgatataatcccacttctgagcagaagaaggtttaaaatcttgtgatctagatgtaccaccagagagcttatataaaataacctacaaaagcatgaacggagaattagaaagttgtcacaataacagccaaacaacatatataatgttatgtcaatgcagaaaggtttctttttaatcttacgagaccttaaaatcggtaatagtaattgtttctactttatataagtcccatttctcgtccatggggaagaacctgtctttattatataccaattattaactgggattcacatgagtaaacacactagcagtatcatttacctgtccatcagcgcctgcagaaaacacccggttatgacttggggatgctgcaagagcattgacatcacccttgtgattagaatgcgcctgcaaaagggttccatgctggctatcccaaaactggacacttcctgtactatctccactgacaagaactccatatctaaaataggatgtacataatcagtaataggaaaggtaaacataaactaacatatgagcacggtaatttttacctcaatgaaagaagtgaccagatgcagagctcagacccatttcccagtcctccaagtccaactgttattctatatacctcatggcatagattagcatcccagcatcttatcagcctacaaatattgttggaaaaacaaaaaaaaaaattaaaactttagccaaatcaaagaacatccaggggtcttcttgcacaccaaaaatgcatctctaaggaaagtaaataataatattgcatatcatacaaagtaaaataaattatcctcacccatcgctactgcctgaaaagatcctctgtgcgtccgcactccacgtcacacttaaagcacgacctatgaaaataatgttccataaagctctaagtaaatacaataatgaaagatcaaaacgatgcaaaggggagtaaagagttctcaccagtgaccctaggcaaagatctatagtacgttaacttgtcagattcagagatataatatatcctcacacagccatcatcacaagcagctgcaagatgcctatccaaggcctccactttctcatcaagctcgtccaactctgaatcatcttcaactccactttcttcctcgtcgtctgatttctcactcaagtatccattctgaatcagcttagcttctttactttctgcttcaatagagataggggccagagctatttgccagattgaaaacccaattgaatctaggacgacctgaacaattagataccatacgagcaaattagcgaatgaacttattttggaagtaactagaatcatttacaagaagctaaaaacttttattcaatgaaattcaccttctgcttcaagtcgaaaagatcccactctgaaattgagccatcaatgctcgaagaaaacaatctagcggaagaagaacctttagaaccagtaccaaaccacgcaaggtgcgagattctcgattttggatctccatgaatgatctagactcaaaagaaagtgaacaataaaactcaaatcagttaccacgaatataaccgactcaaaatgttcaaaattggaagagagaaaacaaaagcacgtacgagctgacagtgccaagaggaagcaccgggagagacgagccagagctcaagagaaccatcctcacgagctgcggcgacctgagaaccgtcggcgctggtggccagagctaccaccggagatggcttccaatcgatggagctgcaccggtactcaaacatggtggcgacggagaaagagaaagagatgagagacgacgaagcaaattgcgtttttaggtttttcaaagggttttgacttttttttagttaggagcgcagtttaaaatcggtcgggtcgacccgacccattgggccataaatctggtttcaagttaaatacgttgtataatgccacgtaggcaaatacaaaataagaaggaaatacaaaataaatatttgtagagcctctagatgattacgcgggttccatatccaccatatactacttatcttaagccttacgttttaagatactactctgtttttcaaattcaatggacctttttcttcaaatctccagctttctgcatagatccatgaccatgagagtctgtttcttagaacgaaaatgaaaaaaatatcttcacattattcggtagtcatagcgatactcgttgtggtgacgatgacctcgatgtgtcaagctgtgggtagcaacgtgtaccctttgattctggttccaggaaacggaggtaaccagctagaggtacggctggacagagaatacaagccaagtagtgtctggtgtagcagctggttatatccgattcataagaagagtggtggatggtttaggctatggttcgatgcagcagtgttattgtctcccttcaccaggtgcttcagcgatcgaatgatgttgtactatgaccctgatttggatgattaccaaaatgctcctggtgtccaaacccgggttcctcatttcggttcgaccaaatcacttctatacctcgaccctcgtctccggttagtactttccaagatatatcattttgggacatttgcataatgaacaaaatagacataaatttgggggattattgttatatcaatatccatttatatgctagtcggtaatgtgagtgttatgttagtatagttaatgtgagtgttatgtgattttccattttaaatgaagctagaaagttgtcgtttaataatgttgctatgtcatgagaattataaggacactatgtaaatgtagcttaataataaggtttgatttgcagagatgccacatcttacatggaacatttggtgaaagctctagagaaaaaatgcgggtatgttaacgaccaaaccatcctaggagctccatatgatttcaggtacggcctggctgcttcgggccacccgtcccgtgtagcctcacagttcctacaagacctcaaacaattggtggaaaaaactagcagcgagaacgaaggaaagccagtgatactcctctcccatagcctaggaggacttttcgtcctccatttcctcaaccgtaccaccccttcatggcgccgcaagtacatcaaacactttgttgcactcgctgcgccatggggtgggacgatctctcagatgaagacatttgcttctggcaacacactcggtgtccctttagttaaccctttgctggtcagacggcatcagaggacctccgagagtaaccaatggctacttccatctaccaaagtgtttcacgacagaactaaaccgcttgtcgtaactccccaggttaactacacagcttacgagatggatcggttttttgcagacattggattctcacaaggagttgtgccttacaagacaagagtgttgcctttaacagaggagctgatgactccgggagtgccagtcacttgcatatatgggagaggagttgatacaccggaggttttgatgtatggaaaaggaggattcgataagcaaccagagattaagtatggagatggagatgggacggttaatttggcgagcttagcagctttgaaagtcgatagcttgaacaccgtagagattgatggagtttcgcatacatctatacttaaagacgagatcgcacttaaagagattatgaagcagatttcaattattaattatgaattagccaatgttaatgccgtcaatgaatgagagcagtcaactatttcaccatttttagttgtacattttaagataaagagataatttacatatatttcacggtttgttttaggcactccttatagaagaaaaaaagaattaaaaaccaaatgaaattacttatttggaaaaactaaagatagttgaagacatatggatcggaacccgtaaatttgacaagtcctcggtcacaagtcatgtgcgtggtgcaagaagtgtaccttgttggatttgtacgaaacttggaacataattcataagaaacgagcaagattgtccgagtgtaagatctccacgacgttgatccacttgtacgtgtttattttctcccacgaagtaaatggtattgatggaatccgagcgccacttgcaacacactacaactttattctgttcgtcggccaagaaactgatcatgaagagcatgttgttgacgattcaccctcaagactttgtattgcttgcaggaggatttgttgtggtaaccgagagcctaaaagtcggactcactgtacctgtatctaggtttaacccacttggtttcccctgaacatggattccaaaccgcgagtcctttgtacttggtggtgcatagcaaaaaaccatcgcagtgaaagatgtcacgtatatcgacttcgacttgagatgaagatttagtaaagggaattttaaggtagacctgagcagatggaggaactcgatggaaattggtcctcagtaagtaaaccctagaatcaatcaacgtgataatagagactcctttggtgcattagcaaagctaccagtttcaatatacccttccattgtttcggtgttgatttccatcgtgccaaagatttagccggaactctagagagtatctcttcttgcaaatccaccggaagactccactccatcgcaagccagccctatctatacaagaaagaaagacctaatacctaattatatctaggtttattgtttactagaagttgtccacgcgatgtgtggattatatattcggttttagttttgaatatagaataatatttatattaaattatatataaaacttatctataattgttaatatatcgctcaaaataattaattatagcaattttgatgtttacaagatgttttttacaaagacattttagttgattaaaagttatgcactcaattttaaattttttttttgtgaaacaatatgtttttcttccaaaaaaataaacataaattattcagtatttgtttttgtaaaaatgcaaatgcacgtattaccaattttcttgaaagtcaaaacaatagatgaaccttcttcacatttaaaaatttaaagcctatgatttaagataactttcaatgaaaaccctctaacttgactaaagatcttatatgtcggctcaaaaaaaataagtcatataaaatctgataaatatattgaaagacgttaaattatatatatatatatatatatttaaaaattgttaatatatcgctcaaaattaaataaaatttcaattttgatgtttacaaattattatgatgtgttaaaaagacactttagttgattaaaaatgttcaatgcacgaaactgtttttttttttttttttgtgaaaacggtatattttactatataagaacttaaaatattcaagaatgtatttttttttttgtgaaaatgaatatgcatgtattatcaattgtcttgaaagtcaaaaaatagatgaaccttcttcacgtttaaaaatttaaagcctataatttaagataagtttcaatggaaaatctaccaagttaactaaagatctaagaatgtcagttttgaggaaaacaaaagtcatataaaatatgataagtgtactaaaaaaacaaactatatatataatttatctataattattaatagaaaactcgaaagtatttacaaatattaattttgatgtttacaaattgtgatgtctttaaaaaagataatttagtttttaagagttttcaatgcactatagtttattttccgttttttttcgtgaaaaatgtatgtgtttttttttaacttaaaatattctttttttgtgaaaatgcaaatacatgtattaccaattgtcttgaaagtcgaaataataaatgaaccttcttcacatatgaaaatttaaagcatatgatttaagatgtctcttaatggaaaattctcttacttgactaaagatctcagaatatcggttcaaagggaaaattaaatcatataaaatttgataaatatagtgaaagacgtcatgtcactacccaattttcaaatgatcaacaatactttaagtaaatgtaagttaaattagaataaattaaatattctctttaagaacttaaaacaataaaaagaaattgatatttgatattacatatccatataatgcataataaaattaggagtttaaagttaaactatcatattactgagttgtttccttaactttgttttgtatatattgtaagaaaattaagagcaaataaaaaatttgtcaccttgaagatttttttttactggattttccctcaaaagttatattaaaacaattaatacgcagcatgtttaataatacatttgattcatgattttgaattatacaaattaaaatttttcattatggtaatttgctttcaacagtttaagattactgttaaactttttttttatttatcttttattagatatttccatgaatccataacacatgagtttcaatatgggttgaatagaaataaatatttttatttttcattataataaataaaatgtcaaacaattgttattattagatttccaaacagataagccggtgaaataaaattctaattatttttgttttattatttagcataaatatagttttatttatgtttaacttcaaatgatgggaaaaagtagggaaaatatgtctctaagttaaatgttataagcttttataaattgaaaccataatgtttttatataattaatttaatattatataacaattgttattatttatatgtgatgtaatggcaacaataaatgaaaccaaaaacttaggaatcatatatataaaagtaaggtttcactctttccttaatggtccacttggcaatataagtttttttttaaaatttatataaataataaataacttatttaacacacagtttaatataaaactgaaataaaaaaaatatgtatcaactatatttttccactctactttattcaacacacaattaattaaaaattaactccgacaatttatttacaaacctgaaatcataaatatatataaattaattatatttctccacaccattttattcaacacaaaataaattaaaaattaactcccacaatttatttttaaattgtaacttccatcacttctcatcctataaatatatacattctctcattctctcatttcttcatccacttccaccgtatcttaaatattgttttgtttagttttaagtttttttcttgttgttgttatgagtttaaaaaatattattgtaaacacttaattctaaattttaattttagattatgaacattacactgttattattttttgtttaaatacatctcgattatcaattttcattaccatcttataaataatcattctctcatcattttgcactatattcatgtatatatatcttatgttgttatatgggtaaaacacaataaatttaaaagatagaagttgtccttggggtttaaaaaaaaaaacttttatattaaaattcatatgattttataagaaaacaaattagtttgtcacttacaaaataaaatgaattggaactattatgtatgagtttatatcaacaaattattttgtaatttactttatcatacatttattttgtaaaaataagatatgatatatttattaatatatacatgcataaataacatagaaaaataaaaactgttaaaatatgagcaaaagtaagatatcaaattttaacatatttttaattttttattgatacaaaattattttaattaattaaggtttaaaaaaaaaactaaagatgaaaaaatttattataaaattggaggattatatatagtagtgaactattaatgtgcagtcttattggttcctaatttacaaggaattttgatgacttcaattaaatccttgaaaataaagaaatgaaagattttaaacgattgttagagagttttttataatctttttgattagtttttcataatcttgtaaagtttctcaaacaatctctttattttgataatactttccatgacttttcatgacttcattttgtgaagaaaaatgtaggaaatcatgaaccaataacacaataatttaaatcattaacaatcattaacaatcaaagattcttttgttttaattgaataacacaaaacttttaatgactttataaaagtatgaatctaataacccaaaatttatgaagattttagattactttttacaaatcttaaataaataacacaaaattttaacatacttttaaaaaatcttgattgaataacaacagattttacatgacaatttaaatcactaaaactcttttgaaatcatacacgaataacaccccctaaaacataatatcatgtcaaaattttaaagatttgattttgcaattagttaagggagttgcaattatgctagaagaaaatttatttcaaaattatagtttaatatgtagtaatttcaaagtttaatgactatttttctaaatatttaatatatctattaataaattattttagtcaaactacaattaatgataagtacatgtgtcataaaagtagagtgccaaatgtcgctttagtaggcaaagttaaaaaaaaccttctcttattatataagattttttataaaaaaattgagccaagacagttatgacaaatatctttaaaaaaataaagtttccataaagaaaattccctactgtactaatcatcgatccagtaagcaaatatatcaaagattatttacattagcatatatgcaccctcaagaacactccatgaacactttagtaaagccattgtgcatgtattcatatttacagcatgagatgtgattcgaagttgcaatgaagaaaagtggaggaagacgataaatatgcccttgttctacctagttcatcactcttgattgttatctggtaatttcgtggctgtttggtgcttaacgaatgtcaaactacagtgaataattgtaatgctgttgttgaccagataaacatgaattttaaagttgtctaaaagtggtaatgatcttctcattcaataaattaaaacaaatctgtgagagcctgttaattcaagtacaccggattaagacaatgaaaggaaaacacttccacaaacataatcacaaaaaacaaaaatatcgtattcacatttctataaaataataagaaaatgtaacatattgttaacgaagagctgaagaagaagtgagatcggaatcaattagagtcttgagggatttagctttccttcctgtaacgttaccagcttctttcaagagttgggccagcctcctcttctcgtcttccgttacaggattcgctgtcccgagcttttcctcccgaaccccaaccacatgtcctagcagcttaatcgcatcatccaacctataaccacaaacttgtttgaggtctgtaggaggatgtaaaaaaagataaattaacatgcacaagtacatacctgccaattgcatcataagctcctgcaaggttactgtacaatccaagtgtttccgggtgataaggaccacactcttgttctaaaatacacttggcttcttcaaacaactcaacagcctcttctattgcatcgagctgaatgcatgctaaacccatttggttaagtgcaatcccgaaaaacgttgattgtttctttccagtcgcccgtagttttgagatagcgctcttaaatgtgttgtacgactccatgtatttccccatcatatagtacaacactcccatttgagcttcaatccctgcaatcatgattttctggccaggagaatccgcgtatatcttcagcgccttttgtagcaaggtaatagcttgttccacctcgttcatagactcgcatatcacggagatatctgtaagaccacttgcaatctcttcaggagaaatctctaggttatgagactcgtatatccgaagagcattttcacaataagactttgcttcacgcacttttcctgtccgattatagagatcagctaaacggatataaactgaaccaacagctggatggttctctccctttgctgtcttcagtgctgtgagagatttctggtatgcacaaatcgcttcatcgaaccgagacaaagacaagtacgagtcaccaatgctagtatcaacaaaagcaacctcagactcttgtccatttgctgccatggccatactggctaataccaaatgctcaagggcattctcatgatctcccttagtctcacatataagccccatgagtcttctatccgcggcctctgcgattgaacctggtaaaccgctttctctatgtatagaaagagccgtttcgcagacctgttgagcctcatcaaaccgtaatgcttgtacaagagcttctgctaggtatctgcatgtttcaccaactcttgggtcattttctcccaaaaccttcttctggatattcaatccctcggtataacacgatatcgagctctctagctgccccaccatagcgtaagtgtcacctaactgcatcagaccagcaaatttagctagagcatgctcttcaccttcttcaacaacaggaatctcaacagagcgctgtagaaccggaattgcctcattgtactcttttaacttacaatggactgctgctgtaacatgcaaacacatgatccattccaaacatggtttcccattctctgcagaagcctcaaacaacttagctgctcgatgagttaactcgagagctttgtgtgtactgtcaccagaactaaccaagtttctcgcttggttcagtaaaaaacgtgccagctctacattttcagatgatggttcttcatttccattttgtaacttggtacctccgactttcttcttcctcattccaccgactccaacgttcgatttagtcacattcttcttaccagtttgtttctccatatccctgggcatgacttccaaatccaagtttgaagaatttgacttgacatcaaactcttctggctttgccacttcgtcctcatctccttcatcttccaagatatcaatatctcgcatctctcccaaagcaagatgttgtagatcagaatcaatctttgactcatcaccatatgatccaaaactctgccttgaaggagattgattagaactctgcaattcgcagagattcttacataactcttctatagttgtgtcaaacatttggtccgcattagaatgcgattcattaacagaccctccttccattttctttatttcgaataaacagctatctgcacacaaccataacccatatatcatcaatggagctaaagaacacaaaaacggatgcgcaatttcggagaaggctcgattaaaccgaaatcgaaataaaggcaaatacttgaagcaagcccacaaattaaaacatctatagaattgaatacaggaagaatgcattgcagcccttatcattatccaaatacaccaatcgctcatataatcttttttcagacctttcattaggacactttagccgttgtaagacaaaacacgagaggacaatcaacacctatgtatcagaaaaatagcgaaaaggaaatcgaaaggggacaaaagagagaaaacatagagacaaaatctaaccttgtttgggattgtgtcggaatcgaaatccgcggaaagagacaagaacaagggaaatctaagagaagtctaattgtagaaatgacaagaccagaaatgggtcggagggtgagagagagagagttgaaatttcaacttctttctttttttttctcggtggaatgtcaaagagagaggagaaggaggaaggaggagcgggaagagagagaaatgaaaaagttattcttctaatgccgccattgcgctgtctcacgggaacacaaaactgcatttattgctattttactttaccaattccagctaattttggaactgatttttagttttaacaatatgagaaacatgtagattttttcctctccctattgatttgcagaagctttagaaaacttacatggcctgttccgattttcaatgccaatggtgatatatggacgacactaaacacaaaccttaaatcggttttgattatatatttctataactcacctttagccaaacgtaacttttactcttactagcatagttagccaatgactaggaatctatgatagtatatatatacttgacccctgttttcatgtcgtaggggtgttcattatgtatttgatcaaacatatcttaatagaacccaaaaacaaaccgatgtaacaccaaacgggaaaaaaaaacaaatttaaattcaactgaaaattaaagaccaacccataattgacaaatccatagtatatttcgattgaaattggtgaccatattctctactctacaaccaaaatatctaaaaaaagaaaactaaatcaaaagttcttatattctaaacactctcaaggtgattttgctttataattgttagagtgtaaggaacaaagccaaggagtagtatatagttacaacaaaacgacggtgtattggtcactcaggcagtctcagacggttgaaaaggaccaagaaactctgctcagggccaatatatagaaatccaagatctgcgcccttcacatatggtcccattccctattcagaaaacctcatccattaaaaccgaaaagacgaagaaatgatggtcggctcttttgtgtttctatgtattacctttccattgagttttaagagcttgccctcgacccatcttggctttttaaacccaaagtcagcgatttttccttgccctctgtaactcgcaagctgcatatatgtaaacaacttctggataagctgttcattcaaatgtcaatgtggctggaacccatgaaatgtctaagcaattgtttcaataggagattagattgtttttaatctttttctggtaaagtgtttagcttaagcttatggttcttgatcttttattgatttacatgtctgagcatgcttatgttttgggtctgttttttaaactgaagctcaggagatgaggaaagttatcattaccactcccaattcctctggaaacaatccatgattcgtcatgcgactcccattcccaatccttgcacggaatgtcacctaccaacaatttgtgaccctatcttagattgttcacctcatacaaaaatgtcatgatttgaatacaattaaaaaaaagataataacctggccagccggcacatttggatcccctgtcaactttacagcctcaacatattcaaagaactctatatctgaggagttacttccttctgcatcatcccaccgaccatacttacgcttaagttgcactatctcggtgccataaggcccgaatgcacccacatatagacctgcacttagaattc

SEQ ID NO: 62 - DNA, 65839 bp, Arabidopsis thaliana
taaaaaaaagataataacctggccagccggcacatttggatcccctgtcaactttacagcctcaacatattcaaagaactctatatctgaggagttacttccttctgcatcatcccaccgaccatacttacgcttaagttgcactatctcggtgccataaggcccgaatgcacccacatatagacctgcacttagaattcagaacatatttcaagttgagttgtacaaaaacattctgagtccaaatcaaaagaaagagaataacactaatgcacaacatgcttaccatcaaaagggtctaagttgctttcaggagttatgattctattaaatgctgtatactcggagagatggtttcctttttgtgcctggtttatagcaagcttgacaatctcatgcacatgtttcgatacctagaacaataatcaaacaacctttatatctaaaaacattaacacgacaacgtaaaagaggttttaaataataacaaactcctagatctgattctagaggttaactttataaaaagcggtgtaaattcaagtaatataccttcaaagaagctttctctccccagaacgcctcggcaacctctggtggcaacagatctgaaagtccttgagctgcaagagctgttacttgttctttggacactctatttttccttgtatcgatatccctcttacttctcccaggaacatgcaatataaaggaatctctttcagtatccattatatttgccgacacacggacaatctcatcatctatagaggaatcctctatgttatgtagaacccctccgatgacaagcttagtgtttgaatgctttccataatctgcactatccatagatgagattgcttcaatactgtcattttcttcttcttctacttcttcttcatcatcagaagaatttgtttcctcagtgccttctccaaccagctcttcagtagcgtcatcactgccaacaatctcttcctcagggattttaataacatccattactttcagttttagccctgggattttatcttttagaaattttatcacatttttaattccttcttcagttggttccccagcatttagttgtgtatcttcttttttatccaccttcagttcacttcctcgtacatctaaaatggatgggtcattgatcgaggatttcgaggattgctgtacttttgaaaaggaattctcggaaatggttaggttttgcttcacgtgttgcacatacaccacctaaacacagcagataggtacatatcacttcaaaagggttaatcagtgattatcgaaacttcagagaagtttagagcagcaattatgaaacactaatcttatacaataatacaagatacaggtaaaaggatatactgtcaccagaactgttacttaattaaatgtgattttctcaaattacctgcataacatatcctccgtcagtgtctttaataacgaaaatctcaaacaggggtgttccagctgcttcagccaccagctgtctgtaagaaacagtaatgagattcaattatcaccagcaactgagaaaagatttaaatcctcagcataacctgctctcaccttggactgtaactcttgccaataaacctaccaacacctggagttatgtgtacaattctgccaaatggttcctcagaatctcgaggtaaaccaacccaccaacccacctatataaacatcagaaacgtgacaaatgcattgaaattctaaaacaatcatcgtctagataaaagcatagattcttgactagagatttgggtaacactgaaaccatgaagcaatccttgataagttgactaggtgaaaccatcacttatgtcaggaaacatatattacttcaactaaccttaactaccttaatagtttacagacatgtaacctattttcttgattcaaatgtgtaagagtcgtctagtaatatcttacaagctaaacaagaaagaacaaagtataaaggacggtaaacaaaattaccagtccacttcctgtctcgttacataacctggaagcatcatggtaacgctcttcgtttactgcagtctgcaaggaagttaatcatatataagtaagaagataacataagagtttgatgtaataaaaaaacacacatatataaacctgtaactggcgcatgatctcagcgacagcatcatcaacagtagcttctgaaatagcttgtttcaacttgactgcttcttcaaagtcttctttttcaacagcatcctcaagttgagactgttacataagctagaagactccaaatttagaaatctataatcaaccaataatcgaacaaaaaatcatcaatagtagacagagtttagatggatagaaccttgagaagagaaacaacgctctcgacttcttcaatctcggagaagtgacggttccaacgatcccaatcccaatcccacttatcctcactcgaactagtatcagctccatcaacagcggcgcaatttcgcagacagcttaaagatggggctttagggttacaggttgatatagaagaagcgaaggaatgtcgtagaccgatagatacggagaaatttgtgcgtttgttggtcgagagctccggctttagagaatttctggggctgaagaggatgtgaaattgaggaacagcgattatttggccgataagacatggttgagttgtcgccatcggaggacgttatcaccggaatctctcaccgtgctgagaggctttgctttagtttttgacacctcaggacatgtatggatggataggttttaacttttaactttagctagagatggtttaagggcaatttggtaaaatagcaatgcaaaggctgagtttttcttattttcctatgattttttttttttttggttctggtattttcactttttgggaaccaaccaatcaatatcttttaaaattttataatattttctgctctttgactttcgttttttaccaaaagggcaaaatggtaattgaaagaagggaacaaatccccagttagagaagaactgacgttgttctaatcgagagatcagacgcggcggagactggcggagatgatgaattcataaattccttcttctcctttcctctcttttcatttgattggcttcttacacagcttcgtcatcatgtcttgtcctatccatcctaggcgtctcttcctctgcttgcttatttctctcactttcttcgtcgtcgacccttcatcgcagcatatcgaggtcaagaagaaacaaatgcgagagaaagtacgcgagatgtatgtaagcagtgatttttatattaattcttcatgacccaatttgtttagcaactattgaaaacccttcaaatctcgtttttacaggttctatcatgcgtatgacaattacatgacttatgcatttccggttagtgatctactttaagttgttgaattctggctactgggtttggattacactaagttctgaattccaacagcatgatgagctaaagcctctaactaaaagtttcacagactccctcagtgagcttggaaatcttaaggtaactttgtactagctcatatagcatcataaatgattttgaagcagaagcttgacacaaagatttctgattttccagcttgaacacctgccaacagattataatggatcagctgttactcttgttgaatcattatccaggtatgttatgcataagtgaaagcattccctgtgtgttttttcagtacccgtttgacatgattctcctttgtcccagccttgctatattggggaacagtacagaatttgaaaagggggttctctggctctcagaaaatcttactttcgatattgatgcccgggtcaacctttttgaggtaggagtctagttctgtattctgttgaagtttgcttcaagagtggatgtgtccttgagtactgaaaatgagtttactcgcacttgatgcttctaactggtgctctttttggcttctcatttgtagtgcaatataagagttcttggaggacttatctctgctcatcttcttgcaattgatccaaataataggttgattcagggttcctacaacaatcagcttcttcgattagctgaagaccttggaaaacgttttttacccgcgtttgaaacacctacaggattaccatatgcatggattaatttgaaggtattgaatcgtcacttatgaaatgcacttacttcactgaaatcctggctatctaatgcgaaaaggaacagtcactttgagcacttacttcactgaaatcctggctatctaatgcgaaaaggaacagtcactttgataattttcattcaattcttaaaggtttctatgcttaagtttgagcttgctcttctagttttcttggaaaatggaatatttgaccctgaataatatcttttggcagaatggagtaatggagaatgagacaactgaaacaagcacttcaggatgtggtatgtatcttgttatccctactttcttttacattctagttttccgaatgtgctcatgaatttattgatatgcattttacgctttaggttctctcgttcttgaaatgggagcattgtcacggctcactggtgacccgaggtttgaatcagctgcactacgtgcgcttcgtcagctatggaggatgcgaagttcgttagatctgcttgggacaacattggatgtggtaactggggaatggatagagtactcctctagcattggagctggtatattgttcattcagagggattctagtggcagttcttgttccgaagagatagcaaaataattttacttatatgtgtggaattaacttgtgccttagattgatgtagctctgatgtgtaatttcatttctggtcttttaaaggggttgactctttctatgaatacctcttgaaggcttatattctttttggaaaagaagactactggcgaatgtttcattctgcttatctggcatctcagaagtacttcagacatgggccttggtaatatactagcctgaaaaaatgtacttccgcaatctctgttatgacacttaagacttctattgggcaaaatctgaaaattgctaatgagtttatctacctggtttaggtaccatgaagctaatatgtggagtggaaaaccaacttactggcagctcacaagtcttcaggcgttttggcctggtctgcaggtataatgaatgaatggattacttaaatgtcatagaaagaacagtcgaaaagggtatcttctcattgtcattcttaagttcttgcttctaggttcttgttggagatattgcagctgcaaattcatcgcatcgtgagtttttccatgtatgggaaaagtttggtgtattacctgagaggtatgtattcacttgtcttttctttgcgggcttcctacatcgatcttgagttagtcatttttcaagtttgttgtttgcgctgaagtacattgaacaaatctttgttcaggtatctactcgatcatcaaataatacatccgacaatgaagtactatccactacgtcctgaattagcagaatccacgttctacctttaccaagctacaaaaggtttttatttttgtctcttttttagttgtctcaccctgaatgtttattatgtgaagcaccaaatttgaggcatacctccgctgactatagaaatctatttcattcctttggtccttttgcagatccatggtatctagatgttggtgaatcaatggtaaaatctcttaatctctacacaaaggtgccagggggatttgcaagtgttagagatgtgacgaccatgcaattggaagatcatcagcacagtttctttctcgctgaaacgtgcgttcactttcttacacgctattcttttcttacctatacaatgcagaacatcacattggtagttatctcactttcttcgtaggtgcaagtacctatatctcctcttcgatgactcatttgtggccaaaaggaattatatatttacaaccgagggccatcctatacaggttgtgagctcctggcatgagaaactaccagaaacttatttctcaggcaactggaccctttcaaaggtccgtccattgttccagctctgatcattttggaagatatattacttgtatgcatggttacactgtatactcagtgtgcctagcaatgctattttcagttgatagacagaaggacaggcatttaaagatttaatgcattattagttctttctctgctgctgctaaactagctacttaaaaatttgtagagtggagcatgggaaagtcgagctagcgcattgtcactacaagtctgtccactgatatctcttaactctagacatcctgagcaacaaagagagagtgcttgccatgttcttgacgagcaaatcaatcataagtgttggagcaacaaagagtgcggagttgatgccactacttgtagactaagaacctgcagcggggttggatactgcggcttatggaatcccttataacttttgacacaaaacagtggggtcttgggttttaataaaggaaagagaagaggtggagtttacgaactgaaactgtaaattaatgcgaaatgacaagttttggtagacagaaaatggatagttgttgcatgaggctgttgtatctttttctttgattcatcagtcctgacatggatatatagttatatactatgggaggatcaacctcgatcaaaggaatattatgtttttcttgtttttttcttgacgtatagctttatgcctttatcaaatggtaattctaggaccttaacagattaacatttagtttcaccatcgatcatgcaaaagcaaaacatctcttgatgcagatgttagcaacggtatatggtctcttagcctaaatgcttctatgactcatatatgctatcttcctttccggctcagtgagctgttatcaagtaagaccgcctgcaaaaccagtcattgatttcaacagctctaaagtagttgaacaccaattattctcaagttgtgttcatataaaaacattgcaatagcttaaatctttattgggtttcatgtaagtgtatttatagggtagacgcatccacctcagtcatttctgagttcagctattactgataaacacctcaacatttctgagattgatagaaaggttacatagatttaagattccgcagatgtggctgcgtcatctttgtgcttaatcgcgccggagtccacaagaattggaatctctgcagctaaccacggagcgagccccaaacaaagtgcatgtgctataccaaaccgaggactgcataaacataattcatccatcaatgcaaagaaaacgagtttgctgtgctcatattcatgatagaaatggattgcataagttgttcaatccaacctcagtgtatatataacaaggtaaaaatgaaaacatacaaaattaagttgacctgcacaacctgtccctagcacaacaaacagcttagcactagagtttcccggcctaattgaatcatcacacacaagaagatcgacaacaaaccaagctaatttcatctttttcacaattcctctaaaaatcgagactaaactgatctaaaacactgcatgctcctcttacaatatctatgcaaccagagaaagcttagtactagaattttccagcttaattgaatcatcgtacacaagaagatccacaacaaaccaatctaattaacatctttctttcagaattcctctaaaaatctgagagtaaactgatctaaaacactggatgcttctctaacaatgtctatgcaagcagaaagcatataaatttaccagtttttggcccatagaggcttgaaatgcacagtcaaacatatcttcccacctcgatacatctacacacaacaaaaaaaaaaacatcaacgacaaatccaattgagtagaaaccacctaaaatcgaaaaaacagaaagcccttaccttttgagtcttgccgtcaatctcaggcagctcaagctcaggagcagtggctggataggtaatcgggatatcgaactggagatcgaattcgtatttgagaaggttgtgaacataccaacacttgccagtccaacgcgtgccctcaggattggaagcggagatacggaaccagtcattgtcgttggacttgttcatttgggtatacgcaatcagagacttgtactcctctttcagcctctgcgtccatgccgcgccgtctcttggacccgcctttgtcgtcagaagcggtattcgcgttaacgtcgacttcgtgttcggatcccatccttccattttcttcgccttccgatttgggtgtgtggattctaaaccctatttgtcgatcggaatcggatgcttgattctgattcctcctcttttagctattttcagttgtcaccattgtaaccgaaacaaacaatcaaaccgtattggatcatgcgatttggtttgatgttggttcatttggttcaaattgcttaaaaaccttttggtttagtttgatttgttttggtttgatactttgattacaaaatgtaaaaatctaatgactttttcacattacacgatgtaaacaaaatacaaacaaacaaagatttctgaatacaacatatgttttgcttaaacgtatacaatgtagtaaattttttatttaacaaagtttatttttcaaattagtaagttgtatttcaattaacaaactaaaaatcaaggatattattagtgaaatagaaatcaaggatattattagtgaaattctgatttttaaaaaaatatatatttctaatagacaacaaaactttttctttttttattgatacaatttatatttttacttttgtcatgttgcttaggtagttgagtttaattacataatgtaatactttgctttgatcaatatgatgctatgaatatgatcaagtggtaaagtttcaacttcaagtgaaggtgattgcataacatgaacatgaacatgaatctctaggttttgatatcttattctaaaacacaaagctatatttgaaagcgaatgtcggagaaaaactacatgaattcagtggttatgaacacatcttctaggtgtaagattgagatagaaaactaaggtgtttatttgaaaaattctatgataatgatgaacaatcagttaggaatgagggtattgtttacatcttggatcatccagaagataatcatagatcacagtctcaacaagtttatggcttacctgaagtatcaccaaatgaagatgagagttttgactgaatttgtagagtcaaatggtaccattgagaaacacggtcatggtagaatagcagtggatgaaatacacaaaattgttgtggcagacatccgatttgctaacataaataggaatacaactaatcttttgctacaagaaagtaacaacgggtctgttcacctactgccaagatattatgaacggttcttcttcaatcatcctaaacgacaacaaaaaatatttgattgattcaaattctattttccttttgtcgtattgcttaactaggggagtttaattcaataacaaaatattttgcattgattacattaatcatgaaattatccaaatttgaaagattcgtaactttgtaaatagagattttatatttagttgtttatagatcaataataaataattaagcaatataataattgatggtttggattatcattgttgtatttgttctataaagtaaggacatcaacggtagtggaatatgtaaaaccaaattagatttaacaaatgaactaaattcaaaaacatatttgcataaagatatccaaaaacgttggaccggctctgtacgagatgtgttatttcaatgttcaagaagactttaacatgctttagtgttatttgcttattcttaaatttgcattagtttttgttagagttcgtttctaatatttgtattgcaattaaatattttggtgttgtctttgaggcatgataattgatttttttcatgtagttcgttctagaaaattattattctaactacaaaatctattttaaattataaaatttaaatatcttagaaattaggcaaattttcctcaaattaataattattaatatcttgataaattaattaacttaattaattaacaaaatatctcattccaatattattaatttttagaggttttaatgtacttttattcaagtgtactaccatttgcaaatagattctccaatttgctatttatatatatatttaaatacggcatatgaattatgttatgatcaactatgcactattgttgacggtctagttgtctttgatcaaaatatgtatacacattatgagatctttattactctaatatgtcgctttaactttaccagctagctaatactgtgattgtttaacatataacgaataaacatacattaggttactcaaatgaaaacaaccaacaacaaaatatatgacaagaacgagttgtgaaaaaagagtaagtggaagtgtggaggcacacatgtgtcgtgaactctttgatattgtgttgtctatggactttcacaaactctacatacaaaataaaaaaaacgaagtaagtgaagtaaaatgcttaatcttgtaattaatatcttctaaccagcacaattaatatttgcacacacatgtgatttgggtatgcatgcagccactatttccatggattgattttatatacgataggatacctttacatatgcactaaagcataatcaaagtcagaacgttaattaacaaagctaaactagcaataacaaataagtcggtttaccaaaactaaactgacatcccaacaacatgatcgttgtaaacttgtaatccacaatactctaacatcaattaatgccttaatagacacttagctgtcggacactaaatttatgttatgatcatcaacgtaagtgaactatgaacattttctattttgaaatttatttatacgacaacagagcaaggccgagggagaaaccatggagaaggctagaatcaagaaggaagaaaccactgagcatcgttgaagttgaagttggagagaccgtggaagcgtttgacggtctttgttgcaagattgaagacaccgatgtcgaggcatgacaatttattgtgacagatacgatcatcacgagtgaaataaatggagttaggctcaattccaagggtatggtcagcaggcacggtaatacccaaatcatagaagagggcctcatcacctagagaatgtacctcaagaagccgggtgtcgagggttttcgggtcaagatctttaggatccctcttgtacagatggaacatcctgtgactttcagaggtacctaaatcgtacgtaaagacaaccaaaacttgacctgctcttgtaacagcaatgcctttgttagatgggatagacctcttttgcttcatacgttcacgttccttcattgtcatacttggcatccacattggaagcctatgtttctcggatacatccttgaaaccatcttcatcttgtccagacaaatctaagtgtcgaatgaactcacgggtggcatagacgtaaagattgtaacctttcagtaccatatcgtttaaacctcgtaactccctctgaacctcgagctctgttggaatctcgcggtaatgatcatcccctgtcctgcaaaaccctagaaatgggtacatttcaaactgccacacaacaacgtagtttccattcttgtcgtcaacccacaaacgacctctcagatcttcggcagcatgaggaaattcatcacaaaatggatcctcatcatccattaccatatgcttgacattctcctctccttcacgccaaatcttaaaatggctacccttaaatgattctagtggtggaagatcgatcctcttctcgctaaatacatctataatatagagtttcattcgagaatctaccaccagaaaccacttacctgagcttcccaggaatcgataccctgaaaagtcactcttcggctcgtaaaccctaccatcttctgggttgtaaatacgacaaccatactcttctgcaatcagcatcagcaatggagatccggcttttggctgcagaatcaaagtcgaacgcagagacttaacaggctcaaaatcaggaatactcgatgttcgtttgagcgtagatctagatccggcttttggcagcaaattcaaagtcgaacacccctgaacagcctcaatatctggaaaactcgatgttcgtttgagcgtagatctctccattatctcgtctgttttttttcttttaatgtcgtctttcgataagattgaggaggcgttaagttgcgcatattgaaatggaagacattatagttaggaaccaccaggcccagtaacagcaagaaattatattttaacgggtctatggcccaatatacgacgtccatcacggatcgtttcgttacaaaattttcatttttggttatcattttgattaatattttggttaaaattttgtttgattggactgtatatcaatttattttagtttaaaataattttaaaatataaaacaatatgatacttaattatattttcttgatatttattaacatattctctttttttcctcaattggtttggtttgattacacgatataaaatcctatgactttttaaaaaaaaaaatctgaaacttttttgtttagctagatttattttttaaattagtaacttgtgtttctctcaaaaactaaaaaccttttagcacataaactatcaactttctaacatgtgatttcgtgaagggtttttagtttaaaaattgcatttaatcagattttcatttgcgtaatggttgtgtatgttttccaaaagtaaaacaaaaaatggctatgattatgattgtatgattatgtgtatgagtagacaaatgattggaaaaaaattgaactgaataattatcacttatatgatttgtattttgtattcctcgcttcaccgggatcattccttgtaactcgtctatcccacttccgcttcccttaagtattaaatgagattctccttacttctctagagatctctatttatgcaaaaacatatattaaatataccatccccataacccaaacagaaaacaatttcttaaatacttctaataatttaaaaattgaatataaattttatacaacacacattttaaaatatgaaatacgtacgtgccgctcaggttctagttatcttttatatgattagtattccgttcatttcaaaatgccacacaacaacgtagtcttccttcttgtcgcctacccacaaacggcctctcagatcctcggcagtatgaggagccccacgcgataaatcgctgattaatatatccctgactttatcctctcctactcgctcaatctttaaaaggctacctttcaatgattctagtggtggaagatcgatcctctcctcgctaaagacatctataatatagagtttcattcgcgaatctacatccagaaactaattacctgagcttccaaggaatcgatacctcatacctccaaagtcgaaaggtcactattcgtctcgtaaaccctatcatcgtttgggttggacacactactgcgataaccatccttttctgcatacatcatcagcaatggagatccggcttcttgtcgctcaatcaaagtcgaacgcatggccattgcagactcaggattctgacaactccatcgttgtttgaacgtactagatctctgcattttcaggtcgtcttttgattaattgagaaagcgttaagttgcacatactgttatatatacaaccaagcccaataacagccagagaaaaatattctataacggatctatgacccaatataacatcatcgtggatcatttcatttggttgttatttaacttatattcgtggaaacctttagcgtgtgaaactgatttcaaacttttttagattttgataaacgtttatgtgtgaaactatctttataaagattaaaatactgaagtaaagaagagggattagtgaattcgtggttattcaagattctcttgatattcttaagttgagatttggaaaagatactcatttgtacaattcattaaacctactgcctacaaatccataaatccaagcaatgacaacgagggaaaagatagagaacagtacgtcagtatcatttcgcctgactgatcatttcagtctcaaatgtgagcctcttgttttcagtacggctatgaagatgaatgacacatctacatagattcatctaaatatggtggctttgcgagaagattaaggcaagaagtaaatacaaaaaaagtataaatccagagacatgaacggcttaactatcggggccattagctactgcgaccgcccgtatctttttgggtaaaattaattaatcatatgaatcttataactgtccttttattcaaatgtacgaccatttgcacaccagattctccatttcggtacttttatataaatttaaatacggcatgtgaattatgttacgatcaactattcactattgttgacgacttgacggtctagttgtctttgatcaaaatacattaggataatcaaatgaaaacaaccaacaacaacaaaaatatatgacaaaagttacatctcggataatgtacttcagaatcaacaagaatgagttgtgaaatctcttcttgaactatatgaatagtaagtggaagtttggaggcacacatgcgtggcgaactctgtgatatgttgttgtctatagactttcacaaactctacatacaaaataaaaaacgcaattgtagtaaaatgcttaatcttgtaattatcttctaaccagcataattcatatttgcacacacatgtgatttgggtatgcatgcaaccactatttcagtggattgatttttttatatgtcagacatattctcatgtttttttttcttctgtacgataggatacctttacatgggcactaaagcataatcaaagtcataacgttagttaacaaagctaaactagcaataacaaatatataagtcggtttaccaaaactaaactggcatcccaacaacatgatcgttgtaaacttgtaatccataacactctaacatcaaatgccttagcagacacttagctgtcggacactaagtttatgttatcatcaacgtacaagtgaactatgaacattttctattttaaaatttatttataaggacaacagagcaagaccaaaagggatcaaccatgagctaggaaggcaagaatcaagaaggaagaaaccactgagcatcgtagaagttggagttggagagaccgtggaagcgtttgatggtctttgttataagattgaagacacagatgtcgaggcatgacgattctttgtgacggatacgatcaccacgggtgaaataaatggagttaggctcaataccaagggtatggtcagcaggcacagtaatacccaaatcaagaaagagggcctcatcacctagagaatgcacctcaagaagccaggtgtcgagggttttcgggtcaagatctttaggatccctcttgtacaaacggaacatcctatgactttcagaggtacctaaatcgaacgtatagacaagcaaaacttgacctgctcttgtaacagcaatgcctttgttagatgggatacacttcaattggttcctactttcacgttccttcatagtcagacgtggcatccacattggaagcctatgtttctcggacacatccttgaaaccatcttcatcttgtccagacaaatccaagtgtcgaatgaactcacgggtggcaaagacgtaaagattgtaacctttaagtaccatatcgtataaacctcgtaactccctctgaacctcgagctgtgttggaatctcgcggtaataatcatcccctgtcctgcaaaccctagaaatgggcccatttcaaattgccagacagcaacgtagttttcatccttgttgtcaacccacaaacgacctctcagatcttcggcagcatgaagatttccccgacgatatgaaaaaccatccattagtagatgcttgacattctcctctccgtcacgccaaatcttaaaaaggctacccttaaatgattctagtggtggaagttcgatcctcttctcgctaaatacatctataatatagagtttcattcgagaatctaccaccagaaaccacttacctgagcttcccaggaatcgatacccggaaaagtcactcttcggctcgtaaaccctaccatcttctgggttgtacacactattacagcgacaaccatccttttctgaagacagcatcagtaatggagatccggtttttggccgctgaatcaaagtcgaatgcatggccttagcagactcaagcgtagtagatctctgcatcttgacggagattttctcgtcttttgataatgtatatataaagtaccaagcccaataacagcaagagaaaaatattttaacgggcctatggcccaatgtaacatcattatcattatggatcatttttggttattcaagattttcagaaacgtttatgtgtctaactgtgtttataaagattttaaatactgaatgtagaagagggattggtgaactcgtggttattcaaatcaaaaatcatgagatttaggtttaatgttggttttggttgtttcggtttggtttggtttgattatagattttttttttttttgcgctaacatggaaattttttgaatattgttttcttttttcaaattactaagtagtatttcgaaattttttttttcttttttttacgacaagtagcattacaatttaaaactaaattattttaatgtatttttcctgtataaactatcaaatttctaaggtttctctctcttctctctttcatttttcattctctcagatttctctgatgtattttttcgttgacttttatctcatttgaggtgggtttgtcgtttggttgtaccagctttctcaacggtatatatagattggctttgcttccggtgtagatgccttcgtttgcatattcatccggctatgtttctgacatcggtggtttaatcaacattggtggtcggctctggcttcggatttagcggtctttcggtaatgataggctagcttcttctccggaccgtttaggtttggtctcgcttttgttttttctttttccgactatttcgatttttaatgatggaacaaatattttggatagtaagaactttttcaataaaaacaagtatatattttgtgaacaacaaaattttttgaaggttgaaaagttaatatcggttgacgtaaaaaaaaaaaaaaattgaaggttgaaaagttgttgattgaagaagaagatgaagaaaatttacagatctacaataaatggagtcatattctcaacaaagctaaaattgggattttaccttgtttctttaggcaaatatataaatatgtaaattgaatgagatttatgatgtttttggtggaattggagctttctgacgtcgcaacaatctatcggtgactccaacttcttcaacgtgtctttcaacctggttctcaattgacatgtgtttgtactgtatacaactttatcttcagtttaaggttcacttaattggacttttgttttctattcttacgtttgtttgtttttaaatataagtaaaatcttggcctgttatattggttttatacaataaataaaacacatttctgactccaaaaaaaaactatcaaatttctaatatacaagtattctaccccgtactacgtacggggacaagttaagattgaggttgatagagagcagtagagattcaatcataattaaagggtttggaaaataaaagtggatcctatactatctaaaaatcctatttatttttctgtttttagacaatatttaaattttgtaaagttaactaagaaaaattagcttaaaaaactaacaaattattaacaacaggttgcaatatttgtatttgtttattttgtgcaacaaataattaacaacaaaatacaaatatttgtatttgtttattaacaacaaaatcgttaaactactaataatttgtaatttggaaaacataagtacaataaaatcacaattaatatgagttaaatagcaaatgaatgaatataaagaaaaattaagcgctaacttgaatagaatttccatagtagtttctatagcatccacaagagaagaaaaaaatggaagataatagaaaaaatgattaaatagagaaaatcggttaataaaacatgctttgattttagcttgatcgtgaaggggttggtaggagcaaattaaggaatataggattttttacactttttttttttgcatatcaatattggcttgaattttattttttagaaagtttttctttccattactaagcccatattttttggttaataattaattttgttttttttaaaaaattttttctgttttgcacgatctcaattttgttttgatttatttttatgaaaattaaattattaaatagaaaatgtatgtggcatgtttttattggtgctttctaatttgttcacatcgcattttcattttcttttaacagtttaacgaaagctgtcttaaaagataaaaactgcgtttaaagaaagggcttttggataggtaacagaaaacagccctcattgcaactctagaaagataagacgacagggtgtttttacgtaaggcactatttaatggagagccatccgtgtttcctaggcctgggattacggcaggaaccgagcaaaccgacccgattaaactgataatttcggttatcggcgaaaaccgaagatactgtaactaaccgttcggcgaatttaattttggtgttcggatttcgggtcgggtcggttcggtaatcggaccgatcggtttattaaaatatgcaatcatatataaacttaaccctagtcaattaccctaatttgttttattttgcttcttcactgcctcttgcaaaccaagtgagcccttctccgatctaaaaaacattcttctccaatctattcatcatcacatctcttctccttcatcaattcattatcatctattcatctttatcctctaaaaactcaatcattcgtgtctaaatctgtcctcgacgaacttaaacgtaagatttgttcagatttgattattggtgttacttgttttttttttgtagtctcgtgtctttgttctctagatcttaggcttgtgtttatttcaataatttagttgttttctttcttgtttcagtgagaaagcgagaaaccgactcatcaaccttgtttaatgcaatctcgcttaaagctggaataagaaagtttgagatcgccgtggacgagaccgtcatcgtccgagcctcatagtcggagtcgcagccgtcacactacacacagctttttcaaaaccctaaaatttttacaagtctgggcttattaattgtgggttgggcttattgattgtatgttgggttttgttaagtgtattgggcttttattttgttgtatttgtaatagaccaattttttttttaatgtgtaaaccggttaaaccgaagaaaaaaaagaatttaattcatattcgaaaaatattttttaagctataaccgacgtccgaaccgatccgaaccgaatttcaattcgggtctattcggtgagatttttaaaaaaccgaatttccaccaaaccgaataacccgacccgaataacccagtttaaccgaactcccaggcctagtgtttcctcttatccagcaattttgtctatgcgtaaattgctctgtcactgtcactgtcactgtccgctgcttctgtgtccccaagatttttctcttcttcaaccttgaaaaaccctaaaagtttagtgccactgcataaggcaccgtaaattcccttgacaaattttccggacgaatctagaattcagtaatggcggctccggctgacgcgacaacgaagggacaggcgctcgctctcctcgccgctgccaaaaaccacggcgatttggcggtgaagctctcgtctcttaaagaggtgaaggagattttgctgtcattggagccgtctttgtctgctgagattttcccttatcttagagaactctgcttgtcccctgaagttttagttcgcagatcccttatcgagtgagttactcagaaattttacggtttcgtacctggttttactttcttctttcactacggatgatgttttcccttgctctacacgaactcgtaaagacttttgttttgttgcgtgtttagggttcttctctatttttcccaaacgtttgatctttccaaacccagctgctatgttgtagaaattatgcaaacgatgcctccagtctgcatgattgtttgtttttggtgggattaatttgaaacttccacaacaatatggtggatattactcgtccgcttactttttttttagttcacctcgcatagttttcataagttatgttaaatagttacttctgtagctattcatggtgattaaatttgtctgacaagttaagagacatgttgatcgatttcttctggatggcaggatcattgaagaggttggtttgcggatgctggaacattcttatgttctagtgagtgtcttaatacacttagtaggtgacaatgatccaactgttgcagagaaatctatttctactggcacaactttctttcgcagcatcttggagaagatggaaacgcaggtccatactgtttctcaagttggatatcttgtcgtatgcatatgttgttttgaaattccttcttgagatcttttcaaaaatcctacatttggagtcagtatttaccagcaaaagtatattttacatgctcgtagctgctgatgagattgaactattgttaacccatggaaactttcctcttgttttcattttcgaaacttcggttggtttttatgttggtgctacttatttgatgtttaaggctactgtcataaggctgtaggataatatgaaatagtgaataaaataaagcactgcaagcattggtaattttctgtttaagtttttgttggatatcttgtatgatactctcgctgatatgtattattcttgatgatctctgcagttccatcaccgtggtaaagttgatcgttggtgtgtgaacctatggacattgatgcttatgttcaaagatgctgtctttaacattgcattggatttggaggtatgctcactgtttatagcctctcttttttgtctgtctgttcctctcccgagattcgattttggtttagtatttgctctgcttctctctcaattttaaggttttctaactcaagtccgtttttctctttcacaatagcctggtcgtgtagtaggggtgaaagttcttgctctaaagtttatggagacatttattttgctcattactcctcatgcatctgatcctgagaaagtttccacttccagcgaaggtattatgttctaatcatgcagtttttattattattattccgattatattgtattttatctggaactgcaccatacatgctttgttcattttgttgtgcgcgggtcaacttttccaattctactgcaggaagtagacagatgatcaatatttcctcccttgctgccggtctccccatgctgaatctaacagggctcatgtctgaagtaaatcagacacttgtccgcttaggatctttcttacaggcacctactcttatacaggatgcactgccgatagccgttattgattggtatgtttctgtatgcagcccactattcttgtgttacttttctttatattcatcatgatattagttgtgcttttacctgttacattttttgctatcccacttttttagttgaaactatgttagttctttttccactcagtatgctgatttgttcttgcaagtaagttgatatggatgttttggcgctcagaaatttttgtttcctattgttatgttcataacgtgaaacactcgttctcacatgtatgttggtgataaaatagctatacagaatgtgtcttgctacactggaatgtgtcctgaatgatagggtaatattaatagtcttctttgcaatagctttatgtgctcatgtttgtgaaatacaatatttgcagatgatctttcacttgtaaatagtttgataatcatgattggctgtcctacttgcactttcagtgtcttgaatcaaattggctttgtaaatattttacatcagggaaattgaactgctcggtttccatttgtatgtctactaaaattttggctgatagagataaagcatggagacaggttaaagcaccggttcaacccctatgatgaggtgcagctaactgagtcatactcctcagttgaagctgcatcagttacacattttgacagttgcctgggtatatagctccactatgcaagtgataaggacatcaaacgatggatagaatggtcacctctactagttagaaatgttttttccaagtaacgcagaaaaatacttgaagaaaaatttatttggtttttgtgaactggatgtatatatatatatatatagatatatatatatatatatatatatatatacttatgactgtatgttgggatattaaaaatgtatacagtacagtatagcaacttatgcacagtatcatttggcaatcagagcgttcttctactgaattctagactaacatttacttgcattgtggtttttccttctgttatcatgaatgtttctttgtcatatgtaggattaggtggattttgatatggttgatggagcgttgaatacatatattgctgcttgatcttatattatgtgatactgtttagatggatatagaagttatctcgtggttttcatgtccagtaggtggcatatctctaatcactttgaacaatcaaagtttccttcatctgtttgagagcaccttctgattaacttgggaaatctctgcatagccaactaagttgtcacttttgaaaaaaaaaaatcttcagtagtagtaattatcttgcagatgtttgtttttgtttgaactaatactaccatagaatgtctgggggcacttatctttctagatagatcaatgtcaaatcctgagggggagagactttgtctagagagatcgatggttttagatttttcggttttacctagtgttttattaatggagctgtcgtcttaaagtaagaaatatgtgaaaattgatcatcttcctactttggtaatggtaacaaatcatctttttgtattatgctggcagttagcctgcaattgcaggaaatctttgagatatgctagcttccagactaaatcttctgactcctctaactgtgataataatcttctttgcgtaagctttaagtttgcctcatgtttgtgagatacaataataagcagatgatcttccacttgtaagtagtttgatggtcgtgattggctgtcctacttgcactttcagtgtcttgaatcaaatcggctttgtatatatataacattaggaaaattgaactgctcggtttccatttgtatgtctactaaaattttggctgatagagataaagcatggagacaggttaaagcaccggttcaacccctatgatgaggtgcagctaactgagtcatactccaggggaaattggctcagttgaagctgcatcagttacacatcttgacagttacctgggtatatgtggagctccaatatgcaagtgataagtacttcaaacaatggagattgtcacctctactagttagaaatgtttttccaagtaacgcagaaaaatgctttgggatattatttggtttaagaaaattttatttggttttgtgaactggatgtatataaacatatacttatgactgtatgtggggatattaaaaatgtatacagtacagtatagcagcttatgcactgtgtcatttggcaatcagagcgttcttctactgaattctagactaacatttacttgcattgtggtttttccttctgttatcatgaatttttcttttccatatacaggattaggtgaaaaattgatatggttgatgatgcgttgaatacatatattgctgcttgaacttatattatgtgttactgtttagatggatacagaagttatctcgtggttgtcatgtccagtaggtggcatatgtctaatcactttgaacaatcaaagttctttcacctgtttgagagcaccttctgtttaacttggtaacaaatcatctttttgtttaacttggtttttgatttttctgttttacctaatgttttattaatggagctgtcttaaagtaagaaatatgcgaacatagatcatcttattgctttggtaatggtaacaaatcatctttttgtattatactggcagttagtctgcaattgcaggaaatcttttagatatgctagcttccagaccagatcgtctgactcctctcactgtgataataggataagtaaaaatttagatttaggatagtttcatgttgttaaggagcttattcgctgtgtggtatgctgcataatcaagagtaaagtttctcacatgaatggttgctctataaagttatatcaaactctagtatcgtttacgttagataattgtatatgttaaaagcagctcctcacacctaggactgtttcattaacgtcagtatagttatttttgtttgctgagatgtgtagtgattcaataggacatgcttgctgaagcatacctaaaccatttgcaattttgaatattacgtatttaagcactggtttcttaactgacagtagcttatctttcagtcttgcagtggtagcaaggaagaggcctgtccactacgacactgtcctctctgttctgggatttcttaaatgtacttcctcaccgatagtagaggtatacagttcacactttattactttgtttcttctcaagtatatctaaactttagtcatctattactcctcaactctacccttttttttactgcataacttttgctacctttctagtcaaactgtgaaccttttgttaactgctttgtctactctagaaatgtgccatgccttttttttgtcagatgcaccattcattttcttttagtaaaaggttctcaatgactatttagtgtcatttccttcagtgaagccttgtagtaggtcgaatagagtgcaaagaagtttttgcttgatcagatcataaatcacaagtatcacataatttcttattgtttgctagtatttgttttgttaatgagataatttaactttctttgatttttagtcaagagacttgctttttagagcatttccagcaatggatcctgcagatatttctgatcaagttgtccgtgaagttgatgaattattcagagtaaacgagcatgctgctaatgaaaatcggtcaagccaggtaaatgttttgttttcgttctttctttcctactcttctatagctctacatcagctgttatgtcaaagtcagtttcaggcaaaccagctgttgtctcaaagaagctgaatctgttaaagcacgttagtctgattcactgccttaggattgtaaaccgctactagcttatcttgttttcaataaagggttttgaactcgagccagaaacaagctgttgtctcaaagaagctgaatctgttaaagcatgttagtctgattcactgccttaggattgtaaactgctagctactaacttatcttcttttcaataaatggtttttgaactcgagccagatcctacagttctaacctgaatctccgttgttattgtttgctctaactattatttttatttttcacgttcacagatactggaagtgtttcctacgctctcttcgcttccaatgcagcttcgtgatcatcttcaacagatgattcattggttggatgaagctattattggagatatgctgcctcaatatgaacgtcgtaatgacatgcgtcaggttttagatagagatagaagacagaggtgtttatttaaaagattctctgatgaagacagagctaggaatgaagctattgcctacctcttagatcatccagaagatggtcatcgatcacaatctgaacaaatttatggcttctccagagtacgacgagctgtatgggtgcgatgtagaattaaaaatcaaatgaagatgggagttttgattgagtttctagagtcaagtgttacagttcagtcattaggtactgtatatagtgaactacctgacgatgtaggagcggaggaaattcacaaaatagttgtgctagatatcagatttggtaacatagataggaacttaggaaatcttttggtccaagcagaacctcgtaatgggtcagcagctcacctagttccaattgatcacgaactgtcattcttcaatgatgcacatccctacatcacttgtggcgcttgttggatcaagtggttagaacagattgataaagatttttcttcgcagttggtaaattacgttgcagccctcgatcccgatagagatttagaatttcttcgacattgtggttgggaaccgaatcaaaggtatattgaaaacttcacggtctttgccacattcttgaagaaagctgtttctcaagggttgacagctctgcagatcggattgttggcgtcatataagtgggaggaagatttagattacaacttgcattgtattgttgctagtgttcaaagggaagacaacaattttgttgagagtgtgggaacacgaatagagcaacgcttgagggaatttcatgagaacctacatgggaacgcttgagggaatttcacatttgcttattattaggatggtattggcctattagggtttgcttttaattgtacttttggattttttagatttaattttcttgtttaatgttattgggcttataaatttatgaaatctgaaacattattttgttatgcaaccaggagacgatattttgtttttacaaataaattaaatgatgatgtttgaactttacggttttattaatttagtattaaagttatttagttttataatcgtggtgcaaataaaaaaatagtgatttgataaaataataaaatataaccctaatactaccaaaataatgatattacaaatttatattaatattgatctaaaattagttcctccgtattaccgtttagtaatattttaacttttatgagtttaaatatgatgacccgtgttatataagggattaaattttatttagtacaaaaagattttatattatatattataaaataaagtaatttttttttgttagtctctatatagaatattaaaatgaatatattattattacatggttaatatgataatttatttgtctcacaataatagaattatataaagatgagaagtgaaatataatggttaactttttagacagtaaaaggaaattcttctcaaggatcttggatatggaggaaactcttaaaacttagagacttggcaaaggatttctatcaggttgaaataaaaagtggcagagggacatccttttgttatgatacatggtcctctttggggaacttatttgatacttctggagataagagggtgcattaatttgggtattacaaaagaagcctcagtgggtgacgttttgtcctctcacaaaggaagacgacatagagtggagactttaaataaagtggaagaggtcatcaggaaaacaagggtgaggaggaaggtcgaagaggaagatttgatacaatggagatggaagacatgttttaaacacttctcctcaaacgaaacttggaaaatgctgagagttgaaaaaccaatctgcagatgggcgaaagggatttagttctcggaagctacaccgaagttttctttcatcacttggcttgcaatacatgatagactaacaacgggtgcgacaatgagaacgtggaacacacaagtggatactacctgcaaattctgtgctgaaccgatagagacaagaattcacctattctttcagtgctcttattcaacacaagtgtgggagaatctcacgataggcctacttcaaggccattacacttcttcttgggaccgcactgtttcgctcctcacatgttcgtctcttgggaggaaacctcttatgctgctgagatatacacttcagatcatgatacacaccatatagagagaaaggaataatcgccgacacggagaggagaaccctatcacacctttgaccattggaaaaaacatcgacaaaaacattcgcaatcgaatcactcttcttcagaaacaagaagcccaaaatatgatgatttgtttgtattttggctttccactaggttttaattggcatagctaagacaaagtatgaacctaacaactcaaacaagaagcacttgatgtaaccatggtttttttggtgaataaaattttgcatttattcaaaaaaaaaaatatatatatatggttaataacaaattaatatggtaagttagatatcaattcttatttgttcagtttgattggttattctattttttgaaatttaataatgtatttttgtttttatgatttaattaaattacataattagtatttaagtttttatctttaatgagctgaattaatttggtaattgaaattatacagagggaaggttactttcaattatgaacttccaaaataatagtataagatgttttaaactcttttaaatttaaatattccccattctattataataattttaaaaataaagtttaaaattgattatacttgcgcgctataactaaaccattcaacaaaataactaaataaactaatataaacttctaaatttagatgattgttaagtcaattttcccctatcattcggatttggattcatcatggttttatttataatatatgaccctcagtctatactttatagaattagaagtaatgaggctctacttcgattagtttgagatctgattttcttttcttagtcaaagcttttaaggtagtctcattttaaacaaccaaacacaattagctatctcattaattagcattttttggcatactaacatctttataattaactttttaaattataattattttattaagatatttatgaaaagtaacaataaacaatagagaatataaatgtaaactttaataaaataatatacgaaaataagaaaaatgtaaaatttaaattttaaaatacataaaatataagaatagcaataactaagataatacgtttcagagatattataaaggaaattttccaaattttcaaattttcaaaaactagaaaatatgttaatgttattatagaaatttatgaattttagtttaaactaaaaggaaaatactcctaaaatattagaaaaagtgagactaaacaactgaatgaaaaagtatatttaagtaagaacacaaataaaaataagttaatgatggtcgaagaaacttttagttttaaacaaaagaacaaaagagcaaaatatatgtatataaggttctaaattctaaaatagtgggtttgtgtataaatagtcatctaacattgataatggaacatagatacttgaaatatcaaaaatatattactctataatttctcgattaatagcaagaaaaaataactaatagataaagataaatataagtatgttcagacgtgtaaatattttggtaatttaattgttaaaaaaaagaataatttctttactaataacaaaatctttaataatatgaaacaagtaagaaaaaatgacacaacatatttgtaatattttttaccaaatttaccctataaactttttatttcttattaaacaaaaatttaacaaacataagtgatactaaagatattattaaaaaaacatttctttaaattatatcaaacaatatatgaacatttataattatgtatacagaaataaaacttagttgaaattttgaaaatacacaaaaatgaagactaaacgaatttcggcggccatctaagcaatgcttgaatgcctataccactttataaaacacttatttacttttggagacacgagatcacctcttttttcttgtccctattcctctcaaatctggtgctctttgacaaaaggtcttcttcatggtagaaacatctcgagttggagccttatcactccacatctgctcgattcatctcgtcagtatttacatctcttcactcttcgttatactttccaaacaacgatccacagtttatggcgagagcgtaatagtaggcgacatgggaagcctgctatcccggtaatgaaacttgcaaagatcatcgagaaaaatatacgaaacagattcagcacggctataaattctggaaatccatgactccaaggcgggctgcagttttgatttcaaattcatagctagaaatcattctaaattttcttaattcttttagattcttttaaatcatgtcgcattcattgtaaccaacgtttttttgggtgaatataattttacattccttaaaaaaaaaaagtgttatttaccaatcatctttctatactatattactatgtttatttgtgttgtctatctctttaattattgccaggtgaacactcatgctacgcatgggtttttagaattgttggaaagaattatgattatgaattttgtttatttgtatgttctttttatgtgtgtgttattatgtaattaataaatttatatctattttatatagctataattttttatgattagattcatttataactcaaaatatcaacatattatcggatttgtataaacctaaaaataccttttcaatgcctttttacaaaaaatatctccttccattgtccatttttaaaaatactcatttctcataaataaaataatttacccttcatctaatgataacatgtaattagaaactaaaatttttccgtaaaaaaatattcagcaccaaaacattctttttcccgccaaaaagtttggtgccaaaaaagttttgcgacggtcatccgtcaaaagctttcccgccaaaatttgcatttaaaaatccttgtaaatgtttttagaactcttaataaatctttgtaaaaaattttaaagccttttaaaagctttgtaaagttgttaaaaattcttgaaatcattttaaaatctcttaaaatttttatagtgtctttaaatacacatgtaaatactttaaaaacctttgtaaatattttaaattccttttaaatcttttaaaatcattttaaaattttttaaaatgacatacaagagtttaaaaagaattacaaggattttaaaaaagagtttaaaaagaattacaaggattttaaaaaagagtttaaaaagaattacaaggattttaaaatgatttacaagagtttccaaagagtttttaaagattttaaaaagaaattacaaggatttaaaaacctttatcattgtaaataccttttacggaaattttttgtcggattttcttgcgaaaacattatcttctgaatatttttggcggaaaaaatcattatttcattttgttaacctaaaaaattttcaaatatggataaaatagtcattaaaaattaaaagagggtatatatgaaaattgtctaaagggagtggttgaataaaaaaatgggtagtcttggaagggcattcctaacaatttctcatctttcactatcatgaacacaaaaaacaacatatgatatattgatataatgtatgtagttatgttatacttatgtgatctgaaacttgtctaacttagttgtaacaaacaattctttattccatatattctctcgtcatctagtacaccaaccacatcctgatatgctagtaatttaaatcatcactttagaattcttccttgcatatagctatataggagaaagtctcgtgttttattatttttggtatttctaatgtcttgaatgaccattacgtgaaaaaattgtatgtcaatattacaaagttataaaacgcacaaaatgaaaagaaagaattttgctaatcttttatttaattaatgtataatgatacatgtcattttcttgtgcgatgatgtgacacttaggtggatagtcaactttcatatatatgatttgttttttttaacaaaatttaagtaattttgcaatttatcaatataacaaattagtcttgaaaataattatataatataaacaagaaattttatttaaaatgaaatgtaaaaatgaccaatttattctacaaagaagctaaacgttcacgtatatttagtcacaaactatttacatattttgttatataatatcaaacctttagcttctgaaactgattcaaactaatttttataaagattctaagtattgaaacgaagaagagtggtgggtgaattcgtggttattcaaggttctcttgatattttgcaaaagatcatactcatttgtacaagcttcattggtggcattggcatatctcagatcagtgatatagtgttgatgtgttctgaagaaggtatgtgaggttgggaagaagatatatgggattcttattctagaacacaaagttgtacttcaaagtaattatccgaacagcgaatatgcaacaaacttgattgtaaacttaaatctccatggtgatgaaagaaaaaaaaaaaaaaaacttaaatctccatggttagaccatttcggtttctttgatatagctgctgcactcgtcttcctagatgaaaccttaaatggaacagtgaatatgcaacaaacatggccctaacacatgaaagtctattcaaattatctactagattacgcatgcgcacttcttgattgctaagtctaatatttgaatgaataaactctctcttctgttagtaggcactcttttgacggcagtttctattcttggtattgagaacctcataccaagcatgctcgaactcgatcttgatgcaccgtttcccccagaatatatatgttccatttgaaaatatctcacggctgctagaactttaatttcacttatgtcctaagaccggagtttatggaatattgttttaggttaagattaactcattgatgcgcagaatttgagggataggtaagagaaaacaatctttaccttcatggtactagatcattcggatggtatagctcacaaaagaaacaatcataactgataagcatagagttcggtggtcaaatcaagaaaaattagcaagtgaacatggaggtaattataaacttagcgagagctatgagtaaaaaaccatcaatctggttgacaacattattacataaaagtctggaagtttccagccctgataatggtgcaaactaaattagtctccatcaagttgtcaagaaaaggaaaaagaaactacaaacaaataaaccaggtcaaattatttgatacaaatgaattgttttccaaaacaaaaaatcttgactagtaaatagcacttcaggatgagcaagttttaagtagctcagctgctcaggtatggtgaattatttttaccttctaccatacatatccgatccgtagcctaccaccccaattataatgatattgttactatttgcttttgagctaaaatgaacagaaaacaaagaacgatgtctcataaatgaaatgacttgctaaggttaggaagaaaatgccacagataagaacatatgtccgtcttctttgatggggaaaaaacttagcaaaagaagaaaaacatgaaagtttgaccaaaaaaaaaaaaagaagaaaaacatgaaaagagtcctgtctcaaaagaatggccacaaaataaaataagggtttagagtcctgtttcatatcggcataatagcggagccattctggtcaattgtcacagatttttaatgcagaagattagagtagagcagaaaggaatataaaacttcaacatacgaactcagacctgatcttgcagtggtaacaatagtgataggtcggttcgaagacagcaaacctaccagaaaaatagagatcagacgaagtaaatttaagtcattcctaagtctttcttaatcggctctatcaaataacgtttctgcgtctctttctctcgtccttagctgctatgtctaacatacgatctggttgtggcaatttgtggaagtctatcttactttcacagaggcatatgtttaaaagtgcatgtatgatgattttatctgaattgatggtttgaaatttgaaacctaagtccaaaatatttaaacactggcaatgtcacagattatacatcaaaagaaaaagaggataatagtctggaaatgtgagaacaacaccagaaagcaacagaaagaaacagagcaaggccgagggagaaaccatggagaaggctagaatcaagaaggaagaaaccactgagcatcgttgaagttgaagttggagagaccgtggaagcgtttgacggtctttgttgcaagattgaagacaccgatgtcgaggcatgacaatttattgtgacagatacgatcatcacgagtgaaataaatggagttaggctcaattccaagggtatggtcagcaggcacggtaatacccaaatcatagaagagggcctcatcacctagagaatgtacctcaagaagccgggtgtcgagggttttcgggtcaagatctttaggatccctcttgtacagatggaacatcctgtgactttcagaggtacctaaatcgtacgtaaagacaaccaaaacttgacctgctcttgtaacagcaatgcctttgttagatgggatagacctcttttgcttcatacgttcacgttccttcattgtcatacttggcatccacattggaagcctatgtttctcggatacatccttgaaaccatcttcatcttgtccagacaaatctaagtgtcgaatgaactcacgggtggcatagacgtaaagattgtaacctttcagtaccatatcgtttaaacctcgtaactccctctgaacctcgagctctgttggaatctcgcggtaatgatcatcccctgtcctgcaaaaccctagaaatgggtacatttcaaactgccacacaacaacgtagtttccattcttgtcgtcaacccacaaacgacctctcagatcttcggcagcatgaggaaattcatcacgaaatggatcctcatcatccattagcatatgcttgacattctcctctccttcacgccaaatcttaaaatggctacccttaaatgattctagtggtggaagatcgatcctcttctcgctaaatacatctataatatagagtttcattcgggaatctaccaccagaaaccacttacctgagtttcccaggaatcgataccctgaaaagtcactcttcgtctcgtaaaccctatcattgtatgggttgtacacactattactacgacaaccatccttttctgcagaaagcatcagcaatggagatctggcttttggccgctgaatcaaattcgaacgcagagccttagcagagtcaagcgttagcgtagtagacctttgcattattgggacggagatcgattatctcgtgctgaaaaaattgagcaagggttaaattgtgcacactgtgtgtaaatataggtaccaagcccaataacagcaacaaaaaatattctaacgggtctgtggcccaatataacatcatcatgaattatttttggttattcaagattttgagaaacgtttgtgtgtaaactcatagtcgtagttattcaagattctcttgatattttcaagttgaattttgcaagagatactctcagttgtacaagcttcattggtgtcattagcatatgtcagatcagtgatagtgttgatgggttctcaagaaggtattaatattatgaggttgggaaaaagatatagaattctttatgaattgaaaggaacctattcttaccaaaaaaaaacaaatgctatgtcacagactgtgtttgaatttgagaattacgttcagttgtgtgtttgactcaaagtagacggtattgcgacgatccgttcatggcttcatagtttttgtgtaggcaatggcatgcgatgtttagtgagacatatagtcgattttgtttccacattactactaattcaataaagctatagttagttcaaaatggctgacttttgtttcgaagttgcttagctttgataatagaattattagtttcgaattttatgttagtctttcaaaacgaactagctagtgatgtaaaatcgaatttatctgcacttgtacatagcaaaaactctttattttggtttgtattttgtaaacatcaatgacgtacaaaattggttatgacaaatttaataaaccaaaagaaaaacaaatataaacatgttgtgtagaatgtagataacaaatttctgcaataaggttattcagctgtctgaatgaacctaaactatgctaagatagtgttactataagtcttagttaggtgaacaaaaacggcgctcattggagctcctacaaagtaaaacgacaagttgtttctgcgtatggcggacctaaaagtttttttagaaaattaattgaagccatccggtttttctgttctgcatttttgtaattgcgtaaatcgcctaattgctcttgtgtgctgctgcttctgtgtcgccaagattcttcttcttcaaccttgaaaaaccctaaaagttaaccgccactgcgatacggcaccgtatttgacgtttccgccggacgaatctagaattcagtaatggcggctccggctgccgcgacagcgagggcacaggcgctctctctcctcgccgctgctaataaccacggcgatttggcagtgaagctctcgtctcttagacaggtgaaggagattttgctgtcactggagccgtctttgtctgctgagattttcccctatctcgcagaactccacttgtcccgtgaaattctagttcgcaaatcccttatcgagtgagtccctttagcaattttacggtttctccctttcttcttccactccgttttgatgttttcccttgctctgcacgaacttgtagaagaatttttatgttgttgcgtggttagggttcttctctatttttcccaatctggagaaaagtttatggttattaatttgtctgacaaggtaagagactggttgatcgattcttctggatggcaggatcattgaagaggttggtttgcggatgctggatcattcttatgttctagtgagtgtcttactagtcttatcaagggacgaggatccaactgttgcaaagaaatctatttctgttggcacaactttcttttgcaccatcttggaggagatggcaatgcaggtccatactttttctcaagttggatatcttgtcgttttaatatgcatatttgttttgaaattccttcttgggatcttttcaaaatcctacatttggagtcagtaattaccagcaaaagtattttacatactcgtagttgctgatgagattgaactattattaacccatggaaactttcctcttgttttcattttcaaaacttcggttggtttttacgttgatgctacttatttgaagtttaaggctagtttcataaggctgcattgtaaatttctgttttaagtttttgttggatattatatatgatactctcgctgatatgtattattcttgatgatctctgcagttccatcaccgtgggaaagttgatcgttggtgtggggaactgtggacatggatggttaagttcaaagatactgtctttgccactgcattggaggtatgctggctgtttatggcctctctttttttttgtctgtctgttcctctcgcgaggtatgatctttggttgagtatttgttctgcttctctctcaatttaaggttttctaacccaagtccgttgtttctttcacaatagcctggttgtgtaggggtgaaagttcttgctctaaagtttatggagacttttattttactctttactcctgatgcatctgatcctgagaaagcttccagcgaaggtattatgctctaatcatgcagtttttattattattattccgataatattgtatttaaccgggaactgcaccatacatgatttgttcattttgttgcgcgcatgtcaacttttcctactctactgcaggaagtagacatatgttcaatatttcctggcttgctggcggtcaccccattctgaatccagcaacgctcatgtctgaagcaaataggacatttggcatcttagtagatttcatacagtcagctaatcgtttaccgggtgcattgacgatatctgttattagttggtatgtttctgaatccatcccactatgcttgtgtaggtacttttctttatattcatcatgatattaattgtgcttttgcctgttacagtttttgctattctacttttttagttgaaactatgttagttcttttggtcctcagtatgctgatttattcttgcaagttagttgatatgggtgctttggcgctcataaattttagtttcttctcgttaccttcataacgtgaaaaactcattctcacatgtatgttggtgagaaatgagccatacataatgtgtctgtgtcctgaatgatagggtgatattagaagtcttcttttgcataagttttatgtgtgcctcatttttgtgagatacaacaataagcagttgatcttccacttgtaagtagttttatgttcatgattggctgtcctacttgcactttcagtgtgtcttgaatcaaattagcttgtaaatgaataacatcaggggaatgaaactctggtttccatttgtatgtctactaaacttttggctgggagagataaagcgtggagacaggttatagcaccagttcaacccctatgataaggtttcagctaactgaatcaagtcctggggaaattggctcagttgatgctgcaccagttacagatattgacagttacctgggtatatgtggagctccagtatgcaagtgataaggacatcagacaatggatagaatggtctcagctctagtagttagaaatgtgttttccaagtaacacaggaacatgtttgaggaaatttttatttggttgtgtgaactggatgtatatatacacacatatatatatatatacacacttatgactgttatgttgggatattaaaaatgtatacattacagtataacagtttatgcacagtatcatttggcaatcagagctttctagcctatattttacttgccttgtggttttatcttctgttttgatgatactgctaggttaggtggatatttgatgtggttgatgatgcgttgaataaattatactgcttgatcttatattatgtgttgctctttagatggatatagaacttatctcatggttatcaattgtcatgtccagtagggggcatatttctagtcactttgaactatcaaggttccttcatctgtttgatagcaccttcagtttaacttagaaatatctgcatagcaaactaatttgtcacttctgaattttatttcaaaaagtagtaattacctagcagatgcttgtttgtttgaactaatattactaatcaatgcttggggacactatctttgaagaaagatcaatgtcaaatcctgagaggagagacattgtctagagagatggtttttgatttttatgttatatgcgtccagaccagaacttctgactcctcaaactgtgataatgggatatgtaaaaattttgattgaggatagtttcgtgttgttaaggagctaatttgctgtgttgtattctgcagaatcatgagtaaagtttctcacaggaatggttgcgtaataaagttatatcaaactctagtatatcttacgttagataattgtacatgttaaaagcagctcctcacacctagggatgtttctttgacatcagtatagttatttttgtttgctgagatgtgcagtgattcattaggacatgcttgtaggagcatacctgaaccatttgcaattttgaatatttcctgtttaagcactggtttcttatctgacagtagcttatctttcagtcttgcagtggtagcaaggaagaggcctgtccactacaacactgtcctctctgttctgctggagtttcacccaaatcttgagacggttaaggggtgccatgctgcaagcgttcagtattccattagaactgcctttctgggatttcttcgatgtactttctcaccaataatagaggtatagagttcacactttatattatttttgtttatgctgaaatatatctaaattttagtcatttgttactcttcgtatctttatgctaatgaaaagatagttgtttttaccacctttctggtcaaattctgaacctttggttatctggtttgtctactctaggaatgtgtcatgtcttttttccctcaaacgtgccattcattttctttagtaaaaggtcttcaatgactacaagcaagcgtatgttatttagtgtcatttcatagagcgaagccttgtagtaggtcgaatagagtgcaaagaagtgtttactttatcagatcatataacacaagtatcatgtattttctttttgtttgctgatatttcttttgttactgagataattttattttatttgtattttagtcaagagacaagcttcttagagcatttcgagcaatgaatgctgcagatgttgctgaccaagttctccgtcaagttgataaattggtcagaaataacgaacgtgctgcacgtgaaaattggtcaggcaaggtaaatgttttgttttcattctttatttcctactttttctttagctctacatcacctttgatcattctgaccagtaacgtctcatgataaacctacttttcagaataaccaggtgattagtcatcaaaattcttgggatctgtcaaagaaacgaataatgccccagggtgaagatgatacaatcaatggagaggttgctccgaagcgcgtacgccataatactaacatgcatttgacccagcaagttcaaacaaatgaatccctacagggacctgtctctatcaatggcatttcctctggtaaccatctttcggacagtgagttgactccagtggaacaaatggtttcaatgattggtgctttgcttgctgaaggagacagaggagctgcctcacttgaaattctcatttctaagcttcatccagatatgcttgctgatatagtaataacaagcatgaaacacttgcctagtacccctcccacgttggcaagttcagtggctactccagcagatattgtggtatcttcttctacaaataccgtgcattctccgactcctccggcacaacttccttttgatccaatccttcctgctgggtcatcgttttccgaagtgcctagcttgagtagctcggttgccgaccctagacgcgacccaagaagggtacaaacttctatatgttgcttgattctttgttgaatgttctttctccaagataacttattcatagttatgcaggatccccgtcgcatggatccaaggcgtttaaattcatctgtgggaccaacgtcactccctgtaggtgagggtaaagaatcagttccagtacagaaggacatctctaccttactgagtaagccagtctcagtttctgctgtcacgccaggggctactggttctgtacattcaacagcagtagagcttagccagaataagatgatgggaagttcaggaatcagaataattgatccgcctgaatgcagagaggacttgttgactgttcccaatgagtgttcttacccgtcaaaggaaatatcatccttagatgttccactatctccttgcagggatgatgaaggcatcagagagacaaagtattcagtcccagatttggatatgttgtctgtcccagattttgatcaacattcgccttcagcatcagtcccagattttgatcaagatccccctgcagcatcagacattactgcaccagaagaaagctatcgagagttggaccctgttccgtcatatgttgaacttaccacagagcaaagcaaaactgtaggaaagttggctattgaacggataattgaatcaaatagacatgtctttgggtttgattgtaacaagatacgcatggcattgattgcccgattgattgctagagtgagtgcctattttatatctgttacttgtggttttgctgtcaattctggctaccacttccatcatttggctttatccttagggaatccttatttcaagttcttcttgaattctttctttctacgaaaataaatattttttatatactatttttccagatcgatgctggcagtgatgttgcaaccatactaagagagcttattagtgtggaccatcgagaattcaaggtacttgttggctgcagtgttccccaaactcagccatcacttatttatataggttttggattttgaatgtcttttccaaatgttgagagtgtgttggctgtcataaatattgtagcatctttaaagtacgcagccagtgcactgctacagtgcaaatatttatttgtctgaataacttttccctccaattcccagtaaccgagagtctaccatatgtctatgcaaacctctgatctgtttgcttctttgtatctaggggcacgatcttgttttacatgttctctaccatctgcattcaatggccattctggacacagatgaatcctctttctatgctactgtttatgaaaattttctcatatcagtggtgagtgtttattcaacttttttccaattcttgtttatgaatctcgcttattaagatgcttactgtaggcaagatcatttctggatgcgcttcctgcttctgacaagtcttttagtagactttttggagaagctccacatttacctgattctgccataaacctactggatgaactctgctccactcgtcatgacccagttggaaaagaagtttgtgatagtgagcgtgttacccaagggcttggtgctgtttggagcttaattttagtgcgtccaaatgagcgaaaagcatgcttagctatagcattgaaggttacttatctttcttacaaaatcctgtcacattgcagttatgtaattatgttatattctcagtgatggagaatatgagaattccaataatataagttttggattttggttgattgaagaatgtatagcaaattgcaattacagaagcagtgtgttctgatctctaggacccagaaaggaatgctgtgctcgaaactttctttaaatctacatgtttcatggccatatggtcctttagatttttccgtgttcctaacgcatgttttattcctgttatcgcagtgttctgttcattctgaagaagaggtccgcgcaaaagccatccgacttgtgaggaaattagtcccgtatagcactatggtttttatttactgctggtacagcaattctaattgatgtttctcaaatgcatgcacaggtcacgaacaaactatatcacctaacatacatagcagagcatgttgagcaatttgcaacagatatgttgctgactgctgtaaactctgagacaaatctctcacagactgcatcaactgcagaaggaataaaaatggaggtaatagccaataacacttcccttgagtgcgtggagcttagttctctttaaattgtatgtataaaggctcattagtctatagaacttattagatgtcagttactttttgcgcctgttctcgtaagactctaaattttcgcttgtgagggttacctagttttgcaatgaacgcacttcagtttgtaacctcgaatttttgtgggttgattatctgacaattattttcaggcaaaaagccagataactttgacaactgagtctctagggtctggaaactccgacattccctctcagcaggatctacaaacttctcgtgaagtttcagttatatcaatttctgaagctcagagactgatttctctgttctttgctttgtgtaaaaaggtctgcgtagtctttggagatgctccttatgctcaaagttattttctatttaaagattcccctagatctgatgaatctcttttttcagaaacctagtctccttcgacttgtctttgaagtttatgggagagctccaaaaatggtaaaccaggtgagttagtctattcctaataaaccctcgtgtcacttatgtgcatcacatgtggcatggtacagaattatttttggataggatattacttttgattatcagatttttattgtgttggggcgatgtatggcatttcttatatgcatcacgtgtgttctcacagttttaatgggagtaaatgatattcacaaacttcaaattaattcattttggtgacttactgaaatggttcaggcttttcatcgacatatacctatcctaatacgagaattaggttcatcttatacggaactactccaaataatatccgaccctcctaagggaagtgaaaatttattgacatatgtaagtgacttctgtgtttccttgtagtaaatccacgttagcctcaaaagtagattctaattttgaataacggtctgttacttgtgaaggtgttgcaaatattgacacaagaattggcaccttctttggatttgattgctactgtaaaacatctatatgaaacaaagctaaaggtttgatttgttatgaagagctcgctcgtatctttttcttgtgtgtaaataattatgaaaataaagttcagaaagccttacagaaaatttgttttgcaggatgtttcaattcttattccattgctttcttcactcactaaagacgaggttagtttttactttctttccatagcttctgctctttcgctgtacgtttaccctgaagaaagatgaagaggcttgttatttttattatatatcttgttccctcgttattttacctatctgaaatgtggaaataaataagaactagtaatcatggaaggcttctgataaaaattttggtcctttgctggtggatgcgaaagatgatgttttgttattgcctatcaattgtggaaattccttattttatgacggacattatttttcaatgtaacaggttttgcccatctttcctccccttcttaatcttccgcctgaaaagtttcaacttgcacttgctcatatattacaggtatatgcatattctccaatccatcctttaattgctactcactgatcatgctatgcatagaggattgccttgatattttaatatctgatgaaatgagagattggtttgtccagttacaaaacaggaacaacagttcatttcatgagtatattttacacacctgtagtttttctgaactattccgatcttttgtgttatatctgtgatagggttctgctcacacaggccctgcacttacacctgccgaggtactgattgctatccacgatattgttcctgagaaggatgggccaccacttaaaaaggtatttccaacttttctatctggtttgaaagtacttctgaagggacttgttttctgcactcatttgctcaaaatcagtcgtgatactagacctacactgctgtgtatattttcctattggcatgctttctttactatccctatctcttttcgatgcatcagctctgcttaagttctgtggcttttggcaagtgtgcataaggaacttataaaacttcatcatcagttgcatatggccacgttatcataacttacgtagaggcagttatcataaatcgtaaattcaacagagacgaggtcatccagaaattagggtggaaatggtgggttgggagtgttggggattcaaataatacgttggtttaggtgtgtacgtctattacagaattttggtagcgtgaagcattgctgctatgtcatatcaaatgccctttttattttctgctatttcctcactagtaaaataggtatttcccagtaacttccaggcaagctatttacgcgaatattaatgattcatctcatgtcactcgctttaggaaggtagaaaactaggggcaatcagcaactggctaattagattgtcagagttgctatcgacaagattaatctgttttacccatggacgaccctttatgaaattctgccactatgctagctgttctatctagtctctattgatagcagagtcacatttgactgtgtttttttttgttttttgttttcagataacagatgcatgctcagcttgctttgaacaacgcactgttttcacgcagcaagtcttagcaaaggccctcggtcagatggtatgtcaaatatcatggaaaagaacttcctatttagttagatattgagatctgtgatactttttggtttcaggttgatcgaactcctctgcctttactcttcatgcgaacggttatccaggcaatcgatgcttttccaacactagtaagtgtcctactataagtttaaagacctccgtgacatatttacctaaaagcttttttattacaaaagaaccaaagtaacagaaatagaatttgaaataacccaaaagaactgcattcttcccttggcctaacccaaagctctctctagcttggatgggtctcacaaacccttaattataaagaaaatgtcaaagtaaagtgcaattagtatagttttagtctaagctatattataagattgtttagttgagaagtgacagtatatggtttaagtctatagatcgaactctggattcgtttggtcagaagtaaaagaactttctgattttttgtccaggttgattttgtaatggaaattctttccaagttggtgaggaagcaggtgagtaatttaaagatcaaacacaaggatcagcattgagacttattttctattttgtgtggttatgactgaatgtcttgccgtgtcttttggatgcagatctggaggctgccaaaattgtggcctggcttcttaaaatgtgtgtctcagacaaagccgcattctttccctgttttattggaggtacaagaaaacgttgtggaagaatatacgagtttagtgtattacccaaaaatccaaataactctttggtgttgttttgcagttaccagtgcctcaacttgaaagtatcatgaagaagtttcctgatctaagaccttccctcactgcttatgcgaatcagccaactatcagatcttctctaccaaagtaggtcttctaaatcaaacagacactctgttatcctgtattttaagtaccacatgtcagatactgaatggtgatgcatgttttaacagttcagctctttcagttcttgggcttgacaatgggcaagattcacgttcacaaatgcacccttcagatgcaacttcgtctattcatggggcggccttaacgtgactctctctggaagaatatcgccaagttgaagttattggaggagacaaagcacagatgattagatcctgtgtcaatggtgggagactggctaccacgcgtaaatctgactactaactacatgtctttgggattagtagcatgaccagtatggtagcccagcgtgtgtggtcattgataatttcttatttgttgccctttttgtgtatattatgaaaatttcaccttggccgtgagaaggggttcacatgtaatggatgtacaatcgcatcaacgttgttcctataaaaagagaagataagagttgaggataataatatcaagaccaaatatcaattgccattgagtttatacggtttcgagcccatcccaatttgagacaccctttaggtcctgtagtattatatctttttcctggaaaatgtaaaatcttatattcaacgatacctttttcctggaaaatgtaaaatctttcgtttacttttacaccctatctaattgtttgctatagcatcaccatttgtgttctgtattaagtatggtttttaacatgcggttgtttctttctatttcttctcttcttaggaagtgatgatttaagctctagactctagtatagactagactttgattatataggcggtgaatttttttcttcattgcaaaaaaaaaaaaaggaacaagaagaatttggttagccataggcgaatacaatgctgtggaatcatcaatgtccgaaggtaatataattccatctcatactaaaacaccaaggccttcaatttaattccaagcaactcttgcattcaggggaggctcacgattccagcaacgtttatccaaaatgcgtgcctcatcactatcctaaactaccctcgctcgtcttcttccattcttcatatgcttctttgatatatatccagtaatgagcacagcacatggggtaagtagaaacctgcaagacatataggagggagaagtcagatgattcttctgcaaacaaacacgcatagcaccatcaataggtagagaatccgaattttgattaaggatcaactagctagcttcaccctttccaaatccaaacaaacactgacttttcacggtcttgagttcacattaaaagttcggaaccttataaatcttaccagtcaaaactatcttcaaactatttcatagttatgagagcctgcagattcttttggatcgcccacccttgtggataagggacatccagggcatccaagtgaagatgccagttcagtatactcgagcaagctggtggaacaccttccatctcgctttcatcagccaccacctgctctataaatgatgtctcctgcttggaaacacacgatgtcatgtataagaaaagggttgactgcacaccagagaaatccaaagatatgggaaaaactcaaactcatacctggaaaccctccttcactgtgtctagttggcgggttggatgtgaaaagggacgtcgccaccttttagggtcccagagtatagtgctgttaaaagcaaatcccgacatatcaacatggaacctccttagtcttttactcttttcattagtgtgccatcctattacttgacttccattgcatactggaccttcaaggatggccttgtttttgctttgtgcgagcatagcaacaggccaagtcccaaatcggctacacaatgtaacagataagtatagcaaattaaaattggggacaaatactttagaagaagaaaagctttggaaatcaagccatcagcatttacactcaatggatgcttagattaaccaagacaaggtacaaaaagaatgtttaacagagtcctttccaataacgaaaaatgaagtattctctcaagtctcaaacaaacaagactgagcacatggcagagcaagcagaaaagtaagaatagaggcaggcagacaaaaaaaaactcagattctgtgcagaaaacttcaaattctcattactttcaacatcaaagtaataggcgtatattcggtgttcaacaacactagaatcacaaagactgcacgcaataaagccaaaaagatgccaataaaataagcgcagacgatagagttgctcaactaacaaactcaaacataaaccgcagtctctctaataagtctatttcacacaaaattaccatcaattagagacagcaaaagtaatgagcagtctttttgagtcacctgatttgtctcaagctttgaaagagctcaagcgagtagatattgtcatcatcagcaaagtagacaattccatcaagcttatgcaactcaatatgttccaatgcagtgtttctctgatgcactcctctatccttgatactcgtcatgttcctcttgcaaaccaagtgcctgtacatcactcccgtcttcctcagaatctctgaggtttcaaacgacgccacgttaccctccaccactatccacagcacaggcgactcaactagtctcagcgtttgagcaaccctgttcaagtaatacgcctgcatcgctctattatacgttggtgtgaccacaattagaagcttcttcggcacaaaattgacctccttcttcccattttcagtctccgccacgaaactcaccgcatctacagctgcttcttcccgtttcctattttccaaccgttcttcaacgtagggctgtttgatctcgaaggagaatcgatcggaaccgtttacatcttccatttttccgaaaggtgtcaaacctaatacaaatccaagaagaaagaagacgagaaactggtaaaacggtcgcctccatggacctctacgcgagcttttaggatcagacgttactccgaggagcttggtgagatacgaaagaaattgcgaagaattgtgtttgctgctactaccaccaatggtgaaacctttgtgtgaacctccattctcgtgagaacgatcgtgatacatcggcgagagagttcgccggattgacgccatcagataatctcactccaccgtcctatttttcacagctcccaaatcaaacatccaaaacagcaattttcgcagagatccgcaccaagtttgcaggagaatccgcgtaggatatagcaatttcaatctgaagtcggattgagtaaggtggttggttctaactcaaagtcaccgatctgaaacacgattggaatggatccgtcgccgccgagatctgaaattgagctggcggagaaagttgcggaaaaagcactgtttgtttgtttgttaaaaaaaaatctttaagctatgcgagttcgtgggacacgtggcgagattatggctcgtacactctggcaaaataatgattacgtttaagtttcgaggaaatggtctactatggtaaaaacaataattaaaacataaattggatttagttgtaattgtaaacgctgccaaaaaaagaaaacatgattaataagtaattctaagttttatcatcatataaagtaatggcctctacttacctattatccactatacttgaatgagttctaagttctaattacattgaaaattttatttattttagcggtaataaaaatagatataactcatatgtcaactagatttactattaaatttagcatgcatttcttacatcattgcaacacatatggtacaaaaagatattatattccgttttggtttttaacggtgcaaaaatattagacaaaattttaaaacatgtgtaatttacagtcctttttcgaaagtttgggttattttaataccagttttctataatatcaagcttggcgacgtaatatttgattaagcgattaattttttttgctgtggtgttttttttctttttctttttttttcaagtagaattagatttagtattgtatgtttgaaagcttagtcaaaaaaatttctcagttgttttgttaaatctatttttaacggtacaagcagatatctagtttcaaaaatagatttacataagtttttgtgtcaaaatattaaaaatttatgtagtgatttttaattatttattaaaataaaaatgtttaggtttacaagatgttaaatctattgatttgatctcatggcaaaaaacagataaaaacataaaataaaaacaatcaatttatcgactcaacgtatgttgtgaagcaaacggtatcagataaacgatacacgattctaaagttcttctaaagtgagctacaaaggaaaaaagatggctatgaaaattgtaaagacttgcaaaacaaaaacccaaagtagcataagcctttcattggagggcttcgtaggtagttcgtccatgaacccgtcattaatgaaggattataaataaatgtgatgaatatactgttcttcgtctccatccttctgatcaaacgacttggatgtacaaatccaaggtactctgaagcctacacaccacataggtgtacaaatccataaaatttgagcaataacccgataatatagcagaaagcaaaaaaatgtaatccaaaacctaagaaagtcctataaatgataatcatataagcacataccttgaaaagctcgaagagcttcttaggatcttcttcttttttgttgaattcctcgcggatccacttctcatccttagtggagaagggtttgtaggaatcttcttctggttgatagttgctttgaaagaagaagctccaacaagcatgtgttataagctgtctttctggtgtgggaaacagaactcttatatgaatatttataaaggtgttcattagtttccttcaatgtttacaatcttcctcatgatttcactagagacatccagagtacaaacgacttcgggatcggatgatttcttaagaatttctgaaacttttgtggatacttcagccatagaacaaggatcaaggattttaacaactgagtcattgcaagttatgtttacttttgcatactctcctccagtcatgatagatgattttacaaggagagaaaaacctaacagagaaaggaaaaaaaatcaaagcgtagagagtcgagaggatcatattcgtttacaaaagaaaatagaagatcgttactttagagatgaagatcgtgatggtttcagatagatagagagagagagacgagcgaggaagtgaaagaaaatacataaacttctattttatatcccaccctttttcttactatcaacaaaaaaagaaaattgtttaatgtcggttttccgattgttaaaaatatccgcttaattttcttacacacattttttattacaaaaaccaacttcaaactaaataattatgagggttatatatatgaaggataacaaacaaattacagattaagaaatactataatgaaggataacaaacaaatgacacattaataagaaatacttaaatttggcatgggtccgagatagttgaagactgacccctgtttaagcggattccaacttttaccaccaatttagctctccccaatcttgcttactactttcccttcccaccatctctatccatttttcctatctctctcaaaaaacaaagtgaaaaatataaacggaggatgcaagaactgccggattgtttgtacgaggaaaaccaaccaaccttaataactcctttatctcccacaccaaatcactctctctacctttcaaacctcgacgaccatcattttctcagattctctatcaagtacctttaccttttccaaaaatctatatcccctctcaccctgaaagattcgctctctagggttctagttgattactaccctttcgcgggtcggataagagtctccgatgaagggagcaagctcgaggtagactgtaatggagaaggcgcagttttcgcagaagctttcatggatataacttgtcaagattttgttcaactttctcccaaaccaaacaagtcttggaggaagctcttgttcaaggttcaagctcagagtttcttggatattcctcctcttgtcatacaggttcgtaatcatttattttatttttttcttgctgggaaacttatgatttcaatttcaaaagtcaaaaccatgactcgtattgtttccatattagttaatttcgtgaaagaattatattcgaatttgttttggagggggataaacgtagctcgaatattttaggtttcttaaagttagttggatcgactgttctgtttaaatataattcgtaggaataatctaaattgtttttaaattcctaactcctaaattgattcggccactttgttcttttcaaattagaaatgcatacttttactggtcgtgcataagcattcgatgtatcaataacataaagttattttctactcttaaaatacgtgaactttaataaagagattatatggaagaaaaagaagggcgcatagagaataatttgtctgttcaatcatactctttttcttttctcgtttacacgaaaaacaaaaccctttttttcttgcattgaattagttcattctataagtcgttttgttcaactcatgttatgtgttttattaaaactgcgtttctatgaacttacgtataaagtatcagcaagtttgattattaacgcttgaaagctagtcgaatgtaataataaatcgacattttgatatcttacgaatattaatgcctcaggtgacgtatctccgttgtgggggtatgatcctctgcaccgcgatcaatcattgcctctgcgacggcattggcacatcgcagttcctacatgcatgggcccatgcgaccactagccaagctcatcttccgacccgaccattccactcccgtcacgtattagatccgcgaaaccctccacgtgtcacacactcacatcccggtttcacccgaaccaccaccgtagacaaaagctccaccttcgacatttccaagtatttacagtcccaaccattggctcctgccaccttaaccttcaaccaatctcatctcctacgcttaaagaaaacctgcgctccttcgctaaaatgcaccacgttcgaggcactagcggctaacacttggcgctcgtgggctcaatctctagatttaccaatgaccatgctggtcaaactcttattctcagtcaatatgagaaaacgactaactccagaacttccccaagggtattacggtaatggattcgtactagcttgcgccgagagcaaggtacaagacctagtcaatggtaatatttaccacgctgtaaaatcgatacaagaggcaaaatcaagaattaccgacgaatatgtaagatcaacgatagatttactggaggataaaacggtgaaaacggacgtctcgtgcagtttggtcatttcacaatgggcgaaattgggattagaggagttggacttgggaggaggaaagccaatgtatatgggtcctttgacgagtgatatctactgtttatttttacccgtggcgagcgataatgatgccatcagagttcaaatgtccctgccggaggaagttgtgaagagactagagtattgcatggttaagtttttagacggaaaagataacgaagatgagaattctcgtgcatgctaaagtttctatatacatttcagtggtctataataaaagagtacttcacttgtcgatttttgattggttttaatatgttttatgtacgaaatattttcttatatataagtttgaaaacagaaaatagacatatgaaccccaataaagactaattaaagagagtactagagtagctcacttgtcgatttttgattggtttttattaaacacaaaatggataatatgatgagtttaaaaacagtctttctccatgctagtatgataatgatattgactgatcgatgaattcaaaggaatacatgttttagtttagttcatcaactttagcttaacgtacggttcttaaatcgaagccaaaattcaaataaatattaatatatatccaattttggtaatctctatcagattatagctttatgaaaataaaaaatttaacaatgattcaaattgctaaatgctaatatattggttaaagtgttattttctgcaaaagttcaaataatgttaagactatttctatgtagtttgatcatttcaatctcaaccacataaaaaacgacactatatattaattcgaagcccatatccattatcgaatatgatgaattgcttacaatcataaagtcaaagcccatatccattttataaatagagttagatatttatcttttttaggtcgcaacaccgcaatagatcttttccccaagtttcagacaaacataaagcagcagagaaaattttcaagtttcaaagagcttttccctcaccaagcaaaatttgggttagtgaaatctcaaattttgctatccaatttcgttaatccttcctttgttagagtcgatttcgttgtcctctgatctcatctcttgaatcaatcggctcctctaatcctttacctccttcacgtttcgtaattattcgatctgttttctgcagatttcgtgaatttaatttaatcgcctcctcgattttaatatttcgtgatttgatagaatctgttggaaatttcttgatgttgcgataatgggtcaaaaaatatatatgtgaagctgagatcagatttgtgtcgtattatgtcccaaagctatttaacaatgaatctgtgtttgctatttgcagatatttgtcagcaaaatctgcagctaaattgggacttgtcttgttagttcaaagattgaaacttttttggttaattgtttggcggaagaagatttacaatgggagaggagcatccgagaaagcggtctagacaacattttgaagcggaggcgagaaacgtatcgttgtttgaatcccctcaatgcgaaacctccaagtggtatttcagcagggaagagattgagcgtttctctccatccagaaaagatgggattgatcttgtgaaggagtcgtttttacggtcttcgtattgcaccttcctgcaaagacttggcatgaagcttcatgtgtaagctcaccatagtattactttgttgttttgtcatctaggaagaaatagtgtttgttctttggttgtttgctagaaaatctacttatgacgtctccttgtcttctgatatttcttggtacgtttttttagctaaagagggtgcctaatgcatgacaatggatagcctaactgttgaattttgtcgtagggccactgtgggaggtggtctggaggttctccaactatagattctcgattttgtctacatttatatctcgtgaatggaagaattatgtaataatagtcagaatttggtgtccatgcatcatatattgactcacttgtcacttctcatcggcaatgggaggatttgcatctgttgtgaatttgcttgggagctgttcacctgtttagacatgaccttctgatctatatgtctttgtatttgtaattctctgctgggttatcaaaaccctcagctgtgttcctacctttaccaactgatgttcttagttttctgagcaagtgcacgtctctctccggcctacttttttgaatcatctaatcataggtactggtgtatttttgtcttctgcattactcacgtgtgtcggaaaagtttataaatgctggtttcggtgaaagtgatgtctagctattagttgctgcccgagatatcataacattgaccttgttcatgttaaaggtttttgacaatctcattgcttcaggtcccaggttacaatatcatgtgcaatggtgatgtgccacaggttttacatgcgccaatctcatgcaaaaaatgactggcaggtaagaatgctttagtattcatatggttcatcaattgcgttcattggagctgacatgtaaatattaatgattgaatagtctgcaacagatatattgattcttcttacaaaatttgggttatgagcaatataatgttgatgaaaacaagtcaaaagtggttatttaatagttattcagtcttcctggttaattagaagtgtatatgattgctgctaaatatttccacttcggtttctcactcggtgattttgcagacaatagcgacttccagtctgttcctcgcttgcaaagctgaagatgagccatgtcaactgtccagtgtcgttgtagcgtcttatgaaataatttatgagtgggatccttctgcctcaattagaatccatcaaactgtaagtgtatacatacatctatgtattggtaaattcgcactgtgcattttgctaatttattacatgttgctctgcctgtaggagtgttatcatgaatttaaagaaattattttgtccggggaaagtcttctgctgagcacaagtgctttccatttagacattgaacttccctacaaacctctggctgcggctttgaatagactgaacgcttggcctgaccttgcaacagctgcatggaattttgtgcatgactggtaaagacccttgttaataatatctgcccgatttttcccctacattgagtttgaatcttattatgcattgtgtgtaggattcgaaccacactatgcttgcagtacaaaccccatgttattgcaacagccactgtgcacctagctgctacgtttcagaatgcgaaagtaggcagcaggagagattggtggttggagtttggagttacaactaagctattaaaaggtttgctgttcaaactctattttttcctctggtattattgcagtcatttgatcaagtgagatgtagtgtttctataatgttagcgctaggaatatgtggtactgtagctccagctcatgttaggttcttaccctgtgcacatattgagtttggaattaggtagtggcctgaacgaagagatgtgctgctattgattttagcggttgattaaaaataattggatgttttcattatggtgacagaggtaatccaggagatgtgcacactgatagaagtggacagaaggaggaatatgccacctccacctccacctccaagaagagagttaagttgggcaatacctgcagccgtaaagccggtccatatggctagagcttatccgtttcacagctaccctttgcagtcctatagacaggctggcatctggtgagccattgttgagcagcatgaagatgtaatctctcttagagtcttgagttggtttagcaataaaagatttccgtagagactcatgagagaggcagtgtagcattatatagagatccgagtgaggtgcttctgtctaagttaagcgtctcatgtatgaccaaagtggattctctcgagattcttggtctctgttctcgatagagagagattatgtatagaagtgtcccattcacatgttataatactagctgactttatatcgtttgtatatctggaatctatgtttttggtttctttaaaaagtttaaagttgttttgattttgactaattctctcattgttaagtaatttggtttttgatgaagtgctattaggtctgtgttgagttgagacttgagacgaacacaatcatcatatgatcaagcttataccgatcggataagtaattaaccggttcaattaactacacctagcttataccgatcgtataaaccggtcaagaaccaaaaccgcttggtttccattctagaccaaaccggattctagtttccattattattatcttttttatcggattaaaaatataaatccttatgtcaggagatcccattctctgtctctctgtctttctcccccaactcgcgaacaaagcaaaccctagatcatccatcggcgagtgagacggcagctcctcgtcggtaattccttccaccggcggcgaccactcaccctcagatctctcaatcccactcatctctgtaacattctgtacgctttctctctctctttcttcgcttttgtgatctattacggctcggtctctgtgcctcccagctctattttggagcactgcttcgtctctgtgtttatttggctcctttgtgtgtttctctatctctgcttttcttttgtattgctctgtttccgattttatatccatatgtctctggttatttggttatatctatgtgtgattctttgttcttttttccattgaattcaatagctgactaagatctctgccttttatcttcaatagttgctcaatcttttcgctttcgtaacataatttagtttcttgttgatgtttttgatatctaccaatctcttttcaatttatgtctatatgttgctaaatatcttgttcaatgactgatttcttaaactcagggtggaaattctgccatggcggagcatttggcttcaatctttggtactgagaaagacagagtgaattgccctttctacttcaagattggcgcttgccgtcatggtgaccggtgctcgcgtcttcacaaccgtcctaccatctccccaacactccttctttcaaacatgtaccaaaggcctgacatgattacccctggtgttgacgctcagggccaaccactcgacccgcgtaagattcaggagcactttgaggatttctttgaggatctttttgaggagcttggaaagtttggcgagatagagagcctcaacatttgtgacaaccttgctgaccacatgattggcaacgtatatgttcagtttaaggaagaggatcaggctgcagctgctttgcaggctctgcaaggtaggttctattcaggacgtcccatcattgctgatttctctcctgtgacggatttccgcgaagccacgtgtaggcagtatgaagaaaacaactgcaaccgtggtgggtactgtaatttcatgcatgtgaagcttgtttcgagggaactaaggagaaaactctttgggagatatcggcgatcataccgcagaggaagtagaagcaggagcagaagcaggagtattagccccaggaacaagagagataatgaccgacgtgatccttctcacagggaattcagtcatcgggacagagatcgcgagttttaccgtcatggaagtggaaaaaggagcagtgagaggtcggagaggcaagagagggacggttcaaggggtaggagacaagcaagccctaaacgaggagggagcccgggtggcgggagggaaggaagtgaggagaggagggcaaggattgagcaatggaacagagaacgggaggagaaggaagagggaggagcataaaaacagttgtttactcaaatcacaattgctgctatgtggtttctgcgtctgcttctctgcgtttattctgaaatcggtaaaatctggtgatggatttttcatttggctgttctaatttggaacttgaaatgagtggaatcaacttctttagattataaaatgtttggggttactttcttgtagttttgattaggaaaaaccgctctgtccccttgttattgattttcaccagtgttctttagaactttgtactatcttctgttggttaaaacttaaaagagttctagtttaattcgaagttgtctattgttcttcaatgcttgggaatactaacgagtttctgtgtcatggttcagttgtggcactaattcgggtcaaagcacctcagaattttagacaaagataaggggcaaacactttgggcctttgattgcattgatttgtgttccaaacacgtcagaagttaagtctttttctaaaccagttatcgaatgggttagtcttggttgccatttttcaaacatactggcttccaattggtcatgccaaatatgtagcttactagacctatatactttccaaaattacttcataagctgtttgtctaattcacgcaatgaatacatatatgcataaaatactccatatgagtaaaaagatgtataatatagcggaatatataacagaagtcgacaatgcaatatacatcaaccctaaaccataaaatcatgaaggtcattttggcttgtaggcgtcgtcgagtccctcttcagtgatcgttgtggttcttctggacagaatattcaaatggtcatataactcataactcccaaacggccaaaccattgttctaattgtgatgacgagtcaaaccactaatcacaataaattaattacttttttttttgtcccacacatgttcacaaatatatgtttagttaaaaaactcagaattaatcaattacaatgcattaaaatatcgctaccaccgtcacaccaccccaatacatccgtccgatctagcatcaacacccacagcccatcccattgacacggcggtgtcatttctaaagcatcaaacaaaacatgtcattgtttattcttactttacattgactgaatagtctgaattaacataatatatatatatatatatatttacggaattttatcatatgaattctcagttatggagattagtagttcaatagattggccacgtggagaagtctttgccgtcttcgcttgagtggatatattatagtaataaaacccatacgatatcttgttaactttttaaaagttttcttacatcaaaaatatacaagatatcaaagttcaaaaattagaaatctgaaagatcgtagctacatagtgaaagatggattgttgaacagcgttataaagtcacattaattccatgtaataataatacctcaaaatctcaaatacaacacatgcacgtgtctagcttgctgcgtttctatatacattatgcaactgaaaatcgaattataatgatactaaaatgaaatatatgatcttaaatttgttattgttaggaaaatataaagatgaggaatggggaaagtctgttggacagtgatgccctaaatttgagaaagcatatattcccctgctctaaagcctttgtcctcttcttagacaactttaaaataaataataatgctttcccatactttttaggaccctccttttaaggcctttgttctctacttttttctatttgacccccaacaaaaagagattatcttttcattttttcgtaacataaaaataatttatgattgaccaactacgactatctatctttaatttcttttgaaatcaatttaatcatgaaccattgtcagtacatagccttagcatcgcctttcctgtcaaaggatgcaattttgttatgttttggtagtttaattgaaaactcgtcatagtagacagatataaatatttctcttcatctcttttttgtgcttatgttatatgaatcaaatgagtatcccattaagtaaaagagaatgaatcaaagcagttataataatacaaaaaaggaagattgtagagttatatattattaaaagttcaaaacattgagaaaaagtaaatgtaaagatcaaagcttcaagtgttgagaagcatggcacctaggtggtctagtagactttggttataaatttcaagtaaaagaaaaaatgatcagcacacgaatttttttgtgccaaccagtaatagcaactcaatgatgtgtacactaattgacaaacaaaaactgaaaacaaactttgctttatataccattactattagtattactacatctaattaataccattgatatttattacttaaatcttcaaatattattttctatatattcctctacatattaatttatatttatcaattttatagtttaataaaatcataaataatttgaagcaaagacttcgttaattatacttataaagtgatgtgttatgaaagcgattggatgattgaaccctgattggtaacagatgtaaaacaaatttagctcctacacctaatactatacttttgaaattaatacttaaatttcttacagaacttttaaaaagagacacaaaatataatagattaacacaatatagttttttaagatctaaggtcaagttggataatggatagagggagcccatcatttcttaatcttccggtacatatggtgtatctaagtggtcatcaggtagtttgttataaatgagaccatggacgtaattagtgcaaccttagtttctatattttgcatattgtatctattagtttggctccatataatgattccaaggacaatcaaatatacaaatagacacattacaataaaaattttattgatgcaagtagatactctgacaatccgcgtggttagttaggtatagggcttgatgacactctagaatttcaggacgtaaattcgaagagactctatttttgattctcttgacgaataattaagttgtgcatgggccattcgtgctcgggttaggagttattgtacatgataagcttgttcaacaagagttcgttcatcttcgagattaatcgaattagatccagattactgctacaaaataaaatagatattggaatacataaatttgttttaaatattagaaacataacaagaatataaagaaggtgagatatgtgagcgtgcaagtagagacgagaaagaaacataaaaagtgaaaacaaagtttttcccatactctttttgatctcaacacattctccaacgtgcctttcttctgatgtgagtcttgttgctctctttttatatctggttgatctatttttcatttcttttatacttgtgaattattatgaactaactaattgatcgattaagttagttgttttccacactattaattagttaattaattaaacattctttttagatgcgatcgaattggtgacagctttatcaacagtacaatactcattttcgtaacttattgcacttttgagtcacactagataaggaatcatttatgtataaaatgagttcttcgctcttctaaaagcgttcatttcaaccaaaaaaaaaaaaaaacagccaaccataacatcagaatatgaagcatgttctttccaaaaccaataacacaaattacattgcacgacacatattatgtaacaaccaataaaagttcgccgcctcttctatatgctaataatgacaatcaactagcaccttgccaagttattatctcttgcataatttttttgctctatctctacttactattgattgtaatagttatcccctcctttcattgaatgtctctgatggttatggaattgaaattatgtcggactttctctagtgttccgatatagtgacttcgaccttaaaacacgcttataagtcaatacatggcagatatctagaaatatcgtttagccggagaaacataattttttaattcaagggagaactctttaattaatcaaaatgaaaagagaaaattcaagtaaattcattaccctttgactcaaaacacatagttttaaagtcacttatcaatattaagccagaaaactaaagcatttaaaacatgatatacattgatttcacatttcagtatatcgtaacttagttcagcttcttccggagggacttgacgtcatcatgacaaagagtgatgaatggtttcatgtcatgtactcctttgtaaattattttgggtatttatttattttttctagctgaccttggtggtggttcctgcagcttcaacaattattccacttggaaaaagtaaaaaaaaaaagccttggagatcatcatttccatctctagtagctatacgtaactgcctccatttaaacaacacaaaatgagtttcgttgttggctttccaactgagtaacctcataaccaaactttgttacttggatcctcaatatatatctaattaaagagaagcgagatataaataaattgttacctttttaaaaagttggttacagaaaaacaattgttttacgtatcagttatgtaaatatttgctttccatggaatatttattaatagaataattttcaactttgctatgatttcttacaaaaatcttagttttaaagactatttaacgtacaatatcatctcttatccatcaaaatagaattaaacgcttatttcttaccgtcgcatgcgcaccatgtaacatgtgttaagccttttttttgggataaagaacatgttaagttagaacgatgagttctataactaagaagttagattgggctcaatatacttggagttggacttgatccactcattttgagttatcgtaattagacatacacatgtacccctacaaaaagcaatatgtattcacatacataattatattcatagataaaattaagagagataaagaaggaagtgttatatactgtgggggtgagagtagacaaagatagatggatgccatcattctcgtctgagacaactgttgcaaagccttgggatcgaaggcaggatagcttgggacactaatcatggctttcatgaattttaatcatctccctctaattgcagagagagagagagagagagggcctaaaagctacattagataatacaaaatcatatatatacaaatactgaaaaatagaaaagtagggcatatactctagaaagcgagtccatgagagagaatcatttcataatatacattacaaatatagatttatttaatttgttattgtattattgaatgatttttcccctcctttcttttgaaggttttattgcttttcacaatataggtacttgaaatagtagagagagagagagagagagagagagagagagagatgcgtcaagctt

SEQ ID NO: 63 - DNA, 101305 bp, Arabidopsis thaliana
gaattccttggaaaggttttgtatatcttatcctattttaattgattttgtatttccatgtaggtgttccctcttaaaggggaactgttaaagcctcaacaggaaatggaaagacatataaccgatttaatcaaaaaggttagaacatatctttggctgcatggagtttttctttgtacctatttatctggatttgtttttagcccttttatgatgttaacagagcctaggggatgtaactggagaagagttcaatatgtttatggatttcctgaaaagtttgagtatatttggagggaaagctcctcaagaaagaatgcaagaacttgtagaaattattgaaggacaggctgatttggattcagagtttaatgtgagtttctcggtcacattcttttgggcatgaacttaatttcttactttaatacaatggcagtaaaatgatttcattcctcgtagatgtttattgatttttaaatcacccaagtggtcgtcgttatctcggaatgaagtatgctagttttttgggtgtttgtgagattaaaaggatacttctcctggcacaggctttcaccctctcaacaaaaagcttataaaggatagataatctttagatctgcgattcttgcatgtgttgatctctgttgtttaccttgcgtattttttgttgtgaacttgtgatatctcattggtagtatgtgagaaagttgcctctaaattttcatgaagtcaggattttttccgaagtccagtatactgtccactgcccagtctaggattgaacatagggaaggggttaacagttttcttgatgcaaatccataggaagtgagtcataaaatttgataacatctgttttagtcaccatgggaatatctactaaggttttacattagtaaataaaattaatcttattatggtgattgtaaaggttgaaatttaaaattctgaaggtttcattttgatgattcaaaattatgccacaactactgatgttcaaatattattttcccaggtttcagatacagatcatattgacaggtttatatcatgcctgcaaacggcccttccattctttgcagtatggaatcatagctattactgcatagcacttggatatttcaaagttgagatgttttgaatcatatatatatactaatttcgtcctcttctgaacagagaggtgctccaggtagcaagtttcttaactacttgaacaagaatatcatgcctgcttttgaccaggtatattgtaactttctcaccttttcgtttaggtgtttgaccgtagttttgtatgtgcatgatctctttgtattcccttgggcatattaagaatagactagttaatggtatcgagggcatgaagtcacatctgaattactgaacgtggagcaactctttttgttcatacatgatattgccacttgtctgtcttgttgtttcattttggtaaaatctatattactccatgggtgagcataatattttgccaaatccacttttactagctgccagaggagaggaagcttaatttactcagagctcttgctgagatgtccccatacacaacagctcaggtagcacgtcagatacttccatcaatagttcagctcttaaaggtacctcttacgaaccaaattctcatcttgtcttcatatcttatattaagaatttatggacatacatattatttactgttatcatttctctggtgtatattcttattttgaacgtaaacactgtaactgttacgatttgctctcagaagtacatgcctgctaggaaaactggggaagaaatgaacttcacatatgtcgagtgcctgttatacgtgctacatcatttggcgcacaaggttgtctaactatttttagttgcttggcaaggtctcttattcttccttattacttatctatttctgttgaacatataggctccaaatgcaacaaacagcttgtgcggctacaagatagtgactgggcagccatcagatagactcggggaggacttctcagagttcaacaaggaattcactgagaggtactgtgaataaacagtagtagaatgagattcagttttcttcttgtaagacataaattttggtaaactgttttgaaaatattgttctgatgaaaatggacgttgcagattgaccagtgttgaggatctaacgaaggcaacaatgaaaaaacttactcaaggaatgtctgagcacagcaaagccatgtcgactgctaagacagatgaagagaagtcaatcgtggtaagaactttaagttctcactccttctgtatccatttcatctcatctttctttgctggtttaatattaccaaagctgctttcagaaaacgaagaagcagagtacaacaactggactcaggacctgcaataacatattggcaatgacaaaggtgaaaaacagagccatattttcttacctctttatgtcccttgctttctaggtaacttgtatatatctgtttaataaatcaagggtgttagccaatatgactgtttggtatgttacagggattgcatgcaaaagcgccttcatttatcggaaacaccagtgttactctttcttggaaagaacccacgaaagtgacgaaaccgttagcctctacaacgactgggtacaagccaaatcaactttgttagttttgcaggtttcttttcttgttttgcaaatgtggaaaaactaatgtttgtacgtttcatgtggctctaccacagaggaaaacggcctgcaaatggagccggtaataacgtgggtgcaaaaaaggctcgtgtgcagaatcaacaacaggttgtgaacaaaagatctgagggaatctcacacggtggtggtagaggcagtcacagaggccgaggccggggccaaggtcagggaagacacagtggtggtggtggcggccgtggccgtggaagaagaggcttctggtaatttcaaaggattctccatgacactcttttttgtctgttcttgtataacagagtatgtttatccttcttgttttggctcttttaggctcctaacattcgacaaacaaattaatctcttttgcgatttctttggcttctcctttatatgacaaattctttgttttcttttctctttaactaccctttctgggaagtcaactgtcctaaactcataatgcaatagtcagaaatgattaatgccaaagtaacagtaaaaaatattaatttataaataaccccttcaaccttctctgtatttatcaacttaatgtcactccatgttatatattcgacaatgtaactctgtgtttcaacgcccatgcatccttccaatggcacaacttgttctgtccctgacttctctctttctagcctctaatctttaaatgatctcatgaaactggtgtgtaacttcctacagaatccaacgaagccaagcccagagctattaaagagacttggtgagtacgtaacatgatggtgattctgttttgtggtttctgcagatatatgaccttcttcggattatttttcaatctgcagaagcaagtgtggaaacagatcatgcttctcacattaattcctttcctcattgtgaaactttcagagctattcgattcacgatcttggagacactattgttctaatgacgctgatggctgatagtttccacttctgcaactcttttgcttttggctctttcggtatacatatgtacataactttatagctttactgaattaagttcaagattttgtgtctaatctttgacatattatgaatctctgaagcttttggatacgagtggactaaagaatagcttggataagcgaggatttagctcatgtccgaagtgaaaaagaaactgcagagagatattcgcttgaacgcattctgcaagatggacaactcactagggaaagcttgaaaaagtaaaccactgatcgattgttttgctctggttcttgctttggtttttaatagaaaactaactgactttttacaggctaagggaatcacttgcgctgtaagtttttaaaagaagaacattctttctgttccattgctcttactggttctcggtttttaactttcaagagactaaaaactgctgtgtaggcggcagctgttgctccgagtctgaaggtgggaaagcagaacaaaagtgttggttagaaacataaataacgctttgtctagaaacctaaagaacgctttgtctcttcacttctgtgccaaaaaaagaaaagcaagaaacagcatctctcacattttcacaggtacacataatcattgattcaatcttggttctttagattttttctttctttctttcttgttgctgaatcttgaagttttcgggttcagatctacagggatgttacattcaacaatttgatggggatgtcgagaatcttagtgatagtgtacgccaaaagattgacatggaattgttcaacagagaaaatcttgattttgtttccctgcttcttcctttgtatcatatcccttcaatcattgtctttactacatttcaatgtctcacattgtaaaaggaaaaatgtacagagaagataaaatcttttgacatcgatacatagttatctttctatgcaagtaactctggtacagtccttgttctactaaacaagtatacaagttgtattttctagttccataactctgataaaacaaaattggccttggtgtctacattgacgtttaaagttgtataatgaacattattgatacacatattaaactagaaaattagaagtttgttcaaacgattttaaaagtcaatataatagtcaccaaccaatcatagatgcataattaaagaggtgtcaattcacgttcttctaaaatccagcctcagcttcatcaattttataattttaccaacctcaacaagtatttatttattctaatatatgataataaacctcgagggatattatgataaaactatataataatcaccggcttataataattagaaaggtggaccatttccgttttttaaaatcagactcaataaatgtgaaagtccagtgtttcaatattttaacctcagtttcatcaattttatataccttattgtctttcattattcttttacgtaaaacccttccaaaaatcatgttacattgcttaatttatgtgtgtgtgtgtcagtgtattgcttaatttatgtgtgtgtcagtgtatataaatatatgcagcgtaagaagagaaggatcagaccaaaactattgacttaaaacactgtttcaagtttacttccatggcacgtcttactctgtttctgtcttttctttctctagctttagtctctgttgtaaactgtcgtgttttaagttctgtgtctgaagataacaactcctccatcttggtctccgatggagtccaagacagatccagcaacgactttctcagtcttaatccgccaaatctttccgagagtgcttgtgttcatgtctacgggtttcttccatgtgcagacaatattgaaggatatgtcttccaagttttctcctttggttgtctattgataatcggtgaatactttttgtctaaaggaaggtctaagctctttgtcatcttcgaggtcggtttctttggcggaattatcttccctctacttacaatgttcccaagaattgcccttattctatgtaagtcatctcttcttttggagaaataacctagacagaatttgagtactacaaaatatcttaccattacgttgggttttgatctcagccactggactgataggaagccgtgaaatagcaaactcgatgacgggtaataatgttgcagttactgttggatactctgtctttgctttgacaatgcaatggggagcttgtgttgtctttggcttgtctggtttgagatcagatgatcagtccataacttgtgtaagatcttcttgtccttcttctctttttgagtgtatagaatcatcaagtgatttttataatttgatacaggacataagtagtccaagaagacaagttaagaagagcattaatctattgaagaacctagctggtatttttaaatcttacaggtttcttgatttttcgagaatcttctacgcgagactaatttgtcttttgtgccgtttctctatgcaggagctagcattagagcagatcctaagaacaagaaagcggcagggattatgctcctgactttattgcctttcgtcttagtcacattttcagagacatttcacataaaatcttgggatgacaatatggttttggtcacactcatattctctggttctgcaactgttctctactttgtttatttggtaatgattcacaccttcaaaaaaatgatgtaaagcttcaagattcatatctttttgtgcctaatcttttttttttcaaaacccgcagtattttgataaagcggaccaagtgaagagcctagaatacgcgaagtttgagctcatgtcagaagttcataagcacttgcagaatttttcgcctcaaagccttataagaaatggacaactatgtcaagagagcttgaaaaggtttgtttctacattttttcctttgttattctaattttaagaaacgctctttttatttgattctgtttctgtattcttactggttatttttattcagtttgttcaaaaagtttgatgtcaacaaagacggaaagatccaagtatcagagttaaaagatctgacagtggactttggggtattagggagagtgaagtgtgatataaatgagcttgccactactttgcttgctgatttcgacagtaatagagatggtgagatagatgagactgaattcgccattggtatcgaaaaatggctgaaacagtacaaatttagcttcaatggcaccgagtcacaaggagaggacatagccgtaagtgcagcacaatcttctcataacattttttacatgtttgatcagattaagaaattgggaagtgttaactgcaggaggatgatggagttttgaaggtggaacaattactaaagggatgtctttttactaagttgcttacaaagagaaccttgaaagctgtcattgaagtcattatagggattactattgtcagctttcttgcaatgcctttcatgatgaatatcgaacttttgtcggtatcagctggagtgccttccttctatgttgtctttgcagtgatccctttggcaagaaacctaaagaacgctttgtctgctcacttctgtcgcaagaaagagaaagcaaaaattacatctgacacattttctgaggttagttttcttgaaactcacgtttattaactcggtatcaatattacccttatgatctttatcagagctcaaaggtgaatgagttttgtggttcttttcttttgtagatttatagagatgttacattgaacaatctgctggggataacaattatattggcgattgtgtacatcagaggattgacttgggattattcaacagaagttctcattattgtgatcgttggtctcataataggtgtaccggcctatgtgagatcgacttatccattttggatatgtgtcttggcctttgctctctacttcttctctcttatcctaatctatctccattccaagtctacctttaatgaataatcagtgaatatttccaaattgtttttttttttgctttcaagatttcatagttactattccgatttcgatacgctatgtattttgaaagttccgtcgacgttttatgtatatgagctctttgatgattgttaagcatccggagctagataagaattttaaatctttgatgttatgaatatctatgaaagtttgcagaaattgtgaaaatggacgttcaatgttgacactaagtaaggaaactactatacaagtttgcattctcacttggagacatttcaacgttttcagataatacttttctcaaaatcactattcagaaatgaatgttgaattcatatctgttagctataccaaaagaatatgaatccaaaaaaaatcaagttctaccatataattgacacacatgtgttgaactagttgattctgtatttctttattttttccaacaaatgcatttttgtttttatcagcgaaagaatgtgaagtacagtaaaacctctataatcttatgatcgtgaaattttattaatttatcgataaattagtatttattaatttatagagatatttgactaattttgtaatatttcaagatttttctttgagaaacaaagttttttcattataatcaaatatcattttataaccaattacaagtaaaaaaaatcattattctgtttagaaaacatcataaaaagttttcgatgtagtaaaatattatagacgaattccaccaaaattaaatgtaatttttttaaaaaataaataatactagagaatagagtcctattaatttatgatattgatgataccatatatttacatagaattttcggaaaaactattatcttattattttattaaattacattaaattttacagtgatatgattcaagagtgaagaaatttaattaatttataaatgattattaaattatcaaagttttgtatttagatttttactgtagatcatcaatcgtcaaacattccatgcctaaaaattaattttccaaatattttcacgaaatgttaatggtagacatcacatcgggtgcttatgtaaacaaagtcctccccattggctctatgagcctttctaataatataagttgttgacaaaaaaagaatgacatcggctgcttttcacgcaagtaagggcattgaatacgcgttgtggtctattgtgcaactgtattttgacgtcagttcctatctaatatttggggttaaggtgatgtactggagattccacacctttaaactaagcacactagttcttatttaaaccaaaattcaaaagtcaatagtccttaacaaatctatctatattctaccccactgacccggccaatcataattagagaggtgtaactcacgttctaacatttaacaataattcagaaaacaaagtctttctttatttactaagagctagtcgtaataacttgttcaactctagaaagtctttcttaattctattacgtaaaaactaaacagtaagaaattgctatagtaagattatgtttctgttggtttctgtgtatatatatatatgttggagtcagaagagacaaatacaacaaaagtgctcattataaacactgtttcgagtttacttccatggcacgtctttctctgtttctgtcttttctctctttgatagctttgatctctgttgtgaactgtcgtgttttaagttctttatctgagaaagactcaatcttggtctccgatggagttcaagacgggtccagctacgagtttctgagtcttgatccgccaaatgacattaccaagaatatgtgcgtacatgtctacgattttcttccatgtgcagacaatgttgcaggatatgtcttccaagttttctcgtttggttgcatcttgatcatcggtgaatacttcttgactaaaggaaggactaagctctttctcatattcgaggtcggtttttatggcggaatcatctttcctctccttactatgttcccacgaatcgcgcttattctctgtaagaagtctcttcttttggtttttgaatctatatatgttgttgtattaagaatgtgagattataagctctattctggatttgttctcagcgactggactggtgggaagccgcgaaatggcaagctcgagggttggtaatatcattggagttactgtgggatactctgtctttgctttgacaatacaatggggagcttgtattctctttggcttgtctggtactaaaccagaacagcccatagatttatctggtactaaaccagaacagcccacagaatcatctggagaaaattcagtaagttttcttcttcttctttgagtttatgaattatgaagtgatttcgattataatttgatacaggacgtaaagtgtccaagaatacaattttactggaaaaaactatcagattacgttttcggtatgtttagaactcttacagatttctgtttctttggagaatgttaattatgtgctcgagcctaatttgtatctttgttgttgttgtgtgcttattatggagcagctagtgtagaagcagatataacgaacaagaaatcggcagggattatgctcttgactatactacctttcatattggtcacattttcagagatatctagttcacaatattggaatgacataatcgttttgatcacactcataatctctgcttctgcaacttttgcctactttttttattcggtatgagtctccccaaagattattcatatctttttttgtttgtagtaatcttgaaggttttctttgtgaaaaactcgcagtattttgatagagacgaccaagcgaagagtttagatcacgcgaggtttgagctcatgtcagaagttcataagcatttacagattttttcacccaaaagccttataagagatggacaactaaatcaagagagcttgaaaaggtttgaaataatccattttattgcaaattaagcactaattgttctgtttagttatgtgttcttgattactgttattatatattatacagattgtttcaaaaaatcgatgcaaacggagatggaaagatccaagttgcagagttgaaagatcttacggtggagtttgggatgatagggagagtcaagtgtcacatagataagcttgtccatacattggttgatgatttcgacagggatggagatcgtgagatcgatgaggctgaattcgagattgggatcaaaaaatggctgaatcagtacaaattcagcttcgataccaccgtgccaccaagagaggaccaagctgtaagtgcataacaatcttctcaattcattttttcttacatgtttgatcagattaataaatatcaaaaacatgttgattaattgcaggagggagtaccaattctgaaggtagaaaagccagagcagagtcttgttaagaagctgctctcatggagaaccttgagagcttcccttgaagtcattttagggatgctagttgtcatctatcttgcaagacctttcatgatgaacatccaacttttgtcggaatcagctggagttccttctttctatgttgtctttgtagtcattcctttggcaagaaacctaaagaacaccttgtcagctcacttctgtcgcaagaaagacaaagcgaaaatcacatctgacacattttctgaggttagttaggtttcttgaaactccattaaatcggtattgatgatactcaaaaaactaaattcttttttcttaaaattcttttcttcttatgtagatctacaaggatgttacaatgaacaatctcatgggaatttcaattatattggcaattgtgtacgcaagagaactagtttgggattacacaacagaagttctcattatagtgatcgttggtctcttaataggcttaccggcttatgtgagaacgacttatccattttggatatgtctcttggcctttgctctctacttcatctctcttgtcgtagtgtatttccatttcatgtctctcgaaaagggcacaactgtcacctttaacaaataatcagtgaaactgtccaagagttttttttcctttttttttctcaagatttcctagtttttcccatatcgatccactatgtattttcatatatttcgtctgtggtgtatgttttacaagctgtttggtccataaatatagctctaaagtctcaatctttgaggttatgaattatctcttaaagtttgcagatattgtgcaaatgcttgacaacttaactcttgacactaattacgaaatctaaaaaaagaacatagagatatttcttcaaaattgctattttgctgctcttagaaatccacagtgcgctgcagccatatgcgatctgtctgatagtgaaaagaaaacacgtcaagcttcaaacttgatttccatataattcaatgaaatgctaatagtacacatcgattgctttgcatgcaagtaatggttttgatcatccgttttcgccctttttgtgcaactttgttttgaccaaaagtgagattgattcctcttattggcattaataaggtgatgtagtggagatttcacggcattaactaaaaacactagtaattacttaaaacaagttcaaaagtcaataggtttaaacaaatcataattagagaggtgtaactctaaaacaagttcaaaagtcaataggtttaaacaaatcataattagagaggtgtaactctaaaacaagttcaaaagtcaataggtttcaacaaatcataattagagaggtgtaactcacgttctgaagttttaacaataattgtcgaaaacatagactttctttaaatattgatcttttttatttgtcatatttcttgcaaaacctttcatgatgatccatcgagtttgtcagtatcagctggagtgccttccttttatgtcgtgtttgtagtgatcccaatggttagaaacttaaataatgctttgtctgccccctttctggcaagaaagacaaggccagaaacacatatgatacattctctgaggttagttttatttaagcccaatttcaatttttttctttaggtaaaagggcccattttttgtttgttttaaaatttattaagaggtttttatagtttttggttttgctaaggggctttcaatacctcgacttaccctttttggatatgtctctcttccccttatctatctgactatcttcatttctcaagtctctagatatgaaatgagaaactcaatgaaacccttatcaatattctacaagtttcaatacgttttcatatgttactttatgatcttggtgtaaaacattattgtaacataatgtttgtatttttgaagttaagttttgtctccatttatacagtcttttgattattaatcttaaaggcgaaatagccatgattaagtatgtttctttcactcgcattatggttttggttttttataagaaacgaagaaaatccaagtctttggcatatcttttgttacatatttatccaaaactacaaactcatggtgtaaagattcgaagttttgaaaactgcttagaacaaaacttattataacttaaggcgaagatcaatgccatgatcagggactgtgtcatatctctcggttctcaagctgaatgatcgatcttggtcgcgaataatctggtcattcgcgggtaagaagctgtagaatggttttttgtttaaaggaaaatttgtaccgctctttcgttgtataatttcatgatcatcctcttctttctgtccatactaaaaagattaggaggatgaaaatggatttgatctgatagaaacataaagaaacttcaatacctgtaaaaagcgcgggaaaccgagtgacggatttgcaaatatcgttgtaggaggactggctgaagaaggagaatcaatagtgattggatttcttattgtggttcctgaatcttggacatgatttttcaatcttaggtctagtgatctggtttgtttagcatctctgaaccaattccaaaataaaaaaatgtcaaacaaagaaactatgatcttagattttctatacatatatataactcaagaaacttaaccctaaaaacaaaccttgagatagttgtgctcggtccaacactacatttcgcggtatctgccataaaatgccatggccttttcgcagacgagatctatcaaagaataatcaaaatagattattaagaattaaactcaaattgattactttgattttgtttcaaaaggaataaactcaaaacattaccttttcttcatctagaaatttagtgacattgtcaagagaagatgtttggcttgaaggaggctctataaactgataaaatcctccagatccttgttttggtagattcatctataaacaacaaacataaacacaaatcagtctcacaaaaaaaatatgtaatttatcaatctttgaatatgttttttttttgtgtatataccggagggaggtagtgaagagacgaatcatgtttcctctgaaacactggagccggaggaatcaaatcactagggaaagatccggcagagaaataagacgaaaacgggtaaactagaccggttctgtcagtgatggttggagacttctccagggaaggaggatgatgaagagtaaatggtgcggccgtagagatgtgttgttctccgagacggatcttctcgagttcagcaacaccaggtcctctacgtgggactcttttttttcctccattattatgtttctgtttcttcggacacaaggacgagtaattatcatcatcttctctgtttccataacttacactactcgtcttactacacattgtgatgtgttctctctattacttaagtgtgttttttttgtctcttggtgtctagtttatgaatatacaaaagagaaatgattgagagcaatttataatggtgaaggaaaaaaaggtggtggagaaaaatatgttgcaaaaggagaaagaaataaaagtcattaaaaataggagagattaaaggaaagtaaatctgagacaaaatcggctcttctggcgtagtgctaaaaaaagttctgagattttaggaattttcaaactccatgtttttagctttctaaagatctctatcatttttttttaatgatttaaattttaaaccacctggagagagatatcatgaatccacatttatttccgtgattttttctttgaaaagttgtgcttaaaacaaaaatgttgtgtgcttttcttcaattctattggaggaaataaaaatataatttagatattttaattttgcttttatttcaagaaagaacttagaaattacttgataaccccaatttttttgttttgctgtaacaatatatttattacattattggtaaggcatatatgatttgtcattgttgtactcatcacttgtaatagtataattaagaaaaatattcttaccaaaggaaaatagatttcatatttatttatttattgttaataataaaagattactatctttcggtcttcttagttttactaatccacttgttgtccacggttgtgatttgtgaattggctggatggggtaaaattattttggttccctttatttggaataatatctaatttaaaaaacaaaaaaaagaaacacaaaaatttggtcaaacgtaagaacttaagaaaagtaattatgtaatttctatgtttaaaaggttgaaggaaaaatgcagcgaacagatagatgttgaatttgtacaaatagaaaagaaaaactaaatatgggaagtagacaaactagaaaagttttcatgtggattacaaacgaggaataaaagatagaaacaaatcttccaacttgttaattagtacttatatatgtcatacaatattgaccaactttttgtttgtcttaagcaattaattatttcatcaaaattacgaaagaatatatatctacggggaagctaaaagattacacatcaatttagtcagtatttagtcttgggcgtatctactaagtaagatgaagaatataagacaaagatctttttaaattggagaaaatatataagaaaatatagcgcatttactcttagatatgggataatcagacaaaaatcacatctttaagttaatggactgtttccagcttttgtaaactcgaaatatatctttctttctataccttattttctgtaaatctatttgagctcgcataaaatcttcgtttcaattataattttaatgattcaaactaatttttttataccagttatagagtatataaattaatgtgttaaggatgttattgtaattacctttgccctcatctatcttgtgtatacattgctcatctaataaatcaattcactctacaacaaaaatttaaaataataattaaattttagaatgaattgctttattagatgagtaatgtacaagagagattagaaaaggctaaatacaaaattacgattaacacattaactatttatcctctatatcacgtaaaaaaccttctttttaatgaatgttcaatctattcacaaaaaaccggtattacatcaaatgcaactgatttttgagttgtttttaacatacgctactagatagagtttagaaattatctcctagtagaaagccaaaatatgaacaattatcgatgttttccccaaggcttgaagttgtttgaggttcttcaccatgtcttatattatttctctttctcaatatggtgtggactgtattttggaacatatactgcaatagtaattagtagagctttcatttcgattgttgcatccgttaggagtagagtgatttgatcccaaactgaggtgttacttttcttgacgtagcccttttactagctagcttctcacatacttgtcttgtgaacgagcattgaaagaagaggtggtgcttattgtcttgtctcaaccggttcctggaaaaatgtacaagtgtagtcattaaagtattacacttctccattcgttcacatgtagtcaatctgtcatccattgcaagccatgttatgaaagcgtagttaggtgcagtgcagaagatactaaaaagtaaaaacttcacatcaatgcttgtaatagatactaaaacttcacattttagtatatatatatatatatatattgattcgatttatataaagtggtttatgtttcctgaacttaagaaaatccgaaactcgaaattgttaaaacaaaaaaaaaatccaaagttattggttaatacaatttaggcaaatatggaaaaaaatatcggtacaactgtaaaattagtcttatttaagaataatcattcaacattttattctaaaaagatatttgatatagcgttcattctaccgacaaaattactgtctgatgatacccggcataaaaaaataaattatagaaattaatgttacacttagaatataggaatatagaatatttcttattcacgatgatgtcaaaatatgtacatacataatttggataatattcctcttctacctatataaacattagggttttgagcaaaaaaaaccctcaaagtcgcccaattttgctactttaccctctacataaaaaaaaatgcaaaataattatatgaagtcaagaataatacgcagtatatccatttttataactttacatatattttaaacgttttcacgatcacatacattttattttaaaaattttaaagatatagttgaattcatcatctcgaaaggttcaatttgatatattatttatcaaattttaaaacttgacaataacggaaaagagctatattacttattgtcttagtatgattattttgcattttttatacgttaaaggtaaaattgcaaaaatatacgattttaaggtttgttttgcattaaaccttaaatattacctcattgattgcggctaaaggtaaaatgtttagaagaagaactatgatgtaaagtttcgaccaaatatctgagaggcatatgagcttggaccagcaatatatatatccgtattgttgtgtctttatatgcatcatctgcaaaattattaatccatattaataggtgattctttctaatacaatatcacctcatcatcatcatcatcatcatcattggtttaagtataactgatattgatagttatactgtataatttcatatgtagtgtatatatgaacaatattacaaacatatacaactcatgtaactagacaatgcgacaagcattagggttttcatcactgaacaattgtggagcgtatacgtagtggacaaagtaaggtatgtttccatctttatctttttggccctcaacttttactatctctttatactccacaacttgagtaatcgttttggttgttacttctacttttacttcttctttctttttttctccttccttcttcttattctcctcttctttcttcttctcttcctctttcttcttctcatcttccttcttcttcttatcctcttcttccttcttcttcttatcctcttcttccttcttcttctcttcttcggtctttgagcttatgatctctgcatgtttgtgaactttcttctttatataggctaagagttttgcggattctatcgtcccttgtaccgttagagtttgcgcctttgtatcggttttgacaatgtggatagctgccaaaataaccaagttagaatccaagccctgaactaatgagtcaaaataagattctgaaatttattgcgaattccccacttaattattttgaatatttctaacgactcaatcttacctttatgtttcaagagtttgtgctgaagatctttgtcacactgtgcgcaatgaatgtgtacctttagtactgtcgtacgaataacgtcctgtggatgattaaaagtaaactcacaaatgctttcacacacgtataggtacatatatatatggtatgcgattatggaagcaaaattttacctttttaatctcggtggtcttcttttctaccacagaagtagttgttgttgtagtggtggttttcttaacctcagaaggtttgggagagatgagctcaacttttttcttgctccatttctcgatttgtttgtgaatcttcacgacttctattttcccttttactttgatctcgttcttctccaaatcaaagtccacattttgaacccctacaatattgtattattctttaatcaaattaatgctactacatcactatatattaattctccacataatagttaaacaccgcgcttgtgaagaaatttattagaaaaaactctataggacatgcgggagaaaccaaatgtaaataactctcatgagatcaacagtagatcgacccatctctgaaactactttctatatgggaagacttgtaatatcttaaggccatcgtctagacaatgaagcctaaccttggaatcgaaggagaggctttttgatgtcgcatgcacatttccggcagtgaaggtgaaccttgtaaacggccgtgatgatttcatcgcctttctctttcttttcttcttcctctcccattttttttgttctacaactctaaattttagttttgactgatacgattattattatgttgtatagtttttctttggtctgtacaactgcacgtagaaaacgccaaggagaaaggaaattaggacttcaatataatcacgacaagaaacaatctgatatgatcatataaactaatgtaatgtaatttgaaaaatgacaaattgtttgacacgttaaataggtttggtttgagtttatagattcagttcatttacttggttactaaaaaaaaacattcatgggtgtgcggcgtgtgctgcacaaacggaaaaacttagaacagcaagatatatgttccaatgcatggcatggtatagggattcacgttctatatttaacgaagtacaaataaccacgtctataagctattttaaaccaccgatgcatatgtttatgagccacgaacaagaggactaagatatgtactttctcagaatttagatcactgtcatgcttaatatataacagaatacaagaaaaatctcaacggtcatggttttatatatgaaaaagtccatttgatcgtgccaacccttcaattacttggttgaattttgtaaaaggtggtttaccagttccaatgctatatattcgtattttagtttaaataagctagctaacaaattatatatgtgaaaatgattacctaagacacataactcatatatgatatttaaactgaactagagccacaagctccaaaaagaaaaaaaagaaaatccaactaattgaagtttgatcattgatgatccaaattccaaaccatttgaaaatggtcaattatttgtttcgtatgcaaaccttcaattttgaaagtatttatgataattaacaaatgaaagaaaacacaaaatcgtttacatcaaatttattacaatcgcaaagatttggatttgtagcttttaaagattgaaatccaagcgattttttttgtccacatgtttttacaaatcgcatacaataaattacatcgatgagtacacaaaacggtaaaattcttttcgcaaatttaaaataaaataaaaataaaatataagatacaaaaaacagtatcaacatctaaaaaatacggattttgtgattcaattacaaaaacgataaaaaatagtatataccaatacccacagctgcaataatacgtgtttactaaaaaaaataaaaaaaataaaaaaaaaataaaaaataaagccaataataaagcttttcacatgagcgaaagaaaagccaaaaaaaaaaaagtcacaaaaaaggagaaacacgtggacactcacacgaggaggtgtctgattttgtctaattaaatttgagttttttttttcttctttgaaatcatatgattgatctacacagaatccatttccgcaaatcggattcatgtttttgctttatcgtaggcttccttcatttgcacgaacaacaacaacaacccttctctgcaaatctatggagcctgcgataacagcgacttcttcttcttctttcggtggtggctcttctcgtctcgccgctttagcccagcaacttcgccaatacaagcccccaccttcttcatcgttcgatgactccgaggagatgcagacagatcaggagaccgctgggaaagtcgtttctcaggttgggtttcaggaatctattgctcctctttcgaaagaccctgataggtttaaacccaagagagccgctgtgttgatctgtctctttgaaggagatgatggtgatttgcgtgttattcttactaagagatcttccaaattgtctactcactctggttcgtatggtttgcgatttaaagttttcgtctttttactttgaaatcattggcttctttgattttggtcaatgagtatggtttagtgttgaatttgaggtggttgtttttttttgtggttgcaggagaagtttcattgccaggtggtaaagcggaggaggatgataaagatgatgggatgactgctaccagagaggctgaggaagagattggattggacccttctcttgttgatgttgttacttctcttgaaccatttctgtctaaggtattaataaatggtgttaattctccatgtcttattggtggtgatgcatgctcttagtgagatcagaatttgggattggcattaaagttgaggttatatagactatcttgttgatctgtgcttgaacatcgaggttatagtatgagttactagtggttctatagaactttggttattgaacttccatgtcagctgtattatatcatagtagcagagatctggtagctaaagtgacgttcttgatcgctatctagttttgattctggatgttcttaagtaggactaggtgttaattcggaagaataatgttatctggattatgtcaacatttctgatagatatttttcttacatgtgcgtcattgtcttacagcatcttcttagagtaattcctgtgataggcatcttgagggacaaaaataaattcaatccgataccaaatcctggggaagtggaagctgtgtttgatgcacccttggaaatgttccttaaggttgctcttgttttcttaccaagttactttagctgtagttgtgttttttcccttctcaagcatcattacttgaacctttttttttttgtttcaggatgagaatcgaagatctgaagagagagagtggatgggtgaaaagtatttgatccattactttgactacagaacaggagataaggattatatgatatggggtttaactgctgggattttgatcagagctgcatctgtgacttatgaaagaccacctgcttttatcgagcagtgcccgaagtttaagtaccctaaaatggtagaaaaacatacttgtatgccttaatgaacataatttttcgaatgatgctttcctagactagtcttcttccactatttgataacttgtaccagacaacaagacaataacattccatacaactgattctctgtaccagtgaatggctgaatgcagaacttggctacttgcttatatatatgcagacgcagtagctgaagctccaattcatttcctgctggggcatctcataacaggtttccatgactcttctgtttgtcattagataattggaggggcttctatttcattatgatctaggtcagtctgtattcttgaatttgatataattgtattgtaactttttctaggcttcatttctgagttgttcccacaggatgctcaatggtgattcagagaaaagttggcttgttatgattctaggcaaacatcaccctcaattgtgaatttggaggaatatttgtactcagtatttaccttcaaacgctcatttttcattgtatacttgttatcttctatttgtatactgaaccaatttcaaagcaaacttgtcttatgaggcttatgatttttattaatcgttgtagattcaagctgcagttacgttattatctctggactagattttttgtgtttcaatgataaattcagttaggttttcttattgctttgtagttaaccccaggaccaccatttcttcgtattgagacatttgttttcctgttattgcatggctttggttttatctagttctgctttggcagttttttatttgtgaatggcttcagttctgcattggcagttttttatttgtgaatggcttcagttctgcatgtatgaatttctggtgaatctatccaaacaagtgccactttagacttgttctagaggcaggaatttgcactggctacccattctaatggcaggaacttgatccttttcctaatgttgctacttattcatggagaatcccgcagtgtacaacaattgtaagtgtcctctatttgatagcttgtggatattgtttccttatttaagaaagctaactgaattgtggatcctttcaattgagttattttggtccttaagtcttaacagaatgtttcaagatttgaagttgatgtgcaagccttttccagttttccttttgatgtgtatacttttgcgttgcgtcaagcacttaataatggtacgttttatttttctttgcatatgcacttattaacgaaactttaaggcggttgtcattttttattttctcttgctgaaatggaagggggacttgtggtccatagttgttgaagaagatatgtgaataatctataactaaatcaatattagttacctgagcaattttcagatgtttgacaaaaagtcaaaggggcattgcgagaatcgaactcgggacctctcgcacccaaagcgagaatcataccactagaccaaatgccctgttattgatttagcaagcaatgtgttgttgagaattctattctcaatggcaaaaagctgtatgttccaactgttatatattttatatttggatctgacatgagaatgctctcttgtttagataatctaagttatgttttagatagttctattagttgactttcagggcttaatagttaaaaggtggataatttaaatatgatgaaatgttagttggcatttagaacatcattttgcaaaaagtcaatgggggcattccgagaatcgaactcgggacctctcgcacccaaagcgagaatcataccactagaccaaatgccctgttgttaatataaatccgatcaagcatttgtgtgttgtttgcatcttaggggacaaaaggcgttgaatccaacaaaaatcccgctgaagtgaaaattgtgtttgatgcaccctggaaatgttctgcaatgttcttgtttccttgtcaaaatcaaaatttcgctgtagttatgtttttagctcctctgaagcatcagtgcttgaaaagtatatattgagtatgacaaccggagatcttaggagagagtacattggtgttaattatctgattcacttctttgactgtgtaacaggttgtaagaattactgttgcttccctttgctttttcattatatgctgaatcacgacttgggggactatttctgcagctcattcttgatgaacctggcagcttaccaaacgtgatggttttcactgtataaagttactggttataaagattggacgtgaaacaatggtattatttcttttcttttgccattctgcactaaatagattgggcggtttggtttttttattattttctcttgcttaaatagaaggagaacatatggtcctcagttgttgaacaagacttgggaaaaatcttggtttaagtcaatactgattttacaagcattgttaggctggcacttagatcatgtatatggtttacaaaaagtcaatgggggcattccgagaatcgaactcgggacctctcgcacccaaagcgagaatcataccactagaccaaatgccctgtttttataatgctgttcagttcgtgtctcctattagcattctctcttttctttccgagatttttttgctccgtatgcttttctagtagatactcgatcgaaaatctttttccgcttatgctgctcatttttggtggatctggctactttcaaaacatgatggtcctccctatatgaaggttactggttgaaaagatttgtggagtgtacgtgaagatcggtatgttcttctattcctttgcattaagcaccttataattttacttactgaaaatgaaaggattagatatggttctcacttggatttgattgcgatatcactaggactaaagaaagatctgatttgcttaatcacaacttgtgtgtttctgcagctcattcttgatgaatcttgcagcttaccaaacgtgaaagttttcactgtataaagttcactggttataaatattcatagattggacgtgaaacaatggtacttttttttttcttttgccattatgcaccaaatagattgggcggtgtttttttttttagtttctcttgcttaaatagaagaagaacatatggtcctcagttgttgaacaatacctgtgaaaaatcttagattaaatcaatactgattaactagcattgttggctggcatttagattacgtatatggttcacaaaaagtcaatgggggcattccgagaatcgaactcgggacctctcgcacccaaagcgagaatcataccactagaccaaatgccctgttgtatatgcattatggttcaaacatttttttctatgctcgtctatgcctttaaaatttacagttagcttagattcaatcttgacatctgatgcttgaagatgttaatgaaccatctgaaattccatcagttgactttccggtggattgtttgtaaattagtgttggtgaagtttcaggtagatacacattgttgaaatgatgaatgtgatctgtggtaaatccggaagcaaaaactatgttgtatgcaattagtttgagctggcatttagaacttaggttttacaaaaagtcaaaggggcattccgagaatcgaactcgggacctctcgcacccaaagcgagaatcataccactagaccaaatgccctgtgtagatgttgttcagttaatgccttctattagcattttagcctttctttaaagactttttgcttaatcatgactcccttattgtttatgcggatcattctttgtgaaatcagcagcttacaaatgagaaggcccgacctatgaagtttactggttaaaacagcggtggcggtatgttcttatcttccttggcactaaagatgttgatagtgaaaccttaagggtaggtgttgttttctcttactgagataaataaaaaatatttgttcatgcattgttaaacaagaactgtattttttttttgagaaagtcaatgggggtatgtagctggcaattagaacaattgttttggaaaaaagtcaaaggggcattccgagaatcgaactcgggacctctcgcacccaaagcgagaatcataccactagaccaaatgccctgttgtttatgccatctggttcaaatactttttctggtcttctagacttaaaaaaaaaagctgcagtatgaaatgtaaccatgacattatgctttttgattgttgctgtaagttgagaaggtctttccaagatattaactgttgaaactcatatctttacttgcgctggatctcttttacgatctgatattctgttgtaagacttgtggtattgccgtaaaaggatgcttcttcttttgttattatttgacgttcaaagtcaattctttttttttgttatgaagtgagggatgcgcaatttcccagttctaggggaatgttttgttctatgcactctccaaggcagcatctctgctgagtaattattgtgtaggactctaatggaacacatgaggcatttacttcgacaccaaactctgcagaagactctaatggaacacatgaggcatgtactccaacaccaaactctgcagaagtggaaactttgcttgatgcacacccttttcgaatgttttgtaagcttcccctcattttgatatcaaacatactttagctctagttgtgttttcatttcctctcaagtacgattaatgcttgaaaaacaatgtgcaagataggaatcggagaagagctctattgaagcaccctatatagcatgccttagtcaacgagtttttcctgaatatggttctcctagacgacaaacgagtctgcttctgatagaagatgaacaagatgacaatgacactccttacgactgatactctgtataatgttccaagaatctttctgtttgttggatgatcatttcgagttgtctcctctatcttcatcacctagattagtcgtttactagagagttgtctggttatggacatattcctttgcaagaaaaccttcaagcttggatttagaggatagcttaggcgtagtgacactgtgctatccatgtttatgtactctgatcaaatttgaaatcaaaagttgccattttgagccacatgttgtaatactctagttgttttcaaattttacaaagtaatcagattctcatcttttgacatacggtttagtttccgcagggtgttggttttaattgtttctgcgtagctgtgtccaagcagaatttttgggattttttggtttatagattacatcattacagaaccgaatgaaaattattggaagattaataatacagcctctaaaataacactttcacttttcattaatttttaccaacaacaattatgggaggatcaaaaggaccaaattccatcactacacacaactaagtaattaaaatgtacttgagctgctttaataggaaaactgtgattatacaaagattgattctaaaacctaaacataactctatctatctcctaaacactctgaaagctataaaaacattacatcttctgattaatgccaagttaatgaatgataagccgtatgcgtcgtgcaagtaattaagagttgcctcgaaggtgtctatgctctaccagaagaaacgtgtccaagattgttcaccggttgaatctgattcactacccaattcgtcatcatagctactatcagtgggaagcaacttgattctgtcagcatgctcaactaaccaatcactaaatcctggagaagctgcaagtcctgccattgcttctcgtgtcgtttcttgtgtcaactcgtcatactctctcttcgacatcctcttccggtttggcgtcgtatggaatgtagaatagtaatcctgatttccgatcggtatcctccggttaactgaagacggtgagctcacaatcacatcataagaaggagagccggaatacgaaggtacactcttagcactcttccacagtccaccacctccagggcgactaaggaactcagctcgtccatgcattatcggacgtctctcaccagcagaaaccaaccaatgacttttccctacaaagcttttcgttttactaacaagaaaaccaaacaagctagctaaaacaaaagctcccatggccataggagtatcaagactactctgcaaaataaacgtagcagcaacagaacgcatagcccatttcacaaactgtgcaacactagcatccacacctcctccatctttcgaaacaacaaacttcctcacagtccaaaatccaaaagcagctccagtaataaccaccccaacaagcacaagtatcgctaccggattatacatatcctcactcaacccaaaattaacaagaatcatattcaccatcattgagaattgatgtagaatgaaagatccagcaccaacaacagatccataaaacgcaagatacataacattcttcctcccagtaggtaataacctcataacctggaagataataatcaaaacaacgagaaaaacaccaaccgccatagaactcgtatagtaaaacggtagccaactgctaacaacaggtgctaacaaaatcacaatcaatcccgctacaagacaaaaaatccgccattgatgaaactcttctgtaacattgaccgtaatcattgaacgagacgactgatattcactaccagtgaatctcacatcaatgtattgtttatcatatggtgatataacagagctgctctggagatttttccaattagatttctcacagtggcacattccaagtgtagcatttcggtgaacacaaacttggattttgaggtgtagcttttctgggattggtactaagtttactctgagagagttagcgaatttccctaatttggttctcgaatagcctgaaacttggattcgctcgcacgacctaaggctaatattcagagctggctcgccgggaccaacacttttgagcgccgccgcgtaggataacaagagaaagacaataagaggaaggagaaaccagattcgatgaggaagacgaagaaaagaagaagaagtagtcattgccaccaccgcgaagcaaagacggagcaatgataagcgaccttttagggtttaattttaatatatagaagaaatttgacgcagaattcttaattggtgccgttgttttgacgcagaatttaattggttccgttgttttgacgcagtttcggtttagttaaaccagattgaattaatttattttgatgcagtttcggtttagtaaaccatatatatagagattcacggtcgtggcttgtcgaagtttccaacagatgtgagcgtatccattggattattcgttgtccggtttatttgctgactcatgaggcactcgcccaccagttgttcgacgaaattcctaaaccaaaaaatttcgcccacagagatttagattgagtctacctgaaatgtgggataaatttcgtattttgcgtgaggtttcgcggagtttagagaatcagtggcgcactggcgcgtgatgcgttttcttctactcttttgggtacgtattcgctctttactgctatggaagtgtgtgttgcttagttttcgtctctcttagcttccctaggttaaaatctaatacggaaatgtctctgtattctataattttgacttttgagctggtaattaggtcttatccttaaaactaagtgaagggcattctttgaatagaacctaggacctctcgctgccaaaagaagaattatattcatggcttgtcctaaatgctctgttgctgatgtaattgggttcaagcattctgttttggtgtttaaaatgcttttttgaaaaaggaatgagctttttactgtaaatttacacccaaggcttgtcctattgaagggtctcgtgcttgaaggaatctggaaacttatagttggtttaaattcagtctgttttatttctttatcttgaagctgttactgagacctatcagttgagtttatggtggattgtttgtgattctgatgttgtggaagttactttttaggtgaatcaacaatgttcaaatgatgtatgtgatctgttaaaagtccgatagcaaatacagattgtatgcaataagtcttggcaggcatttagagcatatgttttacaaaaagacaatggggcattccgagaatcgaactcgggacctctcgcacccaaagcgagaatcataccactagaccaaatgccctgttttcttatccttttgatcagttctttatcacaattcgtttgctgttttctccagctcattctttttggatctggcttcttacaaaagatgacagtcccccctacatgaagtttactgagaggacgtgacaacggtatgctcttatattccattgcattaagcactaataaaaatttaaggtgcattttgtttgtattttctctagctgaaatgaaagggtaatatgtggttcttacttggatcatgatctacgatagaactagcactgaataaaccaatttgctgcttgaatttagatcatttaacaaaaaagtcaatggggcattccgagaatcgaactcgggacctctcgcacccaaagcgagaatcataccactagaccaaatgccctgttattaagcaatttagtttaaaagttgtagatttggtcagattttgatcctgttgtcttagttgactacaaaatgaatattttagtagtaggatgttcctagttctaatctatgagatctcttaatctctttcaactgaaatcccagtcaatttttctttgcatttttgtttgaatatctggtttgtattgtagtactacgtatggaaatactccagaaatatattggtccagttgtttaaacctctactgctaaaaatcattagaagagttagtcctatgattttgtttgttttaacagttgactgatcattctgccatatcaaatgcttagctattgactgactctctagacaatacccagagttgctgaagttaaaggtaaaaactgatagttgaactcctgaatgtgatctgtgaaaacctggcaccaaatattaatttctatgcaaaaattctgaactggaacttacaatgtatggtttcacaaaaagtcaaaggggcattccgagaatcgaactcgggacctctcgcacccaaagcgagaatcataccactagaccaaatgccctgtttatatgttgttcagttaatgcctcctataagcaatttccattttgtttcagtgatttttttgctccgtttgcttttccagtagatactcaatcgaacatccatttctgcttatgcagctcatttttggtgaagctggctgcgtacaaaacattatggtcccccctttatgaaggttactggttaaaaagatttgttgattgtacgtgaagaccggtatgttcttcttttcctttggcaccttaactaacttactgaaatgagatggtaatatatggttcttacttggatttgattgcgaaagcactaggactaaataaagatcttactcgggacctctagcacccaaagcgaaaatcataccacaaggccaaatgccctgttgtatatgcattatggttcaaacattttctatgctcgtctatacttttaaaacttacagttagcttagattcagtctattatacatctggtgcttgaagatgataattgaaccatctgaaattccatcagttgactttccggtggattgtttgtaaattagtgttggtggagttttaggtagatacacatcgttgaaatgatgaatgtgatctgtggcaaatccagaagcaagtacaaagttgtatgcaaattagtttgagctggcatttagaacgtatgttttacaaaaagtcaatgggggcattccgagaatcgaactcgggacctctcgcacccaaagcgagaatcataccactagaccaaatgccctgtttatatgttgttcagttaatgccttctattagcattctagcctttcgtttagagatatttttttaccttttgcattcagttatatgcttaatgatgactcctttattatttatgcagatcatactttgtgaaatcggcagcttacaaaatgtgaagggccgacctatatgtagttactcgttaaaacagtggtacgttcttatcttccttggcactaaagctgttaaataatgaaaccttatggggaggtgttattttgtttcctcttgctgagataaataaaaaatatttgtacatgcattgttttgttgaaaaattcaatggggatatgtagctggcatttagaacaaatgtttttggaaaaagtcaatggggcattccgagaatcgaactcgggacctctcgcacccaaagcgagaatcataccactagaccaaatgccctgttcttattcttgttaaattaacgcattctactttttcttcacgagaatatttgcttccctttgctttcgttagatgcttattaaggattgttttgctatttctgcagcacaatctctggcagcatacaaaacgtctgtctttattaattaaaaagacatatagattggacgcggaactgtggtaagttatttgttttgcattatgtagttaattatgaaactctaagattgtgaaaaatgttaggattgaaacatatggtctacagttggtttttaagcaagctggcatttaaaacagatatataacatgttaatataaaaagtcattggggcattccgagaattgaactcgggacctctcgcaccctaagcgagaatcataccactagaccaaatgccctcttgttaagcaatgtagttaaaaagtttaagatttggtcacattctgatctcggtttcttagttgacttctactaaagaaatattttagtctttgtagaatgtttgttagtgaaatctatgagatctgtttcgaatgaaatccaattaaaaagatcagttgcatttacgttacttgaaatgtacggtttgcagtagagaaaaaaaaaaaaaaacctctttgttcatgcatatctcattttggtttggacacatttattaagaaaaattataacggggcattccgagaatcgaactcgggacctctcgcacccaaagcgagaatcataccactagaccaaatgccctgttgttaatatagttacattgtagcactgtgatgttgttaatcatgtggaaaagagaattcatgcttcagtctattattacaggaaattcactcttgatggtttgtttatcttttgagggctctattcgggattaagcaggcaagatgcagtaagttcaaactattctttaattaattttgaatatggcgttcaaatggtttcttgtttagatcttctaagacagaaattactttttagatctgggatctatcagttgactttcagggcttaattgtaaggtggatagtctgtaatttagtattgatgaaatgttagctggcgtttggaacatttgttttccaaaaagtcaaaggggcattccgagaatcgaactcgggacctctcgcacccaaagcgagaatcataccactagaccaaatgccctgttgtttgtttaaatccgtttcacactttatatctgcagcacaagttgttggcattagaatctgtagcacgagctgaaaccatgatgttaggatctatttagatttgcagtatcggatgtaaagatagtttcttcttatttctttcatcagttagtacttagtagttagtccagaggctttaggctagatgttatctgctgaatttaattccctaacctgaataattcttggtagaagtttttttcttcttagtgtaatctattttaggatctcctagtgtagttcctctggttcgaatactatggtataaaagagtgtttaatccatctaatatgttgtggaaaagtacagttagtgtaagttaaaactattttacatttggttcttgtatctgttattaaaatgtattcttgttgagaaatctaaaaagatagctacattttagatctagttctttatgttgtcttccactacgtaatagtcaagttggagtattgtaatctaatcttgatgaaatatcaggtaaatgcccactgttatctttgaagaatatgaacaaaaggacaaccttatatggaaaacatttcctagctggaacttaaatagttcgcttacaaagttaatggggcatgaaatggcagaattcagctagcgatgttctgtgttcaatccattatccaaaaaagtgttttctagctccacgacgtgaaagccaaggtgcaacttctattctcattttacttgatgcatttcagcagtttatatcaaaagtcataatggaaaaatgttttctagtttacccttgctaaaaattgaagggaaatgcatgtgaaaatgttgagattacggcaaaaattcaatggggcattccgagaatcgaactcgggacctctcgcacccaaagcgagaatcataccactagaccaaatgccctgttgttatacaacttagttaaaacgtggaagatcactatattggtcaacttgtgatctcatcctcttagttgacttttcctatatgttttagtctgaataggaagttcctagatctattctatgagatctctttaactgaaattccaatgatatgatccttgcattttctttagagagaggaattcttgtttgcaatggatggaaaaagttcagcgaaatatgattaaaagagaattagtcctcttgtcgtagtatctcaagttgttcgattcatgatgatcttatatatgacttgattatgctgctataaccatatattggtttttgactgataccataaaaagaatccactgaaaaaatcatttgctgatccctcaaactggaagttttaggctttacactgtctaaaagctgatttctgatttctaaaccttttactgagactgcgtttgaaatgcatattttttaattgaaccagaaaaacattctttggtcatacatatgtacacaattactaagaaaaagtcaaaggggcattccgagaatcgaactcgggacctctcgcacccaaagcgagaatcataccactagaccaaatgcccggttattggtgttattcagtcaaagcattctgtttgtttcattctcctttcttgaaatagtttttagaacataaactttgaagaagtgaacggggcattccgagaattgaactcgggacctctcgcaccctaagcgagaatcataccactagaccaaatgccaggttatcgctgtttcttattcaaaactttctctttgtttacggacttcgaatatgaggctctaggtagctatttcaaccagagggaaaatttgacaaccagataaatacctctactttttagattgtttaaaaggtttcagtttgttgcccggcctgttcttgattttcaaattcctgcagaagtttttgtttttcattgagattagcggtgtaatacttgtccaattgttgttgttcgtttttggagaatctagtggcacaaagtgagtataagtcttgtctcatgttttctggttgaaactgcagatgggaggtgttttctatttgaagagatcaaagttattagacgtggaagccgaactttggtgttacaccagttcccttagttaggtttcaacggttgctcttgaaacttgaagatgacaatgtctccaatcatagctacatttgttggcgaacttctctggcctccattgaccctgaaccacatacgttaggtaccaagaaggtctatcgtgtgacatctttcaggttcttaaggagctcggtatagagaggcaagaaagcaagaatcattgaggaaccatacccaatactgatctttagggtgccaactctagaaaaggacatttaaacttatttttgttgtagcctcggtaattgtataagttatacacaaagtaaataaaatgctgattgtactagctaataagaccattccttaggaagaaagatttttctggaatgagaggagatgatggggcatggcttgttgttgagtttctcttgtgagctactcaccggtctctcaggaagaaacactccagtgccacgtggcttaactcgtgctgcacctttatcatcaccatttggcctcaccatggaacccttgtggttcaatgcataccacattcttggcttccgatcatagtagctacctactcgattactctacagattatgtaacaaagattgattaattatacatccttagcattaataacaatagttcatgatgttataaaagaatagaaacctgtggaaatggacgatcaagaaagagttcattaaaaagatttgaaggtaagagaaacaatccttcctccacaccaaccacgatatctcctttgcaagacatgttgaagactaatacaaaactccctccaatgcatctgtatatttatatgttacttaccccaaacattcaaagggggtaataagggtcgggtcaagtttggtgaacctctcttgtcatgtggagtggtggtggtggttgcagtttatggtatgtatgtggcttctctctatggtttagctcggcttaaaccacaaataccagatttgtgtgtagttgaggtagttatgaacattcttctaacccaccataccaaccctcttgtattcatttgacaccttaccccattatagattttgttaatggttgacctaaattattcaaatcaaaatgtatctatgtttgctttgaaacagacatgacgaattaaggatatgattaaataaataatgacattcattttgtagcttggattattcatttcgtcagcgttgagactagagataaccaaattttaattattcggtttatgaatcataggaacagaaatgttgtcggtttttattaattaaaggttttatcggttttcatttggttcggttgagttagggttgtttggataagggaacattaaaactgaatcagtttagttgcactttggttttgttttcggatcagattttttttttatacggtttcgattcgatttgaatcggttaaaccggatttgcttcgtttcataaaaattaggagataaattcgtgcttttgccttcttgtttcgttgcacaaaaaaaaaaagatttgaaaaatcctttgcatgtcactctacctctcgttcgtcatcgttatgcgttacagcacaattctacgacggggatccggattcacgttcgtctcgtcggaacggatgtgagcgtttttttcatcggattcagtcgttattcgattgatatggtccttcatgagatacgcccaccacatgttcgacgaaattcctaaaccagctttcttggcgcacatttatgtaatagaatccaattgttatgtgagctgtttggagaacctaatagctaatgagattcagcggcaagtgggtaagtacttgctctttccatatcattgttgctgacacattctgctttatagttcctctttgttcaatggttattattagggcctaaaggttatcactttcagctggatactagagcctacgcttaatactctgtgaatcataagaccaaatgccctgttgttgataaaatccatccataactgctcttgaaacttaaataccctttaaagatgtgttctttttcagttttcacttcctgcagttatctcttgaaattttttggcagcattcagctagtgaagaagttctctgttaaatccgctatccatattctgttttcttgctgcatttgtgagccagtggacgtgaaagccaaggtgcattgcaattctagctctttttttttgtattttaactgtgtataacaaatgtagtaatgggaaactgttaaaaattgaagggaaaatgcacttgacaacttatacactaaaatcaggtttgttctatgatagttatcaaatggcatatgaaacagacatccaaaaaatttaacggggcattccgagaatcgaactcgggacctctcgcacccaaagcgagaatcataccactagaccaaatgccctggttttattttgttcttcagttaatgcctcctagttgcattctttcttttcattcagagattttgttgtttcgtttgcttttctggtaggtacttaatcaaaattcatttctgttgctgcagctccttcgttggtcctccagatgtgaagagcactggttaagatatttattgatcggatgtgaaagagcggtatgttcttcttttcctttgcattatgcacttattctcttgctgaaataaaagagtaatatatggtttatcaagatctgtgacataactatgactaaacaaagatcagatttttctaagcaattatctacttgaatttagatcaactacttaaaaagatagtggggcattccgagaatcgaactcgggacctctcgcacccaaagcgagaatcataccactagaccaaatgccctgttgttgatttaattcccattgaagcattgcattgttgtaatcctgtggaaaagagaattcatgcttgactttgttattacaggaaattcactcttgatgctttttttttaccttttgagagttctattcgtgatgaagcaggcaagatgcagtaagttcaaatttttctttaatttatttttgaatatgatattagaatgttttcttgtttagatcatctaagacagaaattactttttagatctgggctatatcagttgactttcagccatcagggcttattagtaaaggtggatagtctggaaatttagaattgatgaaatgttagctggcgtttagaactttggtttccaaaaagtcaaaggggcattccgagaatcgaactcgggacctctcgcacccaaagcgagaatcataccactagaccaaatgccctgcttattataattgttcagttaatgcattctattagcattctctcctttctcttagagatttgttgcttccctctgcatttccattacatacttaatcacaattcgtttgctgtttctgcagctattctttgtgaatccaacagcttacaaaacatgacggtcttccctacatgaagtgtactagttaaaaagtttattgattggatctggatgtgaaacagcggtatgctcttctcttctattgcattaaacacttaataatgaaactgtggggagggttttgtttttgattttctcttactgaaaatgaaatggaaatatatggtcctcgatccttgaacgaggtctgtggaaaatctaaatactaaaaaaataataatatcataagccattttcagcttgcatctaaatcatacactatagaaaaggtcaagggggcattccgagaatcgaactcgggacctctcgcacccaaagcgagaatcataccactagaccaaatgccctgttgttgatttagttctattcaaatatttcattgttctttgatcctttgtgtgagaaataatatatggttccatcttttacaggaaatttacccgccttacttttcctcttgaggatttattcttgacatcgctggcaacatacagttagtgtaagctcaaactcttctaactgattcatgaatctgatgagaaaatatttacttgtttagataatctaaaaataaagctacattttagatctagatcgttaagttgactgtcaaatactggaggcagattgtctataattcaaatattgttgaaatgtaaggcaatcattgttgaattgctgtattagagaaaattctatatggaaaaattcttagctgtcatttagtccacataccttgcaaaatttaaaaggggcattccgagaatcgaactcgggacctctcgcacccaaagcgagaatcataccactagaccaaatgccctgttgttgatgtaatccatttcaagcattatatctgcagtacaagctgtaaacacggcattaggatctgtttgaatctgatgtaacaataatgctattgcttggcttcttgataaatccagttagtccagaccctttaagctaaatgttcctgatgaatctatatgttatctatattgaaatcttgaatattttttcggtaggagttgtttttcgtatatgtgcttttttgtagttcatctgataggaatcttatgagatacaaaagctttcaatcaattgacaaattctgcagacatcaaagatgtgtttgatgcaccctttggaatgttctttatggtctcactgtaaagtgggaaccgcttgaattttgatcagtgtttgataagtatttgtcaaggataagaggagatcttaggagagattgcattggtgaaaaatgtccacttctttatctagcgactacattacaggaaataagggttatcacatttaactgcttgaatcctgatcagagccacctctttgctgagccgttttatgcaccctagaacatggttataaaataaaataaaaacacctggggtctttctgagaattgaactcgggcctcttgcagccaaagggagaaccataccaataaaccaaatgctcctatttcttatgttgtttagttaatgatttccatttacattcttttctttctttaagagaattgttgcatctgtttgcatttgtgttcgatgcttaatcccaattaatttgctgcttctgcagctctttccttgggtatccagcagcttacaaagcatgaaggcctctccatatgaagtccattaggtaatatatttgtataatgtgacagcggtatgcttgtatttccattgcatttggtctaatggtaaaagtgaaagtatttttactagttcttgctaaaataagagggtaatatggtccattggtcctcatctggtctagtgttaaatctctaggaatttcctgattttctgatcactttttagctggaactcagaccatctattagaaaaatgtcaatggtgcatgttctgagaatcaaacacgggaccactagcacccaaagcgagaatcataccaaatgccctgtacgttgttcgattaacgcctcctattagcattttctcttttcttatagaaatttgttgctccgtttgctattctggttgaatcttaattgaaattctttttctatatccgcatctcattcttggtgaatctggctgatagtccttcatgtatgaaggttactggttacaaagatttaatgattgtacagtgaagagtggtatgttcttcttttcgtctgcattaagctccttatattttatcttgctgaaatgaaagggtattctatagttcttactttggtttagtactaaataaagatctgattttaagccacgttcttctttaactgagatcatctactatagaaaaaagtcaatgggggcattccgagaatcgaactcgggacctctcgcacccaaagcgagaatcataccactagaccaaatgccctgttgttgatttagttacattgaagcattgaagcattttattgtttgatcttgtggataagagaattcacactttactctatttttagggaaatctacttttggttgttctattcttgatgaagctagcaacatgcaataagttcaaaattttctatatttatattggaatctgacgttagaatgctgaatgttctcttgtttgaaaaatctgacgttttagatctagttctatcagttgactttcagggcttaatagtaaaggtggacactgtactttaatagatgaaatgttagctggttaaaacatttgttttacaaaaagtcaaaggggcattccgagaatcgaactcgggacctctcgcacccaaagcgagaatcataccactagaccaaatgccctgtttgtatatcttgttatgttaacgcattctacttgcattctgttttttccgtgacgagaatttatgctttcctttgcttttcattagatgattattaaatatttccgtgctgtttctgcggctcaatctttggcagcatacacagcgtgtttgtcttttctgtatgaattgtactggttaaaaagacatacattattggacgtgaaactgcattatgttctttttctttgcattatgcacttgatcatagaactttaaggagcttttttgtttttgcttttcacttgctaaattggaagaaaaatatatggtctgcagttggtttatatgtgaaagaataggactggttttctagggaagctagcattgagaacagatgatttacgaaaagtcattggggttttccgagaattgagctccgggcctctcgcaccctaagcaagaatcataccactagaccaaatgcccttcttttttgtattatgttttttagttagtactttctattagcattcttgcttttctttcagagatttgttgcttcgtttgcattttccgtagatacataatcaaaattcttttctgttgatgcagatcattcgttgttatctggatgctaacaaaacatgaaggtcttccctatgtgaagattactgattaatatctattgattggatgtgatagattggtatgttcttcttttcctttgcattataggtcatctaacatttcgagaatcgaactgggtcatcgacttaaaaaatttgattatgttaaaatctgtattcaaatatataagttaaagattggtatgttctgtttgaatataggtcatgtacttaaaaaaagaagtcaaaggggcattccgagaatcgaactcgggacctcttgcacccaaagcgagaatcataccactagaccaaatgctgtatttgaatgcccccactgaagcattgtgttgttgtgtaatcctgtggaaaagagaattcatgcttcactccgttattacaggaaattaagtcatgggggtttgtttaccttttgagggttctattcgtgatgaagctggcaacatgcagtaagttcaaactctttaacttatatagaatgcttttttgtttagataaagaaattatgtttaagatttagttctattagttgatggatttagttctttcagggcttaatatatttagaacttatgtatttaaaactatatatttagttctttcagggcttaatatattcagaacttatatatttgaaactatatatttagttctttcagggcttgatatatttagaacttatatatttaaaattatatattttgttctttcagggttctaacttatatatttagaacttatatatttagttctttcagggcttaatggattgtctgtaattgaaaattgatgaattgaccctagtcattcctataattgaactcgggacctcccgcaccctaagcaagaatcataccactagaccaaaagccctgttgtttatgcaatctggttcaaatatttttgtggtcttctagtttgttttttgaaaaagaggctgaattacgaaatgtttactagttgaagctaagctgcagaagggaggtgtacgtcatcgcctcatcgggcatgtaagcaaaggtatgtaaaagttctggaaaaatgtgatttgatcatagagctataccaaattcttggttattgactatttttgttaagatcatagaggatccccaatagaagtgccattgacaatttatttcttgttgcctaactgatataaatatgaatttacttccgtctctctataggtttggctttaccagccgaaatttatgtctagtactattagttgactttcatggctttatggtgaatgtgatttgtctgtaaattttaatatttgttgaaacataacacaaaaccacaaaaccttgaattgctgaatgtttatctataaaagatctaagaggcaaatatatgggaatatatggaaaattttgttacctgttattctgagataaataagtaaatattgaaaaaatcttttataagattctctttgggaaaatagaatatcgcatgataataatcgggagacattaaagtagaaatacaaatacgtagacacaaaaaccctagaacaaaagatgatgcttcgtgtgtaacgtattagagaaggaaccttaaaaacgtcagtgatattcacattaaattgggatgacttgagtttggtgttacatccaaatccggttatatataggttaaattgttgtgtgcgaatcaacagagagagagaaaagggcacataaaataggtgagtctcctaaacatgccttccttcaactcctccggcaatctcgcggtggccgttgctcttctctttgcgggcgccttatatttctatttctcatcaattacggtttctgatcctatgtccgatctactacacaatgtcgaaactgtaagttactttataatagaatcggaatttgagagtaaatataggaagattttaaatgttttgtgttaaatagagatggacagagtatcctgtggacgagctagaggcggtcctagacaaggcagcaatgggaaacaacaaaacggtgattatagcaatggtgaacaaagcttacgtggaggaggttgaaggagggaggacaatgctggatctgtttttggagagtttttgggaaggagagggtactcggccgcttcttgaccatctgatgctagtggcagcggatcagacttcctacgatcgttgcctcttcaggaggctccactgctacaagatggataccgatggggttgacttggagggagagaaggtatatatgtcaaaagatttcattgagatgatgtggcggaggactcacttgctcctagacgtcctcagccgcggctacaatcttactttcacggttaggtccgtcccttggttttggaatgtataacaaaacacctaatttgtttctctataagtagtgtatgtatatgtcaggacacggacgtgatgtggctaaggagcccttttccccgactaagctacaacgagagcttggatatgcagataagcgtggacagtattggcctggttggaggacacttgatcaacacgggattctaccacgtcaggtccaacaacaagaccatctccctcttccagaaatggtacgacatgaggctcaagtcgacgggcatgaaggaacaagatgtccttaagagtctcctagactctggtttctttaaccagcttggcctcaacgttggcttcctcaacactaccgaattcagtggcttctgccaagacagccatgacatgggcgttgtcaccaccgtccatgccaactgttgccgccacatccttgctaagatctctgatctaactcttgttcttcgtgactggaaacgctacaaagcctcccatgtcaacagcaattggagcccccatgttgagtgcgggcgttcatggagtgacactcactatatccccaagctctgaccttcttcgttcatatatgccaattaatgagattgctatagtatacacaacttcatcatctattaactgcatatgttcttcagattaatcctagctagctagaggaacaattctcttttgacaagtaattacaaaacatcatatatgtgtgttacaaccagattgtttttcgctcttcgttacagctacccaaataattgctgataattctactacctagctagctacttgataaaaagaacacatagaagacagagtttcaaatccaatgcacaagttggtggataaaaaccaaatgaatgatcgagacctcgtgcaccaaaagcaagaaatatcataccattagaccaaatgctatgttgctgatgtaaaacttaaatacttgatttctcttctgttttgaggaaatcaattgatgtagcatacaaaactgttttctgtacagccaaagtgagtcatcggatgtgaaagaaaggtaatttgtggatccactttttttgttttgaaacttcaggcacttgatttctgaaagtctggatggggatacaataaaaaaacaacaatactctcatatattacatgtgaaaatgtttgatgcaatccggtgatgaatagtttagtcaacctttgatgaacagtatcatcaggcggttatgaacattgtctttgagaatgacattttgtgtaattgaaaaaacgagaatgatatttatggctttaatttttttcctattttcttcttacataattttcgaattatcattggtatgtaaatctaattttaagtcttttgggtatataaattaactaaaacaacaatttcattttattttgttacaggaaaaagaattgaaaagcagtgattttctcatatattaggatttgatctgcagtagccgcatgataataattttgtgcatatacataaagtctttgacatttattttaaaattgtgcatattttacatattgaagtttgtatttaaaaatacttagttttataatcaagaaatcagtaatatcgctgataaatatgactaattggattaaatttgatatagtctatatatttgaagtgtgtaatttgtgaatatgaattttaagtaacatcataataactactgctctatataacattgtggaggttaaaatgtaagaaaggaaaatacagatagtataataactaaacaaaaagactaaacatcagaacaattggagatattttatagttctttttcaaagtattataatatttacataattatatagattattagaattattaattagttggactattatagatatcgttttttttttaattattgtgtgaaatttgatcattttaaactaccaacgatcccaaagatgatgcaagagaagagtctttgaccaaatgtaagagaaaaacgtgttttcgatgattgatggatatggagatcagaattaagaaaccctgatgaagcactcaaactcttcactataggatgaaggattccgtatagaacccaattacatatgtaacctttcttggagctctctcggcttacaactacatatgattagtgggtacctaaagcatggattgataaagtaaatatttataagattctctaatctctatagcaaatataataatatgttggcgtgatgataatcgtgagactaaagtaggaaacaaaaaccctagaacaaaagatgattcatgtgtgacgtattcgagaaggaaccttaaaaacgtttgtgatattcacattaaactggtgttatacatccaaatccggtaatataaatatagtgttgaattgttgtgtgaatcaaaagagagaaaatagggcacatgaaatagttgtgagtatatcctaataatccgaacaaaaaccaaaaacatatgacttcctacaataactcctccggcagtctcgccctggccgttgctcttctatttgccggcgccttatatatctacttctcatcacgttcagcttctgatcccatctccggtctcctacaaaatgtcaacactgtaagttgattcatataatatatatggaattctagagtacaaataaaggaagatttgaaatatattttgaaatggtacgtgacagagattgatacagtatccggtggacgagctagagacggtgctggacaaggcgtcgacagggaacaacaagacggtgataatagcaatggtgaacaaagcttacgtggaggaggatggaggagggaggacgatgctggatctgtttttggagagtttttgggaaggagaggggacacgcccgcttcttaaccatctgatggtggttgcagcggatcagacggcctacgatcgctgcctcttcaggaggctccattgctacaagatggatacggaaggggttgacttggagggagagaaagtatacatgtcaaaagatttcatagagatgatgtggaggaggactcgcttgctcctagacgtcctcagccgcggctaccatattattttcacggttaggtccgtcccttgattttgtaacatatataacaaaacacttaatttgttgctcaaacaagtagtgtatatacaatgttaggatacggacgtgatgtggctaaggagtcccttgtcccggctaaacgtgagcttggatatgcatataagcgtggacagaaataacgtgagaggacaattgatcaacacgggattctaccatgcccggtccaacaacaagaccatctccctcttccagaaatggtacgacatgaggctcaagtctttgggcatgaaggaacaagacgtcctcaagaatctcctagactctggcttctttaaccagcttggtctcaacgttggcttcctcagtacggccgaattcagcggtttctgccaagacagccctgacatgggggctgtcacaaccgtccacgccaactgttgcgtccacatccctgctaagatctctgatctcagtcttgctcttcgtgactggaaacgctacaaagcctcccgtgtcaacagcaggtggagcccccatgttgagtgcaggcgttcatggaaggacgttcattatgtccccaagctctgactttcttcgttcatataagcaaattaatgagattgctatatagtatacacaattacatcatttataagtgcatatcttcttttgattaatcctctagctagctagatgagcaattctcttttaacaagtaattacaaaacatcttatatgtgtgttacaagctatattctcgttttttattttttcttttaataatatagagattaatttactatgttagacaaatatgtttttgttacaatgattgtagaaaaaactacttggctaatctaattccgaaagagaggagggcaaaatggaaagaaattgagaatgatctcaattaaggtagaagagacatttatatcatttcttacctaatggcatatcatgtaagtaactaaaagttttgttaattttgatatgtagtaaatatatatgtacgtttattggattcatattaattcccttaggtaaacagaatgttacgtgaacgattgaaaatctcacagagtaaaaacacaaaaaccctaattacatgacgattcttatgtgatatattcgtgaaggaaggaaccttaaaaacgttagtggattttctatatacattattcacatatatccatcgtttatataaataaataaataggttaattgtttagtacaaaatcacgagagagagaaataaaaaaggcgtgagtctcctaactagctcctaataatgcgataaaccaaaaacatgccactttgcaataatttctccggcaatctcgtcgtcgccgttgctctcttctttgccggcgccctatatatcttcaactaccaaaactatgtcaacactctggtaagtaaattcataatatattgaaattagtgtagagtaaatatatatataggaagaattcaaatatatgaagtggtaacagagaacaacacagtatccggtagatgagctagaggcggccttgtatacggcagccgccggaaacaacaagacggtgataataacgatggtgaacaaagcgtacgtgaaggaggttggaagagggagtacgatgcttgatctgtttttggagagtttttgggaaggagaagggactctaccacttttggaccatctaatggtggtggcagtggatcaaacggcctatgatcgctgccgtttcaagaggcttcactgctacaagatggagactgaagatggggttgacttagagggagagaaagtattcatgtcaaaagatttcattgagatgatgtggagaaggactcgcttgatcctagacgttcttcgtcgtggctacaatgttattttcacggttagttccctcagattttggaacatataacaatataaaacattttagattgttgctcaattagtatattatatgtacaatgtcatcaggacacggacgtgatgtggctaaggagtccattgtctcggttaaacatgagcttggatatgcaaataagcgtggacagaattaacgtgggaggacagttgatcaacacgggattctaccacgtccggtctaacaacaagaccatctcactcttccaaaaatggtacgacatgaggctaaactcgacggggatgaaggaacaagacgttctcaagaatctcctagactccggcttcttcaaccagttaggtctcaacgttggcttccttagtaccaccgaattcagcggtttttgccaagacagtcctcacatgggcgttgtcactaccgtccatgctaactgctgcctccacatccctgccaaagtctttgatctcactcgtgttcttcgtgattggaaacgctacaaagcgtcacatgtcaacagcaaatggagccctcatcttaagtgttcgcgttcatggaatgacactcactatatccctaggctctgaccctcttcgtttacaatacgcaaaattaatgtgattgctaaactaccattaagggtaacacatgacatatgcctcaaccttaaaacataactatatcaactatatcaaacgctgtcgttttatcaaatacatcaaacgctgtcgttttatcaaatacatcaaacgctgtcgtttgaccgacttctctctctctcgttctttgcattttggaaagttcgaaacagagcctctgtaaattacgcgtaaagtttcaatctttattcacacaattcacacagctaatgtaagcatgagaatcttcagattcacgtcaatctcaccgcggattttgccgtcgaatcattactcaacattcccgttgaaacaaaacgtgtcttctctctcaccggcgaaatacattgcgggagctttacaagaacatatcaattctccggccccaaaagctggtaagaagatacacgcagatatcatcaaaactgggtttcaaccagatttgaatatatccatcaaactactcattcttcatttaaaatgcggttgcttgagttatgcacgccaagtgttcgacgaattacccaagccaacattatcggcttacaactacatgattagtgggtacttgaagcatggattggtaaaggaattacttcttctagttcaacggatgtcatactctggggaaaaggcagatgggtacacgctttccatggttctaaaggcttctaatagtcgtggctcgactatgatactgccgcgtagcttatgtaggttggtccatgcccggattataaaatgtgatgttgagctagatgatgtgttgattactgcacttgttgatacttatgtgaagagtgggaagttggagtctgcaaggactgtgtttgaaacaatgaaagatgagaatgttgtgtgttgtacatcaatgatctcaggttacatgaatcaaggttttgtagaggatgcggaagagattttcaatactaccaaagtgaaggatattgtagtttacaatgctatggtggaaggtttcagcagatcaggtgaaactgctaagagatcagttgacatgtatatttcgatgcaacgagctggtttccatccgaatatttcaactttcgctagcgtgattggagcgtgttcggttttgacgtcccatgaagttggtcagcaagtgcacgctcagattatgaagagtggagtttacacgcatatcaaaatggggagctctttgttagacatgtatgccaaatgcggagggatcaatgatgcaagaagagtctttgaccaaatgcaagagaaaaacgtattttcgtggacttcgatgattgatggatatggaaagaatggaaaccctgaggaagcactcgaactcttcactaggatgaaggaattccgtatagaacccaattatgtaacctttcttggtgctctctctgcttgttcacattctggtttagtcgataaaggttatgagatctttgagagcatgcagagagattattccatgaaaccaaagatggaacactatgcttgcatagttgatctcatgggacgagctggagatttgaataaagctttcgaatttgctagggcgatgccggaaaggcctgactcagatatttgggcagctcttctcagttcttgtaatttgcatggtaatgttgaactcgcaagcatagctgcgagtgagcttttcaaactgaatgctgataaaagacctggagcttatttagctttatccaatgtctacgcttctaatgataaatgggacaatgtgagcaagatccgagaagtgatgaaaagaagaaggatatctaaaactattggtcgtagttggaccagcgaagattgattggaggtacttaaataagagtctcatacttatcaggctttttgagtttggtccattcatagaagattgattggagatgatactttttgcctcgagagtgtttgacagaagcgataactgtgaaacatacagtaaggcttctcttaattcacgctcttcaaatcaaatacactgagctccaaaacatttgttcagtgacgaaatcgaaattgtacaaatggttgatgattttgtgtttgtgttttattgtgcatctatggaggtcgttttgtcggtgatcaagacagggcaaattcacctttgtggaacttatccatggcctctttaaactcaggcattgcagattcgcgcagatttaccaaaaccttaaacccactgtctttcttgcttccagctgcagcatcagtagaatatggcaagaaaaaacatggttccatgcttccaagcaacttgtttgatagtggcaaaaccgtcacaggtcctccccatccaaaatcaatcgtggaatgccccaagtatcgccagtccgtgaatccggtcactcctgtgttacacaatcccaacgagaaaaccaaaaatgcatgaaactttgactttggtattccatcggttcccaaaacaaatccttaatatatatagtttacctgtaccggcattgattccatctttgtgatgcagctcttggaagtcgataaaggagcgtacatattcatcactcgtattggatttgctctgttttatgagctctgcagttttccagattggttgctcaatgagttctccagctttgatctgagcatacattggcacacatccatttccccagtagcctttaggcaaaggtggattcatcaatctccttatatttatcgaatacacaaatttcacattctccttttcctcagtctttgcagctcttaccctgaatttcgatattttattgtttcagatcaaacacatttcaaaaaatttgattgaatcaaacatagtgaagaagaggttacttactttgcacgccaaatgtaagcaccaagagcttcgaatgtggtgaaattcagacccgatttctcgagtaattgagccttcaattgatccaaagaatcgtcggtcacaaagaagcagtctcttttgacgtctccaatggcttgtccatatggatcaaagtccttatccaggctcaagaagtcacgaactggagctccaacccaaggcttctcccttggaccaagtaaacgttctctgtcccaaaccggttcgatcgaaatctttgtcgctccgcgagctaattccgccatagcgttgaagaacagactcgcacctaacccatcgcagatcgcatgatgaatcgatgcacctagaacccaaccaccacactgaaacatagtgacctggaggatacaaggattgaccattccttcctcccgggtcggatccggtaccaatctctcgacgaaacctggatcgggtccatccaaatacccgactgactcaagcgtacagttcactgtagcgttgactaaaggcacgctttgaccagcggagcagagtagttcaaatcggttatcggaggcagagcgacggagagagccagcaagagggtagtagtgaacgagagcggtggcaagagaggcggatacgacggcagaggggctttctccggcgacggtggaagaggaggaggagtagacgcggaggtaacggaagctgacgtggaggttgttatcattgtcgagatgggaaagagagagagtttggtcgttggagagtggttggtgagaaggttgaaccagggctatatcggtaatttcaagtgtcgccataccttaataataagaatggtatgggtctttgttacttccaaaataagttttggggtccatatttataagagaagcaaaatcaatgccttgaggggacacagctcacgagagtaggcttcaccaactaccaaacggtcaagtcccatgtccaaatttctcacctacaacagtttcaaacaaaatcattttagtctttttgttattcataccatacttcatacttgtcttcactgtttttatgatcgagttttgtatgagtcttttcaaaattcaatcatgcttcttgtcttcagtcttcactgtttttctcctccacaagattagtatttttttttctttttttgtgcgtaagatagagttgtggtcgaaaattgtaagaaaaagaatctagcgtcaataatacaattggtggaaagaccaattttgaatctgattagggaaaaatgttgactagtgaacaaaaatttcttggtaagaaactataatttttttttttcaaaattataaattagaagtcgagagctattggaagtcggtggaactaaatggttgattggttcattagtaaaacacacgtggtgccactacacttttttaatagttacttgactggtgctgtttgcaaagttattatgattgatgattatttttgaaagaaaattggaatataaattcggttaggtcagtattgtcatgtatttgttaaaccactgtatattatactcctagcttagtttaatttatgagatttaagtggaattcatactaatcaaatgtgagatttcttgaaaattgtagtggaatttcttcaaggtcgaataggattattaaagagatactataaaggagcaattggtgccgacaaaaaaaaataaaaataaaggagcagttggaatggtcagctagaatttcatactccctccgtctttttttacttgatgtttagcagaatacatacaaattaaaaaaaaaaaaaatttgtttatttctaaattaaaatatcatttattatttaatcaactacaatctaaaaaataaaaatcatcaaaatcaataaaaatataactaattctgcattaaaagtttaaaacatcatttattaaagaataaaaatataaagcttaaaacatcatttataaaagaatttagaaagtagtactaatataatcgttttttaaagtgagccaaaatagatgactttgacacaccaaccaaaagcctaaaaagtggaacatgtaggctttcaaggcaccgcggacaagatattgttaatcgcaacgtcattattattgatttcgattcgtccatctgtggaataatacgaatatcattattagagtatttactaatcaaatataaaattatgtagactataacgaatcatttttttcttcttccaaataggtaaatactctaagaaagatattcatattattccaaaatgaatgatagctatatttgatttctataataagattccacataaaaactgactccataaagatatagatcacgcagagtcgcagactatcgcgtgcgtcacactactcacacatctccataatcaattctttctttttcgctcgtcttgtaatggattagaatataggtaaagaatccatttatatgattataaaatggtaaggaatttgcgaaaacccaaaagaaaaaagcattgaaggaatatttcgtaatcccttattattttcacgatttctatcatcgaagaatccaattttttgatggagtctccaacttgtctgacatttctgaagttacttcgttttcaaccaataagcaaaatttctttttggaaaataacaaataaccaaattttataatttctctctttcttactggcataataaatgaaatccaataatggcctcatctcttgcattattcagtgatccaaaaagactttaaaaattgagtgacaaagacgaacgaagaccacgattagctcttcccatggcttcttcactgaagaagcttatctcaagctttctacttgtcttatactccaccaccatcattgttgcttcatcagaatctcgatgtaggcgttttaaatcgatcatcagctttggtgattccatcgcagacaccggaaattatctccatctctctgatgtcaatcaccttcctcaatccgcctttcttccttatggcgaaagcttcttccatcctccctccggtcgtgcctctaatggccgtctcatcatcgacttcattggtagctattttttcatctctataggcaaaaccacctgttatcatttgctctaagtctttcttacgtgaacagcaagttatacttcttcctgatctttttttcttatgttgtcttactatttgaacagccgaattcttgggactaccatacgtaccgccttactttggatcccaaaacgttagcttcgaacaagggatcaattttgcggtgtatggagcaaccgcattggaccgagcgtttcttttgggaaaaggaattgaatctgatttcaccaatgttagtttaagtgttcagcttgacaccttcaagcagattttgcctaacttatgcgcctcgtctactcgtggttagaaacttagccttgtcttgttttgttttttaacagaaacgtgcccttgttcttttctatgtctatggactatgatgatgagtctagctagcttggttctaacagggtttatttcgtttcttgtctagattgcaaagagatgcttggagactcgctgatactcatgggagagattggaggaaacgactataattacccattttttgaaggaaaaagtatcaatgaaatcaaagagcttgttcctctaatcgtcaaagctatttcttctgctattgtggtaacaaatcttaacattgccctccagtcacaataataatcacattatattttgtgttttatattttaaaaaattaacacaaaactacaggatttgattgatttagggggcaaaacatttttggtacccggaggcttcccaacaggatgttctgcggcgtatcttactctatttcagaccgtggcagaaaaagaccaggaccctttaacaggttgttacccattgctcaacgaatttggcgagcaccacaacgaacagctaaagacagaactcaagcgactccaaaaattctatcctcatgtcaacatcatttacgctgactaccacaactccttataccggttttatcaagaaccagctaaatacggtccgtgaaatttcaaactctgtcgttgaccctcacggattaattcattaacagatattttgtttgtctttttcaatagggtttaagaacaaacctttagctgcttgctgtggagtcggaggtaaatacaacttcactattggtaaggagtgtggatacgaaggagttaactattgtcaaaatccttctgagtatgtgaactgggatggttatcatttaaccgaagccgcctaccagaagatgactgagggtatactcaacggtccctatgcaactcctgctttcgactggtcctgccttggctctggtacagtggatacataaagggtattctttcagcagtaagaattcattcgttgtaaaaaatcaaagaggaagaaaattatgtgatgatgatgatgatgatgatgattaacaaaaacattgcttgtacggcaagacttgactaatgacaaaacttccgaggatatatggctatatgcatatatcttatcactgaaaaataccacacgcaaatagaaaatcctatatatacggttcgtagcactagttgcactctagttacaatgttgagaaaatctggaagtacgtataattttaagaccattctaagtttataaacagttccctggaagatgttggagaagttttggatgagttgagtgggacaaacgacagctaaggatttaaataatttcataacatccattgaactgaaagattaagaacataatatactatttgggacaacttacaatggatggatataacagatgagaacaagtgaggttcattgattacacattttggtcatttaattttgaaaaggttcaaaattctaaagtcttgctatttagagccagggttcctccggggtcacaaccagagacctattatataaaaaagaaaattatttaaaatttcttatttggattacactaaattaaaagtgattaagacgagagactagcccatttgtatccatgcataaacttaggtgtctttttatacgtggcactaaagtacgacttagccatctaatctaaagtggaagtttctgaagttacttcattgaacactcaatagtcattaataaacctgaccattttcctcaatttactaataggcgttgggataatacataaaatccaataactaatgcctcaaactctgcattagttaaagattctaaaaattgagtaatagagacgacaattctcctatggcttccctcatactatcgcgtgcgtcacatatctccataaccgtttcataattgttctctttctttttcactcattttataatggattagttaaagaatccatttatatgattataataagtaaggaaggccaaatagaaaaaagaaaaagcaacgaaggaatatttcgttattactagtttcacgaattctatcatcgaagaatccaatttcgtgatggagcctccaacttgtctgacgtttctgccgttaacttctttttctcatttctctctttcttactggcataataaatgaaatccaataattgccacatctcttgcattattcaatgatccaaaaagactttaaaaattgagtgacaaagacgaacgaagaccacgactagctcttcccatggcttcttcactgaagaagcttatctcaagctttctacttgtcttatactctaccaccatcattgttgcttcatcagaatctcgatgtcggcgctttacatctatcatcagctttggtgattccatcgcagacaccggaaatattctccatctctccgacgtcaatcatcttcctcaaaccgccttttttccttatggtgaaagcttcttccatcctccctctggtcgtgcctctgatggccgtctcatcatcgacttcatcggtacctaatatttcctctgtttaggcaaaaccacttgtaatcatctatctgctttaggtctatcttgcgtggaaagcaagatagaaaccctacttcacctgagtttttctaatattgtcttactatttgaacagctgaattcttgggactaccgtatgttccaccttactttggatcccaaaacgttagctttgaacaagggatcaatttcgcggtgtatggagcaaccgcattggaccgagcgtattttgtggcaaaaggaattgaatctgatttcaccaacgttagtttaggtgttcagcttgacatcttcaagcagattttgcctaacctttgtgcctcatcttctcgtggttagaaactcagccttttattttgataaacagaaacttagccttgttcttacagggtttctttatttttgtgtttagattgcagagagatgcttggagactcgctgatactcatgggagagattggaggtaacgactttttttacccatcctccgaaggcaaaagtatcaatgaaaccaaactacaggatttgatcatcaaagctatttcttctgcaattgtggtaacaaatctttacacaaatataatcacatatctgttttatactttaacaaattaagcaaccaaactacaggatttgatcgctttagggggcaaaacatttttggtacccggaggcttcccagcaggatgttccgcagcgtgtcttactcaatatcagaacgcgacagaagaagactacgaccccttgacaggttgtatcccacggctcaatgaacttggagagcacgacaacgaacaacttaagacagaactcaaacgactccaaaaactctatcctgatgtcaacatcatttacgctgactaccataactccttataccggttttatcaagaaccagctaaatatggtccgtgccacttaaaactctttcgttgaccctcatggtttaattcattaaccgagatattgttttgtttttttcattagggtttaagaacaaacctttagctgcttgctgtggagtcggaggtaaatacaacttcactattggtaaggagtgtggatacgaaggagttagctattgtcaaaatccttccgagtatgtgaattgggatggttatcatttaaccgaagccgcctaccagaagatggctgagggtatactcaacggtccctatgcaactcctgctttcgactggtcctgccttggctctggtacagtggatacataaaaggagcagttagaattcatttgttgtaaaaaaaaaaaaagaggaagaaaattgtgtgatgatgattaacaaaaagattgcttgtacggcaggatttgactagtgacaaaaatttcgaggatatatgcatcaatcttatcaatgaaaaataccacacgcaaatagaaaatcctatttatacggttcgtagcacgagttgcatgttgagaaaatcctatttataacagttccgtggaagatgttggagaagttttggatgaattaagagggacaaacgacagctaaggattaaataatttcataacatcctttgaactgaaagattaagaacataatacactatttgggaaaacttaaaatactatattacaatggatggatataacagatgagaacatgcatgtgaggttcattgattacacattcatttaaattttgaaaaagttcaagattctatatataaaaaagaaaattatttaaaatttcttatttggattacactaaattaaaagtgattaagacgagagactagcccatttgtatccatgcataaacttaggtgtctttttatacgtggcactaaagtacgacttagccatctaatctaaagtggaagtttctgaagttacttcattgaacactcaacagtcattcataaacctgaccattttcctcaatttactcattggcgttgggataagacataaaatccaataactaatgcctcaaactctgcattagttaaagattctaaaaattgagtaatagagacgatgacgacgactctcctcatggcttcgctcatcgtaagctttctacttatcttatactacaccacaatagtcgttgcctcatcagaatctcggtgtcggcgttacaaatcaatcatcagcttcggtgattccattgcggacaccggaaattatgttcatctctccaacgtcaataatcttcctcaagccgcatttcttccttacggcgaaagcttcttccatcctccctccggccgttactcggacggccgtctcgttatagatttcatcggtacctgatttttcttctctatttttagacaactcggtcactcctctgcttcaggtctctcttgcttgaaccacaagttatcaaccttactagcttctgtgtttttgtaatgttgtcttactatttgcacagccgaattcttgggactaccgtacgttccgccttacttcggatcccaaaacgtgagcttcaatcaagggataaattttgctgtgtatggagcaaccgccttggatcgtgcctttcttgtaaaacaaggaattaaatctgacttcaccaatattagtctaagtgttcagcttaacaccttcaagcagattttacctaacctttgtgcctcatctactcgtggttacaaacttagccttgttctcttccatatctacgatgcattgagctccttctaactttttttctttgggggttcagattgcagagagatgcttggagactcgctgatactcatgggagagattggtggaaacgactataattacccattttttgaaggaaaaagtatcaatgaaatcaaagagcttgttcctctaatcatcaaagctatttcttctgctattgtggtaacaaatcttaacattgccctcccctcaaaaatgtgtgtttcaaattttaacaaattaattaagtaataaaactacaggatttgattgatttgggaggaaaaacattcctggtacccggaaacttcccaataggatgttccacggcatatcttactctatttcagaccgcgacagtagaacacgacccttttacaggttgtatcccatggcttaacaaattcggagagcaccataacgaacaacttaagatagaactcaaacaactccaaaaactctaccctcatgtcaacatcatttacgccgactactacaactctttgtacggactttttcaagaaccagccaaatatggtatgcgccttctaaagcttctaactttgaccctcacgtacggtttaattcgttaacccatgttttatgaattatggtccctttttaggttttaagaacagacctttggctgcttgttgtggagtcggaggtcaatacaacttcactattggtaaagagtgtggagaaaacggagttagctattgtcaaaatccttctgagtatgtgaattgggatggttatcatttaaccgaagccacgtaccagaagatggctcagggtttactcaatggtcgctatacaactcctgctttcgactggtcctgccttggctcttatgatttcagtggataaagatgatttagtagtggctctggcctttgcaagaaaaaaagaagagttgcagagaattgcaaggaatcttggattacaaattaatagtttattaaaagcacttgaagaattaaaataaaaattgtatccaaaaaaattaatggcctgatattcgaaaggaatcttagattatagactggagattcgtctatgtgtatcccatgcataaccttacgtgtcttaaatacgtggcatgaacgtttctgaaactagtgcattttcaaacaattattgatcacacaccaaaaaaacataaacaaaaaaaatttatattttccccagtttactatagtcttggttgcatagtaaatgaaatccaccactgaccatatttagtggtccaaattaaaaagggtgataaaaattgagttacagaaacgacgaagacgattcttcccatggcttcttcactggagaagcttatttcaagctttctacttgtcttgtactccaccaccatcattgttgcttcatcagaatctcgatgtaggcgttttaaatcgatcatcagctttggtgattccatcgccgacaccggaaattatctccatctctctgatgttaaccaccttcctcaatccgcctttcttccttatggcgaaagcttcttccatcctccctccggccgttactcggacggccgtctcatcatcgactttataggtacctaatttttcctctctttttaatgttaggcagaaacgtttgttctcctctgctttaggtctttcttgcttgagcagaaagttagaaaccctatatgctttctgagtttcttacttggacagctgaattcttgggactaccgtacgtaccatcttattttggatcccaaaacgtgagctttgatcaaggtatcaatttcgcggtgtatggtgcaactgcattggatcgtgtgtttcttgtgggaaaaggaattgaatctgatttcaccaatgttagtttaagtgttcagcttaacatcttcaaacagattttacctaatctttgcacctcgtcttctcgtggttagaaacttagccttgtttcttttccatatctatatgatgttgaatcaaggtcacttcgaatgttttttcttttcttttctattggggtttagattgcagagagatgcttggagactcgctgatacttatgggtgagattggagtaaatgactataattaccctttctttgaaggcaaaagtatcaatgaaatcaaacagcttgttcctctagtcatcaaagctatttcttctgctattgtggtaacatatcttcacatatttccctccccctccccttaaaaacgactaattttcactaataaggcaacaaaactacaggatttgattgatttagggggcaaaacgtttctggtccctggaaacttcccattaggatgctatcccgcgtatctcactctatttcagaccgcggcagaagaagaccacgaccctttcacaggttgtatcccacggctcaatgaattcggagagtaccacaacgaacagctcaagacagaactcaaaagactccaagaactatacgatcatgtcaatatcatttacgccgactactacaactctttgttccggttatatcaagaaccagtcaaatatggtccgtttgtttctaaatttgttggcattgaccatcggttgatctcttgaccaacgttttgtggttccttttttagggtttaagaacagacctttggctgcttgttgcggagtcggaggtcaatacaacttcactattggtaaagagtgtggacacagaggagttagctgttgtcaaaatccttctgaatatgtgaattgggacggttatcatttaaccgaggccacacaccagaagatggctcaagttatactcaacggtacctatgcatcacctgctttcgactggtcctgctctggctctgaatcagtggataaagagtattctttcagcagttaaaattcagtttttgtgtaaaaaaggaagaatattatggtgataattggtgaggattaataagaacgagttccttatacggcaagtttttgacataatataatatttgacttttgaagaaaaccataaatgattctatttgatgatgataatgcaaacaagatttaatctctctaaggtgtaaagaaattccaaatacttatgtgacactgaaatgtggtgtaagatacaagctcaagatattgattggtttagttagcaccaaagctccaaatttgcatctacaaaacaattgacatgcaccatcatttgaacaaggtttgcttggaaatgtttgaagatacctaattgattgcctccaagaagataattgttgtgctaatataatcttcttttaaacatagctatcattatcaaagtatttattcttcttccattttcattgtctttgacttaatatattcgtcgttaggggaaaaaacagctacagtgtgtttatacttttccaatatatatacttttttgtcgactttccaatataaattttatgttagatatgaattgagtatatacatactatatacatgtgagaacttaaatttggtgaaaaacaaataacttttttaagtagatgattaggtaagagacatgatatctccttctcctttcggttgcattttatccggtttcactcttttggttttagaaactcgatcataaaccttatatttgtttgcctattctactcttcccctaatggtcgatcaaaacgaaggcactatggagtgttggagcgagaagcaaaaagtttttggtttggtcaaagcaatttttatttttaggttatttgttttttcgaaaacccgaaaaatatatgatttgatgtagtgtagagaccttctagaaataattataaaaataaaaattcataatactatacagtttgaggcaattaagtactttctcttataacggacaaatttgagatattcaggtacatttcctttctacttagcttcaatttgttaagaagttttatagaatgcctcaaactgtatattgcattatgttattttattttagagatacaaatcaatacagaaaagcttagaaattttggtttataccatactttatagttttactaaaaaatagtattatagatacttggatccattcctatatcttattttagttattgagttttacatgaaataaatagaaaataaggaattcaaatttatatatgtaatgaaagttaagatttgcttcttcttttttttgaattgtttgaaagaatttttaggagttttttaaagaatatttcaagaactttgtaagaattttaaatttcttttggatttagagaattttttggttcttgtgttttttaacctcggatttggttgaattttattgggggttcagtttcttcttcaaattaagcttaaaatgatgtttaaaaggtgtacgttaaatcttttaacgggctgttaatgggttaataagcacgatggttagttcatgtattaaatgggctgtataaataggttatatatatttttgtgaaacggtaatttttttgtttatacatgctggattctatttttgtcaaagaatctacaaattaagaaaactttttcttttacgacaggtgtatcactgtatcccgtagaacaatgaaatcattaagattgacacctaattactacattttattttttcatgtacagccaaacaaaattatttcacataaaaaaggggaaaataacttcatgagagagaagttaaataatagaaggaaaaaaatctgattatctttgtctattacctaataacaatattttatagttaaattacacttgattcaaaaaaaataaaaatataggtgaattacactttccatgtttgactaaatatggtaacatgacaaaatctcttaaaagtgtaacggttacaaaatctctcttttaggcaaaaaaaagacagttaaaactgacagaagactcttgtccagccgatgagaagcatcttaagaaatgaactttggacagaatccagtgtaatagcacgtgtaccaatcattgtttctcagttgtcattttcctcatataactgtccatgctttctatcttttaaaatattttactctttttgaattaaaaatatattaccttaaataaaattagtttttgggcagtaaaaaaacaaaacatttttttctgtttatgtaaaagccactgattatagcattgtgtcaattgacagctgtttacagcttgggattgtatttctgtctaaaaatgatatattttagtagatgtttccttgaaaatcaactaaatatctagtatttgcaaaataatgctcagtaattttatataaaaaaaattcttcatgttaataggttagaacatgttgtagaaaaatttggtattaaaacattaacaaaaaaataattaaaattttaatattttccgtgaaaattcattaaaacttttatagttaacaatgtcgtataacgacaacatgaatagtcagtttattcgatgtcgttattcaaaaacaaatactcttcattaatttgataattgtcggcgccgcaatgataattcacacatatttttaaacagtaaatataatgtattttacttatagtgaacttgtttttatgtttataattttgataatttattacaactagtatgatatattaaacatattactaatatcaagtatattacaaaaattgagagtaaattagaggagtagaaaacaaatattttgatttattcacctaaaacattttaaaaaggaaagatacaaaagttgtcaaaaccaaaaagatacaaaacttttaaacacgtggcataaaaaggatagggtatctaagaccttcttcatctgacattgggtatatatatgcctatatggtagacttctcaatatctccttacctctcccagtttccatatctctcactttcttactcatactccagtaagtgtctcttcttttctgttcgtttatatctggttttagcaaattagatcctttcgttttctttgcagttaagctctactgcaattcgatcctacattatatagtgtattataagaaaagagacatatatctatggattctttatgtgattttcaacatataaccatttgtatatttgatttctatgtaatatgtatataaatcctttatatttcttcaagtttttgaatatatttcttcactgccttcaatttactcacacaattcttttttgtctttgattgattatgattttgatcatgtttgttctctttgtataaaaatccttagttttctttttttctcaataatctttgttgtatatagatataaatatatttgatttgatattttgttattcatacatctaaggtgaaaaagtttatcagtattgttattgtgacggatgcactaaaaagttagaggctattttcttgtatactcatactttagaggcttcaagcagttttttaagaaaatatttctgtccaaaaaatatttacttcaaagaaattagaataaaattttctgttttttaaaaggaaaaaaaaggattttttcaaggagaaatttttttttttagaggaaaaagatagcttttaaaaagaaaatttgccctttcctaaggaaaagaaaagtgagccacaagctagtatttaaccagcttcctatcaaggatggttcgcttgttatatgtgaaatttattttatatatacttatactaatatttcaggacacaaacaaaatatttatttttatatctaatattttaatccaaaaatattaattagatgcggacaagttaaattgtcatgatttcatttagaagatagagttttttttttgttggttaaacaaaagatagagtaatttttatctgtttgatttattcccctcaattcatactccatatgatatttgaaagatatataagtagcatgatgttagtatacaaaatttatcgaaagaataatttctgattgtcaaaagtccgtacatatttttatttatcaatttctgattatctcacatatattcttattgtcaatctttcaggtaaacaagtcaagatggatctcgttgatgatatgttgccatttactccttcgtggttccccccatcaccagaaccatttccttcaataatggtaattcttttaaataatttattttcacttttcatgtaaaaactttcatataaacacatataattttcttttttaaatctagtttaacattatttttaaaaatatatatattttatatcgacgataaatcttagtggagatcgaagatatgataggggtctttaattttagtttcaaacaagagagacagattaaacagagctttcttcatgggtttttaacaactgcatctcataagcttttttttttcaaaaactttgtacaaattgtaaacacatactttttttttttattatctaatttaacataatattaaattgttggctttatgcaatcctaaaggagcttctacaagatcctatgacggcagagattgagaactttgatggaatattctctagtcctgcaataagcgaggcgattccctcaacgaatacacaaccgagtgtattcccatgtccagagtcatcaacaatacctcaaatttcacctgacatggtatgttacttacatttttcatatataatgaatgtttactattgattaaatatatttttattgttttatctaagcaacaacaagaaccactggatgattcacatggatatttacaacaatctgatcaacaagatttattaaatccaaacatgctgaattgttatcaagagccagacgtgtctacaatagtaagttatagatttcatttttctttttgattttcagtttttctttttttttgaacatatacattcatgagctagatagaatactatatgctattgccaatgacaatatcttaataactaaattcattttatttcacctaaacagcagcagcaacaacaactcaatttacctggacctttagaacaatctgatctacaacgtttattaaatccaaatatgatgtattctgagccagatttttctacatcggtaagtatagatttcattttctttttccagtaaccagttatttctatttttttttttttggtatacatattcagagtcagattattaaacaatcaatgatatattaaaaaattaaatttgttttcatttttctaagcagcaacaacaacaattactatgcaattcagctggatatttgcaagaatctgatcaccaaggtttattaaatccaaacatgctgaattctttttatgaacctgatgtttctgcaatggtaagttagaaatttcattctttttaaatagtgttttttctgttttttttagtgaaaatacattcatgagccaaatagacttatatgctgtcaaactaaaccataaaagataatacattaataaataatttcgatttcattttgtccaagcagctgcagcaaccaccaccattatacgattcacatggatatttacaacaatcagatcaacaagatttaatgaatcaaaacatgatgaattcttttcaaggggcaaatgtttctacaacggtaagtccgatttcaaatttttccaatgatcagtcacttttaattattgtttgatacttagacagtcataagccatatgaaattgtttttgttttttgtttttttttgctaagcagcaacaacaacaattgttgtgcaactcacatgggcatgtacaaggaaacttatcaaacatacaatcagatcagcaatacttatcgaatcaaaatgcgacggatttatttcaagaaccaaataattctacaatggtaaataaattttttgttttaatattaattttcttgctcaaggattcagttaagtttttgataaatatattttgcatgaaccagatagatattggtcaacagatcgaggaaggaaacaatggatatgcacatcaaccattgattgatccttttgagttaccaaatcatcatcaggagcagtttccgtcagtacctatgtatgtaacaaaatttaatacaaatacaaaactctagtacatacatgtaacactgatctgaaatttctaatatgtctattaattttatgaatttcagatcacaaaattacccgtcatatccggtataccaacatggtccagttggttcacatttcaatatgtacggccaacaaccacctccgctagttttaactaacagagaagaagaacatctcccaccacggaatgttacagacttggccaggtaagatcatctattttccataaatacttgaaaattttctaatgagaaattggaaaagagtcaataatcaagcgcattccccttacaaagaaaaattagaattggtctgttgcttttataattaagtttatgtttttcctctctaatatatcatcataagtcttatgtctcttcttatggggattctataagaacataattctatattcacttgttaaattatttgggttaactaacgcagaacttatactccacaaaatcaaaattctacgatcctttctcaacctcaaatgccgtcaagctctaccaggtttatactattctttaatatattttcttatattattttattagaacatcttcgttggaatatcttattgaaatactcaaaaaaaaaataataattaaaaaaaaaaaagtaagaaagagagatgagtttctcttccgaaaaattttgagaaacgattctcgttaaatttggacaggtgtcacaaaataattagtttaattattaaataacaattaatatatatttttagattaaaatattaactttttttttctttaaaaaacttttcttccatttgccgatggaaatggttttatatataattataaatattatctctctttagatgtggaatttgcttataaatttgtttcactaaatagttgcagttatatatttatttcttaaattatttgggtaatgcagtacttaccatctccaaaatcaaatttctacgattccccctcaatctcaaatgacgtcgagctccactaggtatatgttaattttcatatattattctaaattcattctcttttatatatactttttttttaaattctatctcgctttcagtacagaattttgaattttcttatacattttttcaccaaatagttacagttaaataaaaacataattataatgtatttctttgctaaattatttggattaatcgcaggatttatcctctacaaaatcaaatttctatgattcctcctcaatctcaagtgccatcgagctctactaggtatatattattcaaagttccatagtcatatctgtctctttgaagtggaatctcttatatatttatccactaaatagttacaagtatactaaaccataattgttttccttacaatttaacgcaggacttatcctatagcaaatcaaatttctatgatccctcatcaacctcaaacgcggtcaaggtctaccaggtatatacattattctttactaaaaatattctaaattcaatctctcttgtatgataatttaattgatgtctctctttacgatatagaatattgtcttacatacttgtttcacgaaaaagttacaattatacaagaacataactatgtatttgtttgggttaaagaaggacttatcttcgacaaaatcgaacttctacgaacgctcctcaacctcaaataccatcgagctctaccaggtatcaagtccaaacatatatagtcgatcatgtaatctagtacaagggatttatttagtgtttgtgcactacaatatttttcagcggtgacaattcaatttcatactcatttacttttctcatttctgtaggaatggcaacgtgcaagagttggtaagtcagcctctgccgagctttaggtgccctcaagtagacacttctactcaaataagtcaatgcacaaactcattcactactcccatacaggtacaatattctccattcaatgaatgaaactagttatgtgatcagtatttccttataagcaatttcagtaaatatctaaacatttacacgccgacatgtataattatcaaaaaatgacgtcgagctccactaggtatatattatttgtgctaaaaaagagttattgataacaagtcgacattacagagcagtaatctggggcgtagacaaagaagttatcaaaatcactttgaccatggagaatcatcatcggcttctcaacgaaaggtaatattttctatatattccaaaatagacagaattagtgagaaaactaaaattaatattcctatttaattaaataatgcagaggatgatcttgcccaaaatgaatgttgattcaactgtagccaatcctgttgagccaaggttaatactttcccatctttttcatttacacattttctttcttttttttcgtaagactctcgatctaaaatcattctcattaattagtagtggaaatgtaattcttatgaacataatcataatcacttctacatatatattgttatgacactatttcatcatttattaacaaggaacaaaatacttaggaacataattaataaataccttttacttttgatttcaggctagtaaatgaattatatagtccaagatatgaaagcctcggtatagctatcgatcccttcttgagaaaattccattttcaaagatgagaaaacggtaacaattcttaaatttagctttttattttactcagtatattacaacttgctgtggttgaatcttgatgattttttttttcttgccatgtttctacttaggagaatctctttctcgagttcgcttcttagacgtgccataagtttcaccgcttacggtttcagttgatgtttcgattctcgaatgtctatggttctatgtttattttttatttttaatggcataagaccatgttttatgagttacttgatgtaatacctaaactttcattttttgaaatgatatatacattcttattaaaatataataaaaaaatcttgatgtattattttaaagtaattttatcaatgaataagatccatttaacattaatgagcatgtgaaacttatctaacatacctttgaagcatattataatagttcatcctttatggttgtcttttacattaatctttttcctagtgatatctggacgaagacagatggtttcagtataagattcataaaatagttactttgatcaataaatttttcatttagaaaaaaaaattgctgacatatatattactcatcttttttcattagatatataaatatttatactcgcacccaaaaccaacatcgtactggtgctccttatagagttaaactcatggccattatctgcatgatctaaacaagagtgagtataaatacttagtgcgagcgaatatttccgtccatatgcaacacaaagcgatgaaccactaatttatatgtattttcaaccaatcaattatcatagcctagactacacatgcatattccttcaactagctacggttcactattctaggctatgataaattactatatcggcctaaagcataagtttgtgcacaaaaataaaattaataataattaacttgtgacctaaaaagcatataagtataactactatatttagctttatgaaccggccgggcctcccatctaatgtcgccttcaaagtttcatttgtggaagctcacatgttttctgatcactgtagccaccgaagtcttaggctcagagtctttccaacgttataaatcgatcatcagcttcggtgattcgatttcggacaccggaaactttcttcatctctccgacccaaatcatcttccccgatggccgcctcattatcgacttcattggtatgaacttctttttacaccatcccatattcgcagtttaaatcaaaacttcagaaatatttttcagtttttagtatgaataatcaagattcaacaagtgttcaaaaaaaaaaaaaaaaaaaaaaaaatcaagatccaattagtcaacttaatttgacagctgaattcttggggataccatatatttccccttactttggacataataatcaaagctttgagaatggaatcaacttcgcggtggctggagcaaccgcggtggagcctgaattgcttcaagagaaaggaattactgctaattacatgactaatgtaagcttgattgttcagctaagcatcttcaagaaaattttaccaaacctctgtggctttccttcaggtgattcctcacaaatctcaactcatcttggaacacaagggacaagcataagccaatctttacttgttttcaagattgcagagagattctcgaaaactcgctgtttattgttggtgagattggaggtaatgactataactacggattcttgattggaaaaagcatcccggagattaaaaaaaatagtcccccttgttatcaatgctatttgctcaacaattgtggtaataaaaatctttcttaaatcctgttcaatgatccttccctttttcttgttttgtttgggagactaagaattgaaccttgcaagcatgaacaacatggtacaggaattgttcaatttgggagccagaacgtttctagtgccaggaaagtttccaactggatgttctgctgcatatttaacgagatttaggacaacagatatgtaggactacgatgctttaaccggatgtttgaagtggcctaatgagttttctcagtaccacaatgagcagcttcagacagaactcaatagactccaaaaactctatcccattgctactatcagatacactgactactacgacattgtgttacatttttaccttgaaccgacgaaatatgttgccctttcttattccgtccccttaactaacatatatacagtattgtcacaattatttatattaccaaatttactcttttgaaggatttatggagagaccttcactgttgataagccatgtgggtctagaggagtgaaacattgtcgagttccttctgagtatgtgacgtgggacggttttcatttgaccgaagccgcctaccgatggattgctaagagcttgcttaatggaccacttgcgtctattgctttggccgctcctgcattttcctttttaagctgatctacggacatagatcactttcccttgagcacttgggacctgttgctgcgagtaaactaaaatcacgttcttcgtttaatcacattgattgtttttttttttttttgttggtttctctttactttgttttcaaattaatacacaatctcttgcttgtacaacaagtttatgggagtaaatctttaaactaatttttatttgtttataaaaattttctgaataattttctctctaagaatgtaattttttttattttttttgataaaaataaatgttgatatattaaaatagccatactagattatgatttgcagtggaacccaagcaagtataaatcatggtagataatccgtaactagctcgtaaataacctgcaaataacttatcactcatgaataacatgaaaataatctgtagatattttctagaggttggttagaacttagaagtccacctacccatcttaaaacgatacaaatacaaaattttctagtccataaaaagttttgtagtcttggcccaccattatttataaggcaacaacaaaatcattgagacatatactcaccagtcctttcttttgttgtttacgaaaaaacgaaacaagatgttttgtaaaataatataacattctaaaagccgaaagataaaaatttcaccgcggacttctcgtatggcgtcactagattctctagtgagcttctttttatctaccctttttgtcacaatcgtgagctcacaaacgcagtgccggaatctcgagtcgattatcagtttcggtgattcgattaccgacacaggaaacttggttggtctctcggatcgtaaccatcttcctgtgaccgcgtttctgccgtatggagaaaccttcttccaccacccaactggccgttcctgcaacggccgtatcatcatcgactttatcggtacttctctttctatgtaacttgacatgtaagtaagtgactaggaatgtaaatctgatgaagtatcgaatcatgatcttataattggtctcagttggagtgttttagacgtcttcaatctctgagaagaatccaaaaacacaaaaaaaaactgatagttgcgtttgaacctctgttttcttgtgtgggcacagcttttccgatttataaaaatctggattttcttgattagggtttcttatgtagactctttctctgatttggtttttcttgatctgcaagttaacagtagtatgagaccttaagtgattctccaattttctatttacagctgaattcttagggttaccgcatgtgcctcctttttatggatctaaaaatggaaactttgagaaaggagttaatttcgctgttgcgggagcaacggcactagaaacttccattcttgagaagagaggaatttattatcctcacagcaacatcagtttgggaattcagcttaagaccttcaaggagagcttaccaaatctatgtggttcacctacaggtactgaagatcaacttttcccttttctagctagtggagtcatgattattacgttattgcagtgaattgacctcacttgtaatgggtttaattctttgcttttagattgtagagatatgattggaaatgcttttattatcatgggagagattggagggaatgattttaatttcgcattctttgtgaacaaaaccagtgaggtcaaagagttggttccgttggtgatcactaaaatttcttctgcaattgtggtaaacattcttgatcagcgagtccctagaacgagtaattttttcaaaaaactgttatgttttttgttttgtttttgtgttttggtactgaatgttgaatctaggagttggtcgatatgggaggaagaacattcctagttcctggaaacttcccgctcggatgctcagcaacgtatttaacattataccaaacatcaaacaaggaagagtatgatcctctaacaggatgtttgacatggctgaacgatttttcagaatactacaacgagaagcttcaggcagaactcaacagactcagtaaactttaccctcatgtcaacatcatatatggtgactactttaatgctctgttgcgcctttaccaagaaccatccaaatttggttagctttcttgatccttagtttaattacctaaaaacccaagttcattgattcaatttgataattgagttaatcattcaattcattgtacaactagggttcatggacagacccttacctgcttgttgcggtttaggaggaccgtacaacttcaccttaagtaaaaaatgtgggagtgtaggagtaaaatattgtagtgatccttcaaagtatgtgaattgggacggcgttcatatgactgaagctgcatacaaatggatagctgatggattactcaagggtccgtatacgattccttcgttccattggttatgcctcggctcaaaaattaagagcaaggagtcattagacacgtagtgttcttttgacaaacagctgaaacaagcttgttggagctctgagagataataagaaaacaaatacgttcttaagtgctttccatggatattttatatcattgtgtattgttgtttgagagagagagagagagtggttaagtgttagtagctaactcatgtgatatcttcagagagatcttagattagaccggtcggagatgcactgttccaaaaatggaccacttcatgagtggtagaaataacagaataggagatgataaaatgggcaaggagttgaacggatcaatttgacttctagtcttcaatacaaaaccaaactactctttacaaatcaatatattaatacgatttttataataattttaattataagactaagatttgtaatttagtggtttttgttattatcgtagttatgttattatccggtttcaaatcagcgtaatacgtgttattgacaaataaatgaagtgaaattcaacatcaaattaaaatatgggaaagaacaaataacctacaaaataactcgtaaatagcttgcaaataagccgcaagtacatattttgtagatggtggttagaagtccaagtacgcgttttatagattggtggtcacgcctaccaatacaaagtcttgttgttattagaaagttaattgctttatttattacaactagaaatcctcgtttagtcatgagtcatcggtccatccctccacaattggcctctatataactttcccaaaacgaatcatttgtaaaataaaaaaaaataagatagaaactcactcctgacctctcgcatggcgtctctagactctctagtcatctttcttttttctactctttttgtcactatcgtgagctcggaaacgccgtgcccgaatttcaagtcgatcatcagtttcggcgattcgattgcggacacgggaaacttggttggtctctctgatcgtaaccagcttcctgtgactgcgtttccaccgtacggagaaaccttcttccaccacccaaccggtcgttcctgcgatggccgcatcatcatggactttatcggtacttctctttctatatgactcgagatgtgagtgaatatcaaattatggtccttgagaagaatccaaaagataataatcaaactgataattgtgtttgaacctatgtgagaagaaaccaaagagttattaattagttatggctctttcttcctctttgtttttgttttatctaaactcttcctatgctttcttgttttgtggcaactttttctacctaatttgtattataatctgaaaatatggagatatttattgcgttacttatgtaaactctttctctgtttttatttttcttgaactgcaagttaacagtatgagaccttaactgattgtctaatttttcctttaatagctgaatttgtggggcttccttatgtgcctccgtactttggatctaaaaatagaaactttgataagggtgttaatttcgcggtagccggagcaacggcactgaaaagttcctttcttaagaagagaggaattcaaccacacaccaacgttagtttaggagttcagctaaagagcttcaaaaagagtttaccaaatttatgcggctcaccatcaggtagtgaacaacaatttttccttttgtcggtggaatgattattatgtattttagtgaactaatactcacttgtatatgttttttagactgtagagatatgattggaaatgctttgattctcatgggagagattggagggaatgattataatttcccattcttcaaccgcaaacccgttaaggaagttgaagagctggttccatttgtaatcgcttctatttcttctacaataacggtatacatttttttcttgaattcttgttttgttagtcttaagaacgagtgaaaacagatttctagctatctgctgatttgtttgtcagagtttataatgagtttgttccattgggacttaatgttgaatccaggagttgattggtatggggggtaaaacctttctagtgcccggagagttccctatcggatgctcagtagtctatttgacattatacaaaacatcaaacaaggacgaatacgatccttcaacaggatgtttgaaatggttgaacaagtttggcgaataccatagcgagaaacttaaggtggaactcaacagacttaggaagctctaccctcatgtcaacatcatatacgctgactactacaactctctcttgcgcatttttaaagaaccagccaaattcggttagccttcttgattcctccactgaatctacacaccctaagtcgtcactgatttagtattgacaatttttcctatcaattatactgtcagggttcatggaaagacccttccctgcttgttgcggtataggaggaccgtacaacttcaacttcactaggaaatgtgggagtgtaggagtgaaatcttgtaaggatccttcaaagtatgtgggctgggatggcgttcatatgactgaggctgcatacaaatggatagctgatggaatactcaatggaccatatgcgaatcctccttttgatcggtcctgcctcagatctgagattaagaaggagtcattgtacaatcaaagtactctgacacaagcttgtgtgaaactttgacagacaaaagtgatgataagaatattccctctattccttattaatccaaattcaagcaaacaaatttgttgcaaaaaagatatgtttctaggtttctatgtatttttttattacttattgatgatgaattgtagaccttaattttctttttcttttttacttttattggtttaaatttgttaatcataaattgatgtatttataatcaatatttaatatattttctgaatatgtgtgaaaagcttaaattttggattaatcaaaatcagagagagtgattttgaaatgttcttttggcctttccccggagaaatcaataataaataaaaatgtcaaaatagatatttatcaaagtgcccgttttgaacgatacaaatacaaaaatttctaagccatgcaaagtgaaatgcattgccccaccttctttattagacaacaagaaacgctcattgtcattgagtctcagccatttggttctatataacttttccaaaacaaatacactaaacctttataaattagtactcgataaattaataatttctataaattaataaattcttagtttaattttcattgatgttcaaagatttttttttttttcactttttcatgtttataatttccaatgcaaaattaaatatttttttttaatttgttttgaccatttgtattttgctgtttgttttctgattggtggaatagtttttaattagataaaaaaaatgtttaatttaaattagataaaacaaaaattttaatgatttcttaatgtatgtgccaaaatttaaaacatcaagggaatatgtttttaagtgctcttgttggctggacatgtagggattgcttaccagatggcgttggcccccggagatatacaagtcccgaacttcgtaatcaataaataaatatttaaaagttgtgcaaaatagatattttctaatcagcatgattaagtgtcaaagtgctcgttttaaacgatacaaatacaaagtaaattgccttgccccacccttattcattagatagttcaggaaacgatcattgagtgatgactcattgatccataccagccttttgattctatataacttttctaaaacaaaatattttgaaaatcataataaaataaaaaataaaaagagagaaattttaggacttgtcgcatggcgtctctagattcttatgtaaactatttttcagttttcttgtttttccgcaacgttttcgatttaatttgtataaatatatgaaaacatctgaattcttagggtttcatttttttttcctgacacggtttctttctctgtttttctatttcttgatctgcaagtcaacagtatgagacctatagtgatcctccaattttccttcttacagctgaatttttggggcttccttatgtgcctccttactttggatctaaaaatggaaactttgagaaatgagttaataatggcgtaaacggagcaacggcattggaatgttcctttcttgaacagagaagaatttttagttctcacagcaacatgccaacatcagtttagatattcagctaaggagagtttaccaaatctatgtggctctccatcaggtagtgaagattaatttcactttttcattggagtgattataatgtattttccatgaattgagctctattgtatttgtttttagactgtagagattaacaatgctttgaattttatgtgagagattggagggaatgattataatatttccatcaggtataacatttctttcaaagtagcctcaaagttgcaaccactacatcaaatatgaacaaatagacaaacacggcaagtgaagcccttctctagtctgatctctacctaaaaattgattattgttttcttgtctcctagcgaatagaaaagagaaggagtacaaccttccggcctctcccatggcatctttagattctcttccggcgatgaagctcgtgagattcatattatctacccttttggtcacttctgtgaactcgcaaacgcaatgccggaatttcaaatcaatcattagtttcggagattcaattgctgacactggaaacttgcttggtctctcggatcctaacgatcttcctgcttccgcgtttccgccatacggagaaaccttcttccaccacccaaccggtcgttactccgacggccgcctcatcattgatttcattggtacgtttatttacataaggtgtgagtgtagaaaaaaagagctattaattattattaattacccttactctcttttttcattctatattagctttcttgaatagcaagtttgattgtataaaacctaaaaccatctacatacaaccatattaagtgttgttgagcctccttattggttcctcaacttacagctctctcttgtttttttttttcggttatgttcacagctgaattcttggggtttccgcttgtgcctcctttttatggatgtcaaaatgcaaactttaaaaagggagttaatttcgcggtcgcgggagcaactgcattagaaccttcctttctagaggagagaggaattcattctactatcaccaacgtcagtctaagcgttcagcttaggagcttcacggaaagtttacctaacttatgtggctcaccttcaggttgggaagctcaactttttcttctctgtttttggtgtttcatgttttatatgatcaaactatcaaaatttgattttcttatatgcttatattgctataagttgtaatactttattttgctgttttgtatttagattgtagagatatgattgaaaatgctttgatactcatgggagagatcggaggaaatgattataattttgcactcttccaacgcaaacccgttaaggaagttgaagagctggtaccgtttgtgatcgctactatttcttctgcaatcacggtaaacattcttgatcagccagttccgggaatgactaaaacatatttgtatctacgctgataattagtttggtaagaaaaaacacatgtacatgttacgttgttttgaaactgaatgttgaattcaggaattggtttgcatgggaggaagaacattcctagttcctggaaatttcccgatcggatactcagcatcctatttgacattatacaaaacatcaaacaaggaagagtatgatcctctaacaggatgtttgaaatggcttaacgatttctcagaatactacaataagcagcttcaggaagaactcaacggactcaggaagttgtaccctcatgtcaacatcatatatgctgattactacaacgctttgttgcgccttttccaagaaccagccaaattcggttaggcttcttgaatcctccaagagatttcttcacaaccaagtcactcatttgattcactaattaattaaccgattttattatccaatcagggtttatgaacagacccttgcccgcttgttgcggtgtaggaggatcttacaacttcaactttagtagaagatgtgggagtgtaggagttgaatactgcgatgatccttcacagtatgtgaattatgatggcattcatatgacggaggcggcatacagattgatatctgagggcttactcaagggaccgtatgctattcctcctttcaagtggtcttgcctcagctccgagattatgaataagatgtcattagatactcagattcttgatgaacagctactacaaggttgtctgaaagtttgagagacaagagaaagagtggaaaaaacatataggttcttaagtgtttgtgtcttcttcttttttgttccgggtaacggtgttaattagccttaggtgcatcatgcatgtgttggatcatgtattatctttgtattgtattgttttcgttagtttgggtaagagttagtatccttaattgttggaccatgtacactgtcatatataatttaactatatacaaaacaattaaatgcataatttacgcatcgcgtggccaaatttctagaatcaaatatggttttatggtaagaaatcagaacactatgtaaatttgattaacgatgggactaattcagaaaaataaataaatactaagtctaaagaaatagttgggaactggcggaaaaaaaaaagttggagagtctttaggtctaaacacatgttacatgtataaaaggaatttaacaaggttgtatacgtagttacgtacattaggtgtttctctgttcgtgtgtacaaccgcatatttttaatctttggatcatatagtgttgatgaatgtgtacatcaactattggagatataatgtattatgctgtatacgtacaacagaatgttccaaaaatctttcttcttttttttattttattttaaatcggccccaatggtgctataataaacgagaaagccaaaaatactacaaataaaagcctcagtgatgggtttatcgtttaagcgaaagtgacgaaagagaggaaactagacagatacgacagtaagttttggtcatcgaagatacgtattgggatccgctcacaagaatttgttgtgtgtctttttgctaaaaggccaatacgaaaatcgttgataattcgtttcatctaccgcaatcactttatccttgaccaaaaaaagaaagaaataactcaaatatcaattttataatcaaataaaaacttaaataatcaaccaatatacccgtgtgtgtcaaaccatactgcatcccaataattgatcttttaatcattctttattatcttatccttggtattgtggctagtggggtattttcaaaagacttttttgacaaatcaacatcacactattaaaaaagggatctcgacggagaccaaccttcagctctctggcaatggcgtatcccggttcgcctatcttgatgaagctcctcgtcttcatctttttatcaacttttgtagtcactaacgtgagctcggaaactaagtgccgggagttcaaatcgatcatcagtttcggagattccattgccgacactggaaacttgcttggcctctcagatcctaaagatcttcctcacatggcgtttccaccgtatggagagaacttcttccaccacccaactggtcgtttctccaacggccgcctcatcattgatttcatcggtacttttgactttacagttttacttaaggtgtgagtaagtaagtgtgtaaaaaggtgaaactaaaagagttattaaatttcttcagccctttctttgttttcatcttctttatggttttacttgattaccaagtttgattgtgtaaaacctgaaatcatctaaatacagaaccattaagtgtggttaagtctttatgaccaacttacaggctgtaagttacagctcttagttcatgttcttttctttggttctgttcacagctgaattcttgggtttaccgcttgtgcctccattctatggatctcataatgcaaactttgaaaagggagttaatttcgcggtagggggagcaaccgctttggaacgttcctttcttgaagacagaggaattcattttccttacactaatgtgagtttaggcgttcagcttaatagcttcaaggagagtttacctagcatatgtggctctccttcaggttgggatgattaactatttcttttttgttttatagtgtttactgttatctatggttaggatatcaattctgatttctagtgcggttgctcttcaaaaaaaaaaaacattcgttctgtttttggttatgcttagtgatatcacttattgtatataatggcttactttatattcttgttttagactgtagagatatgatagaaaatgctttgattctcatgggggaaattggagggaatgactataactacgcgttcttcgtggacaaaggcattgaagagatcaaggagctgatgcccctggtgatcactactatttcttctgcaatcacggtaaacatttatctttcttaatatctcatcaagttcttgatcttctctgtgaacaacgaatattcgatagcacaggagttgatcggtatggggggaagaacatttttggtgcccggagagttcccagtcggatgctcagtattgtatttgacatcacatcaaacatcaaacatggaagaatacgatcctttaacaggatgtttgaaatggctgaacaagtttggtgaaaaccatggtgagcagcttagagcagaactcaacagactccagaagttgtaccctcatgttaacatcatatacgctgactactacaacgcgctgtttcacctttatcaagaaccagccaaattcggttagacttcttgatcgttttactgaacctaaacaaacaagtacattgatcagtttgctaaatattgagttaattatgcaatcaggattcatgaacagacctttgtccgcttgttgcggcgcaggaggaccgtacaactataccgtaggtaggaaatgtgggactgatatagttgaaagttgtgatgatccttcaaagtatgtggcttgggacggtgttcatatgactgaggctgcgtacagattgatggctgagggtatactaaatggaccgtatgcgattcctccttttgattggtcttgccgtagctctggagttaagaacagtgggtcatctgacacatagaattctttgatgagaaactgatacaagttggtcaaaaaattgagaaaaggatactgataaaaacatgtatgttccttagtattgtcttggatcatgttcatgtattgtatcatgttgttatgtgaaataatttaaaagggtatcatgttcatgtatactccactccatatagagagtaagtaaccggcaacggcattgaaaacttggagataaattggaatatttgttgattcaatttggaaaatggcaaaaacaaattatttagccaagtgaacatttgttgattcagtttggaaaatggcaaaaatgagaaagagacaatcatgctctcatttgtgcccatccctaaaccacataaagataccctgtctagtctctattgcatctaataattgatctttgttttttttggactttattgtctccgagcgaatagtggctctttccaaaaagtcattttgaaaagtttctaacctctaggccaccactcatggctactctgttcatgaagctggtgagcttctttctaattctatctactttttgtctcactactgtgaactcggagccacagtgccataatttcaaatcgatcattagtttcggcgattctattgccgacactggaaacttgctcgccctctccgatcctaccaatctccctaaggtcgcgtttctaccgtacggagaaaccttcttccaccatccgaccggccgtttctcaaacggccgcctcatcatcgatttcattggtacgttttctttagttgaagtgtgagtgagagagtgtgtacgaaggtagagattcagatcttagttaatacggtacgaccagagactttcctgaaataattacatccacacaaaaatagttccaaaaagttgggagcatgtactattttggattagcatgacctgttcaagtctagctccatagactttctctattttggtttcacccttcttacaaaaacacatatgaataattgattttaatgtataagcacgtggaaattatgtagtttgttgttaatctaaacacctaccacgcaattagctctgtagtatgtgtgatacgtattacagtggataaatgttttttgcttcatgttgaaaattttgtgagaagaaaccaaaagatctttggctctttcttatgtaactcttcccctgtcttattgcttgtgtgtaactcttcctttaacttcttcttcttcttgatgcttttgcttgagtaacaagtttgattgttgaaaacctaggatcatctaaataaatacagagaagccttattgatgatttctcaacttatagttcttttctttggttctgttcacagctgaatttttgggttttccgcttgtgcctcctttttacggatctcaaaatgcaaattttgagaaaggagttaattttgcggttggaggagcaacggcactggaacgttcctttcttgaagagagaggcattcattttccttacaccaacgttagtttagccgtacagcttagtagcttcaaggagagtttgcctaacttatgtgtctctccttcaggtttggaagatctactttgcctaacttatgtgtttcctgttttacatgataagaacatcaaatctgatttcttaggctcccatcatatcgtactaaaagttatgaaatgttccacttcaccttaatattagcctcatggactagtatttgaaaggcaatgattggagcatttttgattattcttttaaaggttctagctatagacctagtattcatcttttggttaagaagtagaaagtcaaaacaaaagtgggaaaaaggttctgttttgagatgtgcttagagatcctacccgttattctgttaaactccaacacgcaatgaatcaagctcacttgtaaaacaatggcttactttggaatcttgtttttttagactgcagagatatgatagaaaattctttgattctcatgggagaaattggagggaatgactataactacgcattctttgtgggcaaaaacattgaagagatcaaagagctggttccgcttgttattgaaactatctcttctgcaatcacggtaaacacttctcttttgaatatagcagtccaactaaatattaatatttgaaagcataaaatatacaggagttgattggtatgggggggaaaacatttctggtgcccggagagttcccgctcggatgctcagtagcctatttgagtttatatcaaacatcaaacatagaagaatatgatcctctaacaggatgtttgaaatggctgaacaagttttcagaataccacgacgagcagcttcaagcagaactcaacagacttcagaagttgtaccctcatgtcaacatcatatacgctgactactacaacacactgttgcgtcttgcccaagaaccagccaaattcggttagactttttcatccttctactaaacccaaacaaagaatttcattgattaactgtttctaattatcaaatcagggttcataagcagacccttgccggcttgctgcgctttaggaggaccgtttaacttcacattaggtaggaaacgtgggactcaagtacctgaatgttgtgacgatccttcaaagtatgtgagttgggatggtgttcatatgactgaagctgcatatagattgatggctgagggtatacttaagggaccttatgcgattcctcctttcgattggtcttgcctcagctctgaaattaagaacacacagaattctttgatgaacaactgatgtatgttggtcaaaaatttgagacaagaatactgataatatcatgtatgttcctcagtcctgaacatttggtcatttggatcatgtgttgtgtgttactgtgtttgacaatctgtattgttgttatggtaaataacggttgtgttgtatcacacactataacaggtttacgtttacctaaacatattaagttataattaatgggccacaggcccatattatataatgtagttgggttttgttgacttgaacggctccagtaaattaccggtctgatgattgattgacgaataaagcgaataaaccatcggttatacaatttaaccgggtttatgacaacttcagagaccttatatcagatttcaaatcttcttcttcttctccgcgacgacgacgagcttcttcgattgatgactgtaataatctttcaagtttaattgcatcgcataaagataaagcccaatcctttattcttctaaaaccctaatttagcgtttcgagaagccgcaaaattgagttttgttatttcaaaaaatcgaaacctaaaacctcaattctctgggaatttcaaattctcttttcagtgtaatcgtcgtctcttctcaattcgacctaccgagtaagtttatcttcttccatttaagttaaattttgactctttccagcatccatggtctcactgtgcttctctttccttcacctcttcattgggagctttgaatagcgttttaatctatgtttaatatagtaatgtcattgacactgtgaatgatgctgatggttgttcttgtatgtgcacatgaattgtatttctgcgtatcacttgcattactgacgttaatctagtttatcaatcaaattctaattcagtgattttattgacttgcaattctttgccaatgtattgttgaccattttctttcttgatccattcatgtgcacgtttaagaacatccttgtaaggtcatgctttgtgatttacctttcttctgttatgccttgtaagtaagtatagttttttttggtacttttgttcacaggctgtagtacgtttgctgctatcagaaagagataatcaagaagcagaaataaaatggagagtgatagtgagaacagcgagggagagagcagggaacataagaccactacttcagtggtaccaagaggtggccccatttatctgccaaacatggttggaaatatttctaccacccctgaattcaagtcttcatttctcaatgtactacaggatttggaaactcatttatctctggactctacttcttcttcttctcagcagtttgatgtctcgtatgtattcttgcatcaattggctctctttttcatcagttaaaatctggttttttcaatacattaagttatttaattgggatgatttttgtttgatgcagaattgattctctcaagatttatacggatgaggaactcacagagatggctatgaaggaagcctttccggtacgttgcctaatcgtttgttgatttacttctcttcttctgctgtctttcaagtgtgagaacttgtgtcttgatgagtttggtttcttatttcattacaggaagattacctttcccaagaggagctcgaaccatctttaaacgtttctcatcagtaagtatcattaccagcctttcgttatttcttgatataatgtttccccttgtgtgaatccttagtaaaaacgaattggcatgtagcttctttctattagtgtgcttcgatggttgttaagttttttgtttacagtctcaattggttctggttcagccgtgcagccgtgctagctcccaatatatttcgaaagtcttgtagacaatatatatgttaatagcttagtcatgattagaaatcttccagagacaaagtatggttgacgtagacaattgtagaacgataacaaacagttaccttctcggtatgctgcagtgaaaatccattagctgggagggcaaaaaggaagaggacagtaaagaataccgaggtaaagaagaggacactaaagaatactgaggtaatgaagatgacagaaaagaagactgaggtgagtttatgtaacatggtcttggcatggctgggaattactatcttttcttttccagaggctatttgtgtttaggatctcttgataccaaatttacatggtcttgccatgatggctttattgcattttgttatgattgatatggtcatttttttgtttttaggaagcttatcttgtgaaagtcgagcagcttgctaaactcaaacaaaagcaggaggaggataaagcagctgtgacactgcactgcttcaggtctgtaattactattgcatagtctggtttgctgtgtaccttgtctgttttatgctgatgtttcttcgatttgaacttgttttcagcaagaccagtgagactggtaaagatgtagttgcacctccagaaggttttgagcagatgcaatctcttaggttcatagataataattacacggcaagtgatttccccttgcaatgtctttttagtgttgattatgctagtccaagttctaaagtgctcatgcatcctgctaagtattatcttcttcctatttaaacagaagttgaagccatctgacatccagggacaagtggatccgctatttcctgaagtcattttgtgtgttgagatttataacagtcgcaaggttaaggtactgtattgttctgtaaatctttgatgcgggatatagaatattgactgaattctcgtacatactaacaatacttgtgtaaatttttgttcagacccaagaatttttggttctaggacgtcaaatgttgactgagttgaaggacaatattcactgtgctacagaccaggtgatgcaaaaggctggaaagtatgatccctctggatacttcctcatagaagtaagaattcatctcgtttctgtatcttttgatgtttaagtaagtttaacttctgcgtcgctggtttaatcagatgctttttgctcgtctaggatgtctttcacaatgatttaaggaatccctcggctaaagattacagctatcctattttagattggctttggaactcgaaagatgaagctcttaaaaaatgggaatgtgttttaaccggcgaattacagaaaaagcagaaactggttctaggtgaagcgaaatctgtggatttacctcgttacagaactgcagacatgcagagtacacacttctgtgatataagattcagagtcggagctagttatgtctattgtcatcaggtaaaatcttctctctttctcttttggttctttaatttctcatcttgtgaaaacatttggcacagactcgagatattcactgattaaaaaccgtggaacagggagattgcaagcacacgattgtgattcgagacatgaggatgagtcatccagaggacgttcagaacagagcagcttacccgatcatgttctggccgaaacgtaggattcagaaatgcggtgtttgtaagataaagagagcttcaaaggttgcagtggatgacaagtgggcaagcgagaacagtagctatttctgtgatgtttgttttgagcttctacactcagaggaaggcccacttaactgtgacttcccagtgtttgattatgtgcatgagtaaagatgatcttctttgttgcataatatatagataggaagaatacgaagaaatagttggcattgcaagaagaagacatgatgagtcttgtcttggtaaatttgttgcataattggatatatataaaagattttcttgaaatgatgacatgacaactatttctgaatttagccattgtcaaaagctctcttcgttttgaagcggtagaaaattagaaatgtttatgtttagccaaattcaaaagtagaggagattccttgaatttctgttttctctcgctgtcttctcaatattcaaaactcaaattggtgtcttctccaatttagaaaacgttaaaaacaagagaaaataaaactaaactttttagaaccaaaaaaaataaaaataaaacgcatttgggatttctcattgtcatcccaagttcttggaacagccaaatactttttcattattagtttataatcgtctcataaaggcaaaaaggtttatttcggaaataagatgggagcatatagagcagaagacgattatgattacctcttcaaggtggtcttaaccggagattccggcgtcgggaaatctaatttgttatctcgtttcaccagaaatgatttcagccacgactcacgtgcaaccatcggtgtcgaattcgccacacgaagcatccaatgcgatgataagatcgtcaaggctcaaatatgggataccgccggccaagaaaggtacttacactctaaaattactctcaaaagttatttaacgtttgcatgatgaccaaataaaattttaaaaaattaggtaccgagccatcacgagcgcttattaccgaggagctgttggtgcattgcttgtttatgacgtgacgcgccacgtgacattcgagaatgttgagagatggctaaaggagcttagggaccacacggacgcaaacattgtgatcatgctcgttggcaacaaagctgatcttcgtcaccttcgagccatctcaaccgaagaagctaaagcttttgcagagagggagaatacctttttcatggagacttctgcacttgaagctgtgaatgttgataatgctttcactgaagttctcactcagatttacagagttgttagcaagaaggctcttgaagctggagatgatccaaccactgctttgcctaaaggacagatgattaatgttggaggccgagatgatatctcagccgttaaaaaacctggttgctgctctgcatagacacacttctcacttttttcttgtacttttattactaaacactaacatttttcaatattttcctgcaaatttgtatacattcttggaattatcagacaaacaaagttcacactcaaaagtttttttagtttcggttccactctttacaatcgcttgcttcgtgctctctctgcttctaccgatcgatgtacttctgaatgttcatgaagatgttccattgttgacgcgctcctttttccccatctgcaaatagaggttaaaacagcctaatcagtttatatcatatgagcgtgaaatcttaaaaattgtacttcaaaatgtttctttcaactgtgagttttgtctagtaatgaaaaagctaaagccaacatggaagcagaagaagaagaattgcagattttgagtgcaacacaaacttaggaattatccaaacatacttggtacttgagaaatggaccttccatattctgatatttcatgctaatgtactgaaaccaattgcgaaaacagaggactatggaactcatttataatatcactttgtatggattctatatatgtgagtagcaaaatgaacctaaccatgaaccgtcttcgcttttttttctgcataaagttggataatattcagctcaaagaaaactagattctgatcttaatcatctataagtaaacaaaacagagtccatacagatttcgatatcttaggatcaagcaaagagtagttcaataagaaccaaggatctacataaagttataacaatcctaaaatgtcaatggcatactagagcaaattcaacaattttcttaatatcagttacactagaacaaagacgaacttcgttccaattccctaatcctaaactctcataatcaagaacaaatatcaaaccataacaattgagttactcagtttgaaaaaaacgaatctcaccagagaaaaaacgcagatacggaatcatttttcttcatcgcgaggcttagaactcgattgaagagaaggaagaggattagagcccttgatgatccaaccgagtccgaagaaaaaacctccagctagaatcgcagttccccaagcgtgtgagtaccatttactgtattgccgaatcgcgaatttccattgctcccttaacgtcgcctgatccggattcaccgactcaggcgggttataataccttttacccgaacccgatccgatctccggcgtcggttttttcgccgacgaagaagtattgttgttgttatcagggatttggctcttctccgccattgtcgtcgtctagattcttttcttcagatgttgaaaatcattttcagaaaatgtgtatttaactctaaagccactgacacgtgcaagataatgccacgtggcagtttctcgtactaaaacgattccgtttcattgtttcgtctacctctaaccccaccttagggttttagtactctctgtgatttttatctgttcgtcaatggcttccatttctactgcttcttcttcttcttcacttctcttcccttctcgaaatttcaaatcgattccattacttccacaacagagaagctctgtgtctttcgttcgctgtttttctaagaattcttcaacagaggaggacattctccgtttcgtggccgaatctgatgggaaggcacttccatgtgtgcggacgtacgagaataattcagctcggctcagtctcgttggtactgttgcttttgatcaggctttaaccgctgctgctgctgacggtggtgaagccgccgatgaccatcttcgtgagaatgttcctgttatggtggtcgagactgttttccccggaggatctgatcctaaggctactgtgtcaaccagattggtcagtttatgtaatccgtgttctaattttgattctacatttcagcaattgagttttgacatttgaaggtaacatttttttgaacagttcttgcctactaagaaagttaaagagcgagctaaaagattgcggcggtctctctctgaggatctttctagtggagacttgtcaaagaacatacttgcgatgacttttaggcaagttgttttgcggcagctgtggaacttccagctagtgttatttgcacctggagctgaaagagaaatgggagatttcgaaaaccctcgagaggttaacttcgctttgatgtgaatgtttctagtgatactggccttgcaagtgggaattgatactgataggttcagttttcttattcatttggtatcagcaggtttctacatccttcactcttagctcatcagatgaacgggttatatctgttattgcagaagttatatgcatctccgctcttcaaagcaccgagaagcatttcctcgatgattatctgggaaaagctaagtttccgtttatgaagtggttatctaaacgcaggaggattgcttcaagagactgctcggttgtcctgcataagttatttgatgatgagcagaataccaaacttttgcttgagtattaccagtcaaggaaggaaaatttcaaacttgcagacacaaagcaaagaagccggtggtgggacttatctgccaattccaagttggaaaaaattggtggccctggatttagtagttgggcaagtgaatatttacccgcatatcgactggaaatggatagtacaatacttgcagacttaaagcttgagggctggagaaagtccagtgagaataagtgggaagttcttctaactcactcccaaatggtatgacgttttctctttatttatgtaacctacccgtctatgcttttgctgtgtgtaagactagaaattgcaatgttgctctcgctctatatatttgtctggctagcagtctaggttgttgctgctatatgataacatggagctatgttatattgttctgtttagtatagataaagacgtcgaatgttgttcaaagtttatggatagaccgtctttagacaatgttgaatccgtcataagagttgtcattcccatttacctatacacttaacgagatgctgatatgttgtgtgggaatgaacctagcaagatgaaagaatattatcaatcatgggaataaaatttcctgtactgctgcattttgtgtgctctgtggtgactaaggtgtctgtttttgtgcatgttatttcttgaggcctctacattcctgagacttgtataaaactcttaggttggattagctgaagcattggatatttactttgaagacacatattcacttcccaggaaacagctaccatgtgatgttcctggaaattatgcaaacttacccaatgaaaaggtaatgactactggactgctaaaatttagccaatctttctgatattatactttggtgtctgttattgtgtatgtaatcagaaccaattgccagtccttgctatattactgtctgtatataatccgtattctccatgataatcacttgctctgtctaattgtgtgcttcattacagctgcctgatgaaatatgttaaatatatttgtagtctgcagaatatattaatgtttactattagagtttttaccattattttggagacatgttatgagttaataagattggcttctttggtagctttttacctgtcaaacttatgttcacttctttggtttgctcattctctattgacagaaaggattgtctttgttgaaattcatatctgtcaccatggccagtggaatttttcttcttgctgtgagtgctgcagcccaattctgtcttcctcagaaaagcgagaggaagtatcccggaaaacgccaagagattttatggtcagagagtgaattgttatctcatcaatcttcagattcctctgaggtatggattaccaaaacacgttgtattcatatagatgtgtacgacaacaattgcacgtagacattaatagcttttcaggacagctctagttcatttgatgatcacataagattaagtactggtgcagcctttttttgtaaatcccttgccatgaataagttaacccatccaaaaagtaaagacaatccaagacctatatatatttcatgtctaatgttatttggttaataatttttgcatgagtatggactctctatactgagaatgagagaatgagatcaaccttttattattttttgtggtgctttttcctgtttttctcggaaactaaattctgaaacctcaaatgagcagttggattcattctgcggattactcgtcaacaagctcaaggatgcctacagctgggtaggggagatcacactagaaagcagcataggtgcctggataggggaagtacctgactacttgaaagaaaccagcagagctaagtctgttgaagatcacattgttacaagctcgtctcttctggaaatactcaatgaagacgcaaaggcatctgcgcaagatatcgctacttaccaggtaattccagtgaattatgatgaattgaattcttttaagtggactactacttcatcttcgtctggttctttaatggaagcaggtagttttatcatccgaaggtaaaatcatagggttccaaccgacaagccgggtggctgtgaatcactgggctgctaatcctttagctagagaactttatggaggaaaaaaactcaagcctggtaacacaccatggttcttctttcaattccttaaattcaatgctattcgtatccttttaagtttatctgattatgtgttgtgtcattctttgctttgcagggctgattgagcctggtcttaagagtcaccctcccaaaaaagtagttgtgttggaattattaatgtctgtgaattcagatcgtccttttgcattggtcagaccattattgccacaataagcatagcgaagttcctgtctctctttagatgaattttagtacaatatatgtagaatatgatttgattgattgcttgtaacacttggcgtctatgatatgcaaatatcttaagaagagtgagaacgtgattacatgattcttgaaacgatgcttaagattttgaagctctgcagagaatttttattaacaaaaccccaaatctgaaacatagactaagtaagagcaatgatctcattgaacaaggtcctgattctataagaacaacactgatactcaaaaccgtatttccccatcggttacataatttgtcatctgcattatatcgcagaagagagtcgaaaatgcatcaaaatatataaaccggaatgtcagtaaatatgtcttcacctccatagactgaatcttaaaaagcagtctccttcgtcacatttactattcctaactccaggacagtcttcagcatccacttcttgttatatatacataatctccatagatagacagagaactattatataagagaaaaaaaagatacgagtcatgaaaatccattactttgccctacgatatgtagaagcttcttctgctgctgcctaattaaatggtaagcaaacagctttttaaacctgagtttttccacattcgtctcaggggatataatagtcgcttagatttccgaccagatagttaaactcttcacctactccatagtcatttgcctgctctactgtgttctgaacattcccggtggcgacttttgtgctcacttttggtcttcctttgatgcagcgtttgttgttgttggtggtgttagtggtattgttttctggagggaactcagctgtgagtcttcccatctgcttctgcagatcagccactgagtcgtttgagactttgccttttgaagtcttcttcccgtcaacaagcttgagctcgagcctgtacaaggcacaagcatcacacttgttgatctcatattcgtaaagatgccattcgaaatggtgcagaggctgtggatccatgtagtaagatctcttcagccctccaaactcgaccatgatctgtttacgtgactcgtgccaaccacgaccattgtagtctggtaaagatctttgctttctgttcccgctctcaaaggccctccttggcttgtcaaagaatagccactcccttagtgtctcactctccagaaccgtgagatcaaagagctctacagtcatcaagatttgagtatgatcagctcaagaatggtgatcaattaacatacttgtgaatgaattc
